(19) United States
(12) Patent Application Publication
(10) Pub. No.: US 2023/0414685 A1
(43) Pub. Date: Dec. 28, 2023

(54) LACTOBACILLUS PLANTARUM PDA6 HAVING NEUROLOGICAL EFFECTS AND COMPOSITIONS INCLUDING THE SAME

(71) Applicant: Pouda Biotech LLC, Radnor, PA (US)

(72) Inventors: Jun ZHANG, Xian City (CN); Xin XIE, Xian City (CN)

(21) Appl. No.: 18/323,234

(22) Filed: May 24, 2023

Related U.S. Application Data
(60) Provisional application No. 63/347,279, filed on May 31, 2022.

(30) Foreign Application Priority Data
May 26, 2022 (CN) 202210585573.X

(51) Int. Cl. A61K 35/747; C12N 1/20; A61P 25/22

(52) U.S. Cl. CPC A61K 35/747; C12N 1/205; A61P 25/22; C12R 2001/25

(57) ABSTRACT

Provided are a Lactobacillus plantarum strain, Lactobacillus plantarum PDA6, and a composition thereof. Also provided are methods using Lactobacillus plantarum PDA6 or a composition thereof for treating anxiety disorder or depression.

### REFERENCE TO AN ELECTRONIC SEQUENCE LISTING

[0001] The contents of the electronic sequence listing 760288_401_SEQUENCE_LISTING.xml; Size: 3,271,698 bytes; and Date of Creation: May 19, 2023) is herein incorporated by reference in its entirety.

### TECHNICAL FIELD

[0002] The present disclosure relates to a Lactobacillus plantarum strain having neurological effects, Lactobacillus plantarum PDA6. Specifically, the present disclosure relates to a composition, including a pharmaceutical composition, which includes Lactobacillus plantarum PDA6 and a culture thereof. The present disclosure also relates to methods using Lactobacillus plantarum PDA6 or a composition containing Lactobacillus plantarum PDA6 to cause a neurological effect in a patient.

### BACKGROUND

[0003] The incidence of anxiety disorder and depression is increasing year by year. Unlike anxiety, which is a normal psychological response that can help people cope with the changing external environment, anxiety disorder is a pathological mental illness. Patients experiencing anxiety disorder often feel fear that is not tied to a specific external stimulus, or more intense or different type of fear for a longer duration than consistent with reality. For example, patients experiencing anxiety disorder may have an intense and disruptive fear of dying in the absence of any actual threat. Anxiety disorder often also produces a physiological response, such heart palpitation, chest tightness, dyspnea, nausea and vomiting, and sleep disorders, which can seriously endanger the patient's physical health and amplify or lead to other mental health disorders. See, e.g. Tully P J, et al. (2016). “Anxiety and Cardiovascular Disease Risk: a Review.” Curr Cardiol Rep 18(12): 120.

[0004] The pathogenesis of anxiety disorder is not fully understood such that there is no ideal target for drug discovery. Most drugs currently on the market or in clinical trials for the treatment of anxiety disorder exert an effect on nerve conduction and primarily target γ-aminobutyric acid (GABA) receptors or 5-hydroxytryptamine (5-HT) receptors. GABA and 5-HT are both important inhibitory neurotransmitters in the central nervous system of mammals (Wong C G, et al. (2003). “GABA, gamma-hydroxybutyric acid, and neurological disease.” Ann Neurol 54 Suppl 6: S3-12 and Deakin, J F W (2003). “Depression and Antisocial Personality Disorder: Two Contrasting Disorders of 5HT Function.” Springer, New York pages 79-93), and decreases in the concentration of these two neurotransmitters in the brain can cause people feel strong anxiety. Drugs, such as benzodiazepines and non-benzodiazepines, targeting GABA and receptors can reduce anxiety, presumably by mimicking the effects of GABA and 5-HT or by increasing their concentration in the brain. However, current drugs exhibit effects for only a short time after dosing and have many side effects, particularly with the type of long-term use required to treat anxiety disorder in most patients. These side effects include daytime fatigue, sleepiness, dry mouth, nausea, uncoordinated physical movements and other symptoms. In severe cases, patients may develop a dependency on anti-anxiety medications. Accordingly, use is often limited to short-term acute treatment of symptoms. Therefore, such drugs should not be the first-line medicines for clinical treatment of anxiety disorders or associated depression.

### SUMMARY

[0005] The present disclosure provides a novel Lactobacillus plantarum strain having neurological effects, Lactobacillus plantarum PDA6. In addition, the present disclosure provides a composition comprising Lactobacillus plantarum PDA6 and a culture thereof. The present disclosure further discloses methods using Lactobacillus plantarum PDA6 or a composition containing Lactobacillus plantarum PDA6 for treating anxiety disorder or depression.

[0006] In one aspect, the present disclosure provides an isolated Lactobacillus plantarum PDA6 strain deposited at Guangdong Microbial Culture Collection Center (GDMCC) under Accession No. 62262.

[0007] In another aspect, the present disclosure provides a composition comprising Lactobacillus plantarum PDA6 or a culture thereof and an excipient.

[0008] In another aspect, the present disclosure provides a method of treating anxiety disorder, comprising administering to a subject in need thereof a therapeutically effective amount of the isolated Lactobacillus plantarum PDA6 strain or a composition thereof.

[0009] In a further aspect, the present disclosure provides a method of treating depression, comprising administering to a subject in need thereof a therapeutically effective amount of the isolated Lactobacillus plantarum PDA6 strain or a composition thereof.

[0010] In a related aspect, the present disclosure provides an isolated Lactobacillus plantarum PDA6 strain or a composition thereof for use in a method of treating the human or animal body by therapy.

[0011] In another related aspect, the present disclosure provides an isolated Lactobacillus plantarum PDA6 strain or a composition thereof for use in a method of treating anxiety disorder or depression.

### BRIEF DESCRIPTION OF THE DRAWINGS

[0012] In order to more clearly describe the technical solutions in the embodiments of the present invention, the appended drawings used in embodiments are briefly described below.

[0013] FIG. 1 shows the treatment scheme for the mouse anxiety model as described in Example 2.

[0014] FIG. 2A-2D show the frequency of entering the central area and the duration of staying after entering the central area in the open field test as described in Example 3.

[0015] FIG. 3A-3D show the immobility time and the average immobility time in the water after the mice were forced to swim as described in Example 4.

[0016] FIG. 4A-4B show the changes in the content of BDNF and 5-HT as described in Example 5.

### DETAILED DESCRIPTION

[0017] Additional aspects and advantages of the present disclosure will become apparent to those skilled in this art from the following detailed description, wherein illustrative aspects of the present disclosure are shown and described. As will be appreciated, the present disclosure is capable of other and different aspects, and its several details are capable of modifications in various respects, all without departing from the disclosure. Accordingly, the descriptions are to be regarded as illustrative in nature, and not as restrictive.

[0018] Where values are described as ranges, it will be understood that such disclosure includes the disclosure of all possible sub-ranges within such ranges, as well as specific numerical values that fall within such ranges irrespective of whether a specific numerical value or specific sub-range is expressly stated.

[0019] The present disclosure provides a Lactobacillus plantarum strain having neurological effects, Lactobacillus plantarum PDA6. In addition, the present disclosure provides a composition, such as a pharmaceutical composition or a nutraceutical composition, which includes Lactobacillus plantarum PDA6 and a culture thereof. The present disclosure further discloses methods using Lactobacillus plantarum PDA6 or a composition containing Lactobacillus plantarum PDA6 for treating anxiety disorder or depression in a patient.

[0020] Lactobacillus plantarum PDA6 disclosed herein has one or more of the following characteristics:
[0021] a) acid resistance,
[0022] b) bile resistance,
[0023] c) no hemolytic activity against red blood cells,
[0024] d) weak antibiotic resistance,
[0025] e) capable of increasing expression of brain-derived neurotrophic factor (BDNF), 5-hydroxytryptamine (5-HT), and/or γ-aminobutyric acid (GABA) in the nervous system of a subject when administered to the subject,
[0026] f) capable of treating anxiety disorder,
[0027] g) capable of treating depression,
[0028] h) potentially fewer or less severe side effects (e.g., daytime fatigue, sleepiness, dry mouth, nausea, and/or uncoordinated physical movements) than conventional anti-anxiety disorder or depression drugs (e.g, benzodiazepines), and
[0029] h) useful as an active ingredient in a pharmaceutical or nutraceutical composition.
   Lactobacillus plantarum PDA6

[0030] In one aspect, the present disclosure provides a Lactobacillus plantarum strain, Lactobacillus plantarum PDA6.

[0031] As used herein, the term “Lactobacillus” refers to a microorganism belonging to the genus of aerobic or facultative anaerobic gram-positive bacillus widely distributed in nature. Microorganisms belonging to the genus Lactobacillus include Lactobacillus plantarum, etc.

[0032] The Lactobacillus plantarum PDA6 of the present disclosure was obtained by isolation from the intestinal tract of wasp. After isolation and purification, whole genomic sequencing confirmed that the strain is Lactobacillus plantarum, belonging to Firmicutes Lactobacillales, Lactiplantibacillus, Lactobacillus plantarum. The novel isolated Lactobacillus plantarum PDA6 was deposited at Guangdong Microbial Culture Collection Center (GDMCC), Institute of Microbiology, Guangdong Academy of Sciences, No. 59 Building, No. 100 Xianliezhong Road, Yuexiu District, Guangzhou 510075, China, under Accession No. 62262 on Mar. 4, 2022.

[0033] The term “isolated” refers to the state of a substance or microorganism separating from its naturally occurring environment. In certain embodiment, at least 50%, such as at least 60%, 70%, 80%, 90%, 95%, 97%, 98%, or 99%, of the materials in the naturally occurring environment other than the substance or microorganism of interest have been removed to generate an isolated substance or microorganism. In certain embodiments, an isolated substance or microorganism is at least 50%, such as at least 60%, 70%, 80%, 90%, 95%, 97%, 98%, or 99% pure. In other words, at least 50%, such as at least 60%, 70%, 80%, 90%, 95%, 97%, 98%, or 99% (by weight) of the isolated substance or microorganism is the substance or microorganism of interest.

[0034] The invention further provides a mutant, a variant, and/or a progeny of the deposited Lactobacillus plantarum PDA6 strain.

[0035] As used herein, the term “mutant” refers to any bacterium resulting from modification of the parent (i.e., deposited) strain. For example, a mutant may be a bacterium resulting from genetically modifying the deposited strain.

[0036] As used herein, the term “variant” refers to a naturally occurring bacterium derived from the parent (i.e., deposited) strain. For example, a variant may be a bacterium resulting from adaption to particular cell culture conditions.

[0037] As used herein, the term “progeny” means any bacterium resulting from the reproduction or multiplication of the deposited strain. Therefore, “progeny” means any direct descendant of the deposited strain. As such, the progeny strain may itself be identified as the same strain as the parent (i.e., deposited) strain. It will be apparent to one skilled in the art that due to the process of asexual reproduction, a progeny strain will be genetically virtually identical to the parent strain. Accordingly, in one embodiment, the progeny may be genetically identical to the parent strain and may be considered to be a “clone” of the parent strain. Alternatively, the progeny may be substantially genetically identical to the parent strain.

[0038] The mutant, variant or progeny may have at least 90, 95, 98, 99, 99.5 or 99.9% sequence identity over the entire length of the bacterial genome with their parent strain. Furthermore, the mutant, variant or progeny will retain the same phenotype as the deposited parent strain.

[0039] As used herein, “identical” or “identity” refers to the similarity between a DNA, RNA, nucleotide, amino acid, or protein sequence to another DNA, RNA, nucleotide, amino acid, or protein sequence. Identity can be expressed in terms of a percentage of sequence identity of a first sequence to a second sequence. Percent (%) sequence identity with respect to a reference DNA sequence can be the percentage of DNA nucleotides in a candidate sequence that are identical with the DNA nucleotides in the reference DNA sequence after aligning the sequences. Percent (%) sequence identity with respect to a reference amino acid sequence can be the percentage of amino acid residues in a candidate sequence that are identical with the amino acid residues in the reference amino acid sequence after aligning the sequences and introducing gaps, if necessary, to achieve the maximum percent sequence identity, and not considering any conservative substitutions as part of the sequence identity. The algorithm used herein for determining percent sequence identity is the BLAST 2.0 algorithm, as described in Altschul et al. “Gapped BLAST and PSI-BLAST: a new generation of protein database search programs,” Nucleic Acids Res. 2007, 25, 3389-3402, with the parameters set to default values.

[0040] As shown in Examples 3-5 below, the Lactobacillus plantarum PDA6 is capable of causing a neurological effect in an animal, such as alleviation of symptoms of anxiety disorder or depression. Without limiting the mechanism of action of the present disclosure, such effects may occur, at least in part, via producing GABA and/or as described in Mu, C., et al. (2016). “Gut Microbiota: The Brain Peacekeeper.” Front Microbiol 7: 345.

[0041] In some embodiments, the Lactobacillus plantarum PDA6 may cause fewer side effects or less intense side effects in a patient than an anti-anxiety disorder drug that targets a GABA or receptor, such as a benzodiazepine or non-benzodiazepine. Side effects include daytime fatigue, sleepiness, dry mouth, nausea, uncoordinated physical movements, or the like.

[0042] In some embodiments, the Lactobacillus plantarum PDA6 may be able to colonize the intestine of a patient, and may have resistance to acid and bile salts.

[0043] As used herein, the term “acid resistance” refers to the property of withstanding high acidity. If probiotics are acid-resistant, they can be prevented from being degraded or damaged even when exposed to strong acidic conditions in the stomach, by consumption through oral administration.

[0044] As used herein, the term “bile resistance” refers to the resistance to digestive enzymes in bile. Bile is made in the liver and stored in the gallbladder, and is a weak alkaline greenish-brown liquid that helps the digestion of fat in the duodenum of the small intestine, and contains various enzymes that help digestion and absorption by emulsifying fat. Bile is one of the major causes of reducing the effect of probiotic administration as it acts on probiotics ingested through oral administration.

[0045] The Lactobacillus plantarum PDA6 of the present disclosure may not exhibit a hemolytic activity against red blood cells. Hemolysis refers to the destruction of red blood cells and the release of hemoglobin to the surrounding area, and is an action by which the red blood cells are hemolyzed by enzymes produced from harmful bacteria in vivo. Therefore, the Lactobacillus plantarum PDA6 is recognized as a stable microorganism that does not cause hemolysis in the blood vessels even if it is administered in vivo.

[0046] In addition, the Lactobacillus plantarum PDA6 of the present disclosure may have a weak resistance to antibiotics. The antibiotics may specifically be, but are not limited to, ampicillin, clindamycin, gentamicin, kanamycin, erythromycin, ampicillin/sulbactam, chloramphenicol, or streptomycin. Accordingly, when the Lactobacillus plantarum PDA6 is used in pharmaceuticals, health functional foods, feed additives, etc., it has little or no resistance to antibiotics, and thus, the probability of causing related pharmacological effects or environmental problems is low.

[0047] Specifically, drug resistance genes in Lactobacillus plantarum PDA6 are provided in Table 1. Lactobacillus plantarum PDA6 may have weak resistance or no resistance to antibiotics or other drugs other than those connected with the resistance genes of Table 1.

TABLE 1
Lactobacillus plantarum PDA6 Drug Resistance
Genes (as identified by AMRFinderPlus, NCBI)

| Protein | Gene | Element | Element | | |
|---|---|---|---|---|---|
| Identifier | Symbol | Type | Subtype | Class | Subclass |
| SR1_g_00924 | ampC | AMR | AMR | BETA-LACTAM | BETA-LACTAM |
| SR1_g_01871 | blaOXA | AMR | AMR | BETA-LACTAM | BETA-LACTAM |
| SR1_g_03051 | Vat | AMR | AMR | STREPTOGRAMIN | STREPTOGRAMIN |
| SR1_g_04339 | merP | STRESS | METAL | MERCURY | MERCURY |
| SR1_g_04371 | merP | STRESS | METAL | MERCURY | MERCURY |
| SR1_g_04372 | merA | STRESS | METAL | MERCURY | MERCURY |
| SR1_g_04442 | silP | STRESS | METAL | SILVER | SILVER |
| SR1_g_04444 | SilA | STRESS | METAL | COPPER/SILVER | COPPER/SILVER |
| SR1_g_04445 | silB | STRESS | METAL | COPPER/SILVER | COPPER/SILVER |
| SR1_g_04446 | silF | STRESS | METAL | COPPER/SILVER | COPPER/SILVER |
| SR1_g_04447 | silC | STRESS | METAL | COPPER/SILVER | COPPER/SILVER |
| SR1_g_04448 | silR | STRESS | METAL | COPPER/SILVER | COPPER/SILVER |
| SR1_g_04449 | silS | STRESS | METAL | COPPER/SILVER | COPPER/SILVER |

[0048] In some embodiments, the Lactobacillus plantarum PDA6 bacteria may be modified using recombinant techniques to contain an antibiotic susceptibility gene or other gene that facilitates destruction of the bacteria after introduction into a patient.

[0049] In more specific embodiments, the Lactobacillus plantarum PDA6 may be provided as a probiotic.

[0050] In order to stably maintain the Lactobacillus plantarum PDA6 of the present disclosure for a long period of time, the strain may be stored by dissolving the cells in a storage solution prepared by mixing a certain amount of glycerol in water at −70° C., or may be freeze-dried by for example suspending the cells in sterilized 10% skim milk, but methods of maintaining the strain are not limited thereto.

Compositions Containing Lactobacillus plantarum PDA6

[0051] In another aspect of the present disclosure, there is provided a composition (e.g., a pharmaceutical composition or a nutraceutical composition) including the Lactobacillus plantarum PDA6 bacteria, a culture thereof, a concentrate thereof, or a dried form thereof and optionally an excipient.

[0052] In certain embodiments, the composition may comprise, consist essentially of, or consist of isolated Lactobacillus plantarum PDA6 bacteria. In other embodiments, the composition may be in a formulation for administration to a patient. In certain embodiments, the composition and/or the excipient is not naturally occurring.

[0053] The term “excipient” refers to an inactive substance that serves as the vehicle, carrier or medium for an active substance (e.g., Lactobacillus plantarum PDA6 bacteria or culture thereof). An excipient may be included in a composition for the purpose of long-term stabilization, bulking up solid formulations that contain potent active ingredients in small amounts, or to confer a therapeutic enhancement on the active ingredient in the final dosage form, such as facilitating drug absorption, reducing viscosity, or enhancing solubility. Excipients can also be useful in the manufacturing process, to aid in the handling of the active substance concerns such as by facilitating powder flowability or non-stick properties, in addition to aiding in vitro stability such as prevention of denaturation or aggregation over the expected shelf life.

[0054] Exemplary excipients including cryoprotectants (e.g., glycerol, trehalose, maltodextrin, skim milk powder, and starch), bulking agents, fillers, diluents, anti-adherents (e.g., magnesium stearate), binders (e.g., saccharides including sucrose, lactose, starches, cellulose, microcrystalline cellulose, hydroxypropyl cellulose, xylitol, sorbitol, or mannitol; proteins including gelatin; and synthetic polymers including polyvinylpyrrolidone (PVP) and polyethylene glycol (PEG)), coatings (e.g., hydroxypropyl methylcellulose, fatty acids, waxes, shellac, and plant fibers), disintegrants (e.g., crosslinked polymers including crosslinked polyvinylpyrrolidone, crosslinked sodium caboxymethyl cellulose, and sodium starch glycolate), flavoring agents (e.g., fruit extract), glidants (e.g., silica gel, fumed silica, talc and magnesium carbonate), lubricants (e.g., talc, silica, fats), preservatives (e.g., antixidants like vitamin A, vitamin E, vitamin C, retinyl palmitate and selenium; amino acids cysteine and methionine; citric acid and sodium citrate; and synthetic preservatives like the parabens (e.g., methyl paraben and propyl paraben), sorbents, sweeteners, and vehicles (e.g., dimethyl suloxide) for liquid and gel formulations.

[0055] In some embodiments, the composition is in the form of a liquid, a suspension, a dried (e.g., lyophilized) powder, a tablet, a capsule, a suppository, or an enema fluid, or a frozen liquid, suspension, or enema fluid. Dried compositions may be produced by air drying, natural drying, spray drying, freeze drying, lyophilization, and any combinations thereof. Compositions in the freeze dried state may include a protectant, such as a cryoprotectant, which may include ethylene glycol, dimethyl sulfoxide (DMSO), glycerol, and any combinations thereof. Such compositions may be reconstituted with a solution, such as a buffer, prior to oral, nasogastrical, or rectal administration.

[0056] In a liquid or suspension composition, the concentration of Lactobacillus plantarum PDA6 bacteria may be 10³ CFU/mL to 10⁸ CFU/mL, 10⁴ CFU/mL to 10⁸ CFU/mL, 10⁵ CFU/mL to 10⁸ CFU/mL, 10⁶ CFU/mL to 10⁸ CFU/mL, 10³ CFU/mL to 10⁷ CFU/mL, 10⁴ CFU/mL to 10⁷ CFU/mL, 10⁵ CFU/mL to 10⁷ CFU/mL, 10⁶ CFU/mL to 10⁷ CFU/mL, but is not limited thereto. In a solid composition, the amount of Lactobacillus plantarum PDA6 bacteria may be 10⁵ CFU/g to 10¹³ CFU/g, 10⁶ CFU/g to 10¹³ CFU/g, 10⁷ CFU/g to 10¹³ CFU/g, 10⁸ CFU/g to 10¹³ CFU/g, 10⁵ CFU/g to 10¹² CFU/g, 10⁶ CFU/g to 10¹² CFU/g, 10⁷ CFU/g to 10¹² CFU/g, 10⁸ CFU/g to 10¹² CFU/g, 10⁵ CFU/g to 10¹¹ CFU/g, 10⁶ CFU/g to 10¹¹ CFU/g, 10⁷ CFU/g to 10¹¹ CFU/g, 10⁸ CFU/g to 10¹¹ CFU/g, 10⁵ CFU/g to 10¹⁰ CFU/g, 10⁶ CFU/g to 10¹⁰ CFU/g, 10⁷ CFU/g to 10¹⁰ CFU/g, 10⁸ CFU/g to 10¹⁰ CFU/g, 10⁵ CFU/g to 10⁹ CFU/g, 10⁶ CFU/g to 10⁹ CFU/g, 10⁷ CFU/g to 10⁹ CFU/g, 10⁵ CFU/g to 10⁸ CFU/g, or 10⁶ CFU/g to 10⁸ CFU/g by weight of the composition.

[0057] In certain embodiments, the composition is provided in unit dosage form. The composition may comprise Lactobacillus plantarum PDA6 bacteria in an amount ranging 10⁵ CFU to 10¹³ CFU, 10⁶ CFU to 10¹³ CFU, 10⁷ CFU to 10¹³ CFU, 10⁸ CFU to 10¹³ CFU, 10⁵ CFU to 10¹² CFU, 10⁶ CFU to 10¹² CFU, 10⁷ CFU to 10¹² CFU, 10⁸ CFU to 10¹² CFU, 10⁵ CFU to 10¹¹ CFU, 10⁶ CFU to 10¹¹ CFU, 10⁷ CFU to 10¹¹ CFU, 10⁸ CFU to 10¹¹ CFU, 10⁵ CFU to 10¹⁰ CFU, 10⁶ CFU to 10¹⁰ CFU, 10⁷ CFU to 10¹⁰ CFU, 10⁸ CFU to 10¹⁰ CFU, 10⁵ CFU to 10⁹ CFU, 10⁶ CFU to 10⁹ CFU, 10⁷ CFU to 10⁹ CFU, 10⁵ CFU to 10⁸ CFU, or 10⁶ CFU to 10⁸ CFU per unit dosage form.

[0058] The composition provided herein preferably contains Lactobacillus plantarum PDA6 bacteria or culture thereof in an amount sufficient to colonize the intestine of a subject when administered to the subject.

[0059] In certain embodiments, the present disclosure provides a pharmaceutical composition comprising isolated Lactobacillus plantarum PDA6 bacteria and a pharmaceutically acceptable excipient.

[0060] A pharmaceutically acceptable excipient includes pharmaceutically acceptable cryoprotectants, bulking agents, fillers, diluents, anti-adherents, binders, coatings, disintegrants flavoring agents, glidants, lubricants, preservatives, sorbents, sweeteners, and vehicles or carriers.

[0061] In certain embodiments, the pharmaceutical composition includes at least one cryoprotectant selected from the group consisting of glycerol, trehalose, maltodextrin, skim milk powder, and starch. The cryoprotectant of the present disclosure may be contained in an amount of 0.01% to 20% by weight or 0.01% to 10% by weight based on the total weight of the composition. Specifically, based on the total weight of the composition, the glycerol may be contained in an amount of 5% to 20% by weight, the trehalose may be contained in an amount of 2% to 10% by weight, the maltodextrin may be contained in an amount of 2% to 10% by weight, the skim milk powder may be contained in an amount of 0.5% to 2% by weight, and the starch may be contained in an amount of 0.1% to 1% by weight in the composition.

[0062] In certain embodiments, the excipient may include at least one or any combination of diluent (Tris, citrate, acetate or phosphate buffers) having various pH values and ionic strengths, solubilizer such as Tween® or polysorbate, carriers such as human serum albumin or gelatin, preservatives such as thimerosal, parabens, benzylalconium chloride or benzyl alcohol, antioxidants such as ascorbic acid or sodium metabisulfite, and other components such as lysine, glycine, glucose, dextrin, skim milk, mannitol or succinylated β-lactoglobulin. In addition, the excipient may be contained in an amount of 50% to 95% by weight, 75% to 95% by weight or 85% to 95% by weight based on the total weight of the composition.

[0063] Selection of a particular pharmaceutical composition will depend upon a number of factors, including the condition being treated, the route of administration and the pharmacokinetic parameters desired. A more extensive survey of components suitable for pharmaceutical compositions is found in Remington's Pharmaceutical Sciences, 18th ed. A. R. Gennaro, ed. Mack, Easton, Pa. (1980).

[0064] The route of administration of a pharmaceutical composition eventually chosen will depend upon a number of factors and can be ascertained by one skilled in the art. In certain embodiments, the compositions can be further formulated using pharmaceutically acceptable carriers well known in the art in dosages suitable for oral, nasogastric, or rectal administration. Such carriers enable the pharmaceutical compositions to be formulated as tablets, pills, capsules, liquids, gels, syrups, slurries, suspensions, enema formulations, and the like, for oral, rectal or nasogastric administration to a patient to be treated. Formulations can include, for example, polyethylene glycol, cocoa butter, glycerol and the like.

[0065] In some embodiments, the pharmaceutical composition may further include one or more additional therapeutic agents, such as other anti-anxiety disorder or anti-depression agents.

[0066] The pharmaceutical composition can be administered in any sterile, biocompatible pharmaceutical carrier, including saline, buffered saline, dextrose, and water.

[0067] In certain embodiments, the present disclosure provides a nutraceutical composition comprising isolated Lactobacillus plantarum PDA6 bacteria or a culture thereof as an active ingredient. A “nutraceutical composition” refers to a food product or a food supplement capable of providing not only a nutritional effect and/or a taste satisfaction, but is also capable of delivering a therapeutic (or other beneficial) effect to a subject who consumes the composition. The nutraceutical composition may be in form of a probiotic composition, synbiotic composition, functional food, food supplement, or food product, including beverage.

[0068] The content of Lactobacillus plantarum PDA6 or cultures thereof in the nutraceutical composition may be based on the age or weight of the subject, desired effects, etc., and may be, for example, used in an amount of 0.0001% to 1% of the weight of the subject, such as 0.0001% to 0.001%, 0.0001% to 0.01%, 0.0001% to 0.1%, 0.001% to 0.01%, 0.001% to 0.1%, 0.01% to 0.01% to 1%, or 0.1 to 1% of the weight of the subject.

[0069] A nutraceutical composition of the present disclosure may further include a mixture of one or more of an organic acid such as citric acid, fumaric acid, adipic acid, lactic acid, etc.; a phosphate such as potassium phosphate, sodium phosphate, polyphosphate, etc.; or a natural antioxidant such as polyphenol, catechin, tocopherol, vitamin C, green tea extract, chitosan, tannic acid, etc.

[0070] In certain embodiments, isolated Lactobacillus plantarum PDA6, its culture, or a composition thereof may be used as a probiotic or probiotic composition. As used herein, the term “probiotics” refers to live bacteria that enter the body and provide a healthy benefit, such as improving the microbial balance of the body via, for example, ecological interactions with the resident flora in the digestive tract and/or reducing or eliminating symptoms or severity of a disorder (e.g., anxiety disorder or depression) via, for example, influencing the host physiology and immune system in a positive manner.

[0071] The probiotic composition provided herein may further comprise one or more other probiotics, such as other Lactobacillus, Bifidobacterium and Enterococcus in the form of fermented milk, granules, powder, etc.

[0072] In certain embodiments, the present disclosure provides a symbiotic composition comprising isolated Lactobacillus plantarum PDA6 or a culture thereof and one or more prebiotics. A “prebiotic” refers to a substance having a beneficial effect on a probiotic, such as food for Lactobacillus plantarum PDA6. Exemplary prebiotics include inulin, pectin and resistant starches.

[0073] In certain embodiments, the present disclosure provides a food supplement comprising isolated Lactobacillus plantarum PDA6 or a culture thereof and one or more prebiotics. As used herein, a “food supplement,” “supplement composition,” or “dietary supplement” refers to a composition that contains a dietary ingredient (e.g., isolated Lactobacillus plantarum PDA6 or a culture thereof) intended to add nutritional value or health benefits to supplement the diet. A food supplement may be added to a food, but that is not itself a food or intended to be a food, or that may be ingested independently of a food. The food supplement disclosed herein may comprise, in addition to isolated Lactobacillus plantarum PDA6 or a culture thereof, one or more dietary ingredients such as a vitamin, a mineral, a herb or other botanical, and an amino acid.

[0074] A food supplement of the present disclosure may be an immediate-release or sustained-release formulation, and may further include a carrier, such as an edible carrier. The edible carrier may include corn starch, lactose, sucrose, or propylene glycol. A solid carrier may be used for tablets, powders, troches, etc., and a liquid carrier may include syrups, liquid suspensions, emulsions, solutions, etc. Further, the food supplement may include a preservative, a lubricant, a solution accelerator, or a stabilizer.

[0075] The disclosure further provides a functional food that contains Lactobacillus plantarum PDA6 or a culture thereof. As used herein, the term “functional food” refers to a human food that has a beneficial effect (e.g., medical or physiological benefit other than a purely nutritional effect) in addition to providing nutrition.

[0076] In certain embodiments, the present disclosure provides a food product comprising isolated Lactobacillus plantarum PDA6 or a culture thereof and one or more prebiotics. A “food product” means a product or composition that is intended for consumption by a human or a non-human animal. Such food products include any food, feed, snack, food supplement, liquid, beverage, treat, toy (chewable and/or consumable toys), meal substitute or meal replacement.

[0077] In a functional food or a food product of the present disclosure, the Lactobacillus plantarum PDA6 or cultures thereof may be present in an amount of 0.0001% to 1% by weight, specifically 0.001% to 0.1% by weight, based on a raw material composition including the Lactobacillus plantarum PDA6. However, in the case of long-term administration, the amount may be less than the above-described range, such as 0.001% to 0.01% by weight based on a raw material composition including the Lactobacillus plantarum PDA6.

[0078] There is no particular limitation on the type of the food to which Lactobacillus plantarum PDA6 or cultures thereof may be included. Examples of foods to which Lactobacillus plantarum PDA6 or cultures thereof can be added include meats, sausages, breads, chocolates, candies, snacks, confectionaries, pizzas, instant noodles, other noodles, gums, dairy products including ice creams, yoghurt, curdled milk, and whole milk, various kinds of soup, beverages, teas, drinks, alcoholic drinks, vitamin complexes, etc., and all functional foods.

[0079] A beverage or drink comprising Lactobacillus plantarum PDA6 or cultures thereof may further contain various flavoring agents or natural carbohydrates, as in conventional drinks. The aforementioned natural carbohydrates may include monosaccharides such as glucose, fructose, etc.; disaccharides such as maltose, sucrose, etc.; polysaccharides such as dextrin, cyclodextrin, etc.; and sugar alcohols such as xylitol, sorbitol, erythritol, etc. Natural sweetening agents such as thaumatin, a stevia extract, etc.; and synthetic sweetening agents such as saccharin, aspartame, etc. may be used as the sweetening agent. A ratio of the additional components may be in a range of 0.01 to 0.04 parts by weight, specifically 0.02 to 0.03 parts by weight, based on 100 parts by weight of the Lactobacillus plantarum PDA6 or cultures thereof.

[0080] The present disclosure further includes a method of preparing a composition as described herein, which may include a step of mixing an additive with the Lactobacillus plantarum PDA6, a culture thereof, a concentrate thereof, or a dried form thereof. The additive may be the above-described excipient, such as a cryoprotectant, or a carrier.

[0081] The Lactobacillus plantarum PDA6 may be cultured by a conventional method for culturing Lactobacillus strains. As the medium, a natural medium or a synthetic medium may be used. As the carbon source of the medium, for example, glucose, sucrose, dextrin, glycerol, starch, etc. may be used. As the nitrogen source, peptone, meat extracts, yeast extracts, dried yeasts, soybean, ammonium salts, nitrate, and other organic or inorganic nitrogen-containing compounds may be used, but the nitrogen source is not limited thereto. As the inorganic salts included in the medium, magnesium, manganese, calcium, iron, potassium, etc. may be used, but the inorganic salts are not limited thereto. Amino acids, vitamins, nucleic acids, and related compounds may be added to the medium in addition to the carbon source, the nitrogen source, and the components of the inorganic salts. The Lactobacillus plantarum PDA6 may be cultured for 12 hours to 4 days in a temperature range of 20° C. to 40° C.

[0082] Specifically, the culture broth of the Lactobacillus plantarum PDA6 may be a crude culture broth containing cells, and may also be cells from which a culture supernatant is removed, or concentrated cells. The composition of the culture broth may additionally contain not only components required for conventional culture of Lactobacillus, but also components that act synergistically to the growth of Lactobacillus, and the compositions thereof may be readily selected by those skilled in the art.

Methods of Treatment Using Lactobacillus plantarum PDA6

[0083] In another aspect, the present disclosure provides a method for treating anxiety disorder comprising administering to a subject in need thereof a therapeutically effective amount of the isolated Lactobacillus plantarum PDA6 strain or a composition (e.g., a pharmaceutical composition) comprising the isolated Lactobacillus plantarum PDA6 strain or a culture thereof provided herein.

[0084] In a further aspect, the present disclosure provides a method of treating depression (e.g., anxiety disorder-associated depression), comprising administering to a subject in need thereof a therapeutically effective amount of the isolated Lactobacillus plantarum PDA6 strain or a composition (e.g., a pharmaceutical composition) comprising the isolated Lactobacillus plantarum PDA6 strain or a culture thereof provided herein.

[0085] In related aspects, the present disclosure provides the isolated Lactobacillus plantarum PDA6 strain or a composition (e.g., a pharmaceutical composition) comprising the isolated Lactobacillus plantarum PDA6 strain or a culture thereof as described above for use in a method of treating the human or animal body by therapy, such as in a method for treating anxiety disorder or depression.

[0086] As used herein, “anxiety disorder” may be any psychological disorder diagnosed as such according to applicable clinical guidelines. In some embodiments, anxiety disorder may be generalized anxiety disorder, panic disorder, social anxiety disorder, post traumatic stress disorder (PTSD), or any combinations thereof. In some embodiments, the anxiety disorder may be any “Anxiety Disorder” as defined in the Diagnostic and Statistical Manual of Mental Disorders, 5^{th} Edition (DSM-5-TR). In some embodiments, a symptom of anxiety disorder may include excessive anxiety and worry (apprehensive expectation), which optionally may occur more days than not for at least 6 months, and/or be about a number of events or activities (such as work or school performance); difficulty in controlling worry; restlessness or feeling keyed up or on edge; being easily fatigued; difficulty concentrating; mind going blank; irritability; muscle tension; sleep disturbance (e.g. difficulty falling or staying asleep, or restless unsatisfying sleep); clinically significant distress; clinically significant impairment in social, occupational, or other important areas of functioning, depression, or any combinations thereof, optionally not attributable to another psychological condition or medication.

[0087] As used herein, “depression” may be any psychological disorder diagnosed as such according to applicable clinical guidelines. Depression is a mood disorder that causes a persistent feeling of sadness and loss of interest, which affects how one feels, thinks and behaves and can lead to a variety of emotional and physical problems. Symptoms of depression include feelings of sadness, tearfulness, emptiness or hopelessness; angry outbursts, irritability or frustration even over small matters, loss of interest or pleasure in most or all normal activities; sleep disturbances, including insomnia or sleeping too much; tiredness and lack of energy; reduced appetite and weight loss or increased cravings for food and weight gain; anxiety, agitation or restlessness; slowed thinking, speaking or body movements; feelings of worthlessness or guilt, fixating on past failures or self-blame; trouble thinking, concentrating, making decisions and remembering things; frequent or recurrent thoughts of death, suicidal thoughts, suicide attempts or suicide; unexplained physical problems, such as back pain or headaches.

[0088] An “individual,” “subject,” or “patient” herein is a vertebrate, such as a human or non-human animal, for example, a mammal. Mammals include, but are not limited to, humans, non-primates, farm animals, sport animals, rodents and pets. Examples of non-human animal subjects include rodents such as mice, rats, hamsters, and guinea pigs; rabbits; dogs; cats; sheep; pigs; goats; cattle; horses; and non-human primates such as apes and monkeys.

[0089] A “therapeutically effective amount” of a substance as used herein is that amount sufficient to effect beneficial or desired results, including clinical results, and, as such, an “effective amount” depends upon the context in which it is being applied. In some embodiments, in the context of administering a composition to treat anxiety disorder, the severity, frequency, or duration of at least one symptom of anxiety disorder may be reduced when a therapeutically effective amount is administered.

[0090] As used herein, and as understood in the art, “treatment” or “treating” is an approach for obtaining beneficial or desired results, including clinical results. For purposes of this subject matter, beneficial or desired clinical results include, but are not limited to, prevention, alleviation or amelioration of one or more symptoms, diminishment of extent of disease, stabilized (i.e., not worsening) state of disease, prevention of disease, delay or slowing of disease progression, reduced risk of recurrence of disease, and/or amelioration or palliation of the disease state.

[0091] Lactobacillus plantarum PDA6, a composition, or a food or supplement composition as described herein may be administered to a subject. In particular, a therapeutically effective amount of the Lactobacillus plantarum PDA6, a composition, or a food or supplement composition as described herein may be administered to a subject having anxiety disorder to treat the anxiety disorder or to a subject having depression to treat depression. The therapeutically effective amount of the composition, or food or supplement composition may depend on many factors, such as the age, weight, and severity of anxiety disorder or depression in the subject, the length of treatment, other therapeutics concurrently administered to the subject, and gastrointestinal conditions of the subject.

[0092] In some embodiments, the Lactobacillus plantarum PDA6, a composition, or a food or supplement composition may be administered in an amount sufficient for detectable colonization of the intestine of the subject with Lactobacillus plantarum PDA6. Colonization may be tested a set period of time after administration of the Lactobacillus plantarum PDA6 or a composition comprising the Lactobacillus plantarum PDA6 bacteria or a culture thereof, such as after one day, one week, two weeks, three weeks, or one month.

[0093] In specific embodiments, Lactobacillus plantarum PDA6 or a composition thereof may be administered with another anti-anxiety disorder or anti-depression therapeutic. The administration of the other therapeutic may be at the same time as, prior to, or subsequent to the administration of Lactobacillus plantarum PDA6 or a composition thereof. Dosage of the other therapeutic may be reduced over time as the Lactobacillus plantarum PDA6 colonizes the intestine of the subject.

[0094] The Lactobacillus plantarum PDA6 or a composition thereof may be administered to a subject once, or multiple times, such as daily, weekly, biweekly, every three weeks, monthly, every two months, every six months, every year, or whenever the Lactobacillus plantarum PDA6 is not detectable in the intestine of the subject.

[0095] The subject may be a human, but, in some embodiments, it may be another animal susceptible to anxiety disorder or depression, such as a dog, cat, cow, goat, or horse.

[0096] The Lactobacillus plantarum PDA6 or a composition thereof may be administered to a subject orally, nasogastricly or rectally. Preferably, the administration is oral administration.

[0097] In some embodiments, the Lactobacillus plantarum PDA6 or a composition thereof may be administered so that the Lactobacillus plantarum PDA6 dose is an amount of 10⁵ CFU/day or more, 10⁶ CFU/day or more, 10⁷ CFU/day or more, 10⁸ CFU/day or more, 10⁹ CFU/day or more, 10¹⁰ CFU/day or more, 10¹¹ CFU/day or more, 10¹² CFU/day or more, or 10¹³ CFU/day or more, or in a range between any of these amounts (e.g., 10⁵ CFU to 10¹³ CFU per day).

[0098] The Lactobacillus plantarum PDA6 or a composition thereof may be administered repeatedly until at least one symptom of anxiety disorder or depression in the subject improves.

### EXAMPLES

[0099] The presently disclosed subject matter will be better understood by reference to the following Examples, which are provided as exemplary of the invention, and not by way of limitation.

### Example 1: Identification of Lactobacillus plantarum PDA6

[0100] The bacterial strain from the wasp intestine was separated and purified to form isolated Lactobacillus plantarum PDA6. A Biospin Bacteria Genomic DNA Extraction Kit was used to extract DNA from the isolated bacteria. Purity and concentration of DNA was determined. Covaris M220 was used to fragment genomic DNA, and an Invitrogen Qubit 4.0 fluorescence quantifier was used for concentration quantification. A KAPA Hyper Prep Kit was used for library construction and the Illumina NovaSeq was used for sequencing. 43 contigs (SEQ ID NOS: 1-43) were obtained.

[0101] The original sequences obtained were classified and the genome was assembled and compared with the 63,400 assembled gene sequences of NCBI by MASH (version: 2.2). Identification was based on mash distance information. Similarity to Lactobacillus plantarum was more than 99%. Therefore, the newly isolated strain was named Lactobacillus plantarum PDA6.

### Example 2: Establishment of Mouse Anxiety Model

[0102] After a preliminary feeding, male C57BL/6J (6-week-old) mice were randomly divided into a normal control group (no restraint; no PBS or therapeutics), a model group (restraint; PBS once a day), a GABA drug treatment group (restraint; 0.5 mg/mL, 0.2 mL/Day, administration of GABA begun after 2 weeks), Lactobacillus plantarum group P1 (restraint; 1×10⁸ CFU/mL, gavage of Lactobacillus plantarum begun after 2 weeks), and Lactobacillus plantarum group P2 (restraint; 1×10⁸ CFU/mL, gavage of Lactobacillus plantarum begun immediately). Each group contained 6 mice. The mice in each group except the control group were under restraint stress once a day. The treatment scheme is shown in FIG. 1. Behavioral tests and related sample collection were performed at 2 weeks and 5 weeks, respectively, as set forth in Examples 3-5.

### Example 3: Open Field Test

[0103] An open field test was conducted using an experimental device including a 50 cm×50 cm×50 cm open box made of ABS engineering plastics. The bottom and inner wall of the box were white. The box was equipped with a camera for automatic recording. The camera was connected to a computer, and recorded visual field was divided into a central area and a peripheral area using behavioral software. The central area occupied 25% of the field. The software synchronously tracked and recognized the movement of the mouse. The software automatically recognized the mouse and whether it was moving or still and recorded frequency of entry into the central area and time spent in the central area. After each experiment, the bottom of the box was wiped with 75% alcohol to remove mouse excrement and residual odor.

[0104] To conduct the test, a mouse was placed in the central area and allowed to adapt for 1 minute before a timer was started. The mouse was allowed to move freely for 5 minutes while the movement was recorded. Results are shown in FIG. 2.

[0105] FIG. 2, parts A and B show the results for each group after two weeks. As compared to the model group mice, the time spent in the central area in the open field of the mice in the P1 and P2 groups was increased although the differences were not significant (FIG. 2, part A). Also compared to the model group mice, the frequency of entering the central area in the open field of the mice in the P1 and P2 groups was increased (FIG. 2, part B). While the increase in the P2 group was not statistically significant, the increase in the P1 group was significant. The lack of significant differences between the P1 and the model group in the time spent in the central area and between the P2 group and the model group in both the time spent in the central area and the frequency of entering the central area may be due to the Lactobacillus plantarum having not yet colonized the intestines of the mice in the P1 and P2 groups.

[0106] FIG. 2, parts C and D show the results for each group after five weeks. The time spent in the central area and the frequency of entries of the mice in the GABA group and P1 group were significantly increased compared with the model group. There was also an increasing trend in the P2 group. Both of these indicators are negatively correlated with anxiety-like behaviors, suggesting that Lactobacillus plantarum induced a reduction in anxiety-like behaviors.

### Example 4: Forced Swimming Test

[0107] To conduce a forced swimming test, the mice were placed in a cylindrical glass tank with a height of 20 cm and a diameter of 10 cm, one mouse in each tank. The water depth in the tank was 10 cm, and the water temperature was (25±1) ° C. The mice in the training group were trained to swim for 15 min before the experiment, then were removed and put back into the cage, and the experiment was conducted 24 h later. During the experiment, the mice swam in the tank for 6 minutes, and the cumulative immobility time and the average immobility time of each mouse in the next 4 minutes was recorded. Immobility time is time during which the mouse stopped struggling in the water, floats, or only moved an amount needed to keep its head above water. The more anxious and depressed animals were, the longer they remained immobile in the water. Results are shown in FIG. 3.

[0108] FIG. 3, parts A and B show results after two weeks. Compared with the control group, the immobility time of the mice in the other groups was higher and the average immobility time of the mice in the model group was significantly increased. The average immobility time of the P2 group was significantly decreased compared with that of the model group.

[0109] FIG. 3, parts C and D show results after five weeks. Compared with the control group, the cumulative immobility time and the average resting time per time of the model group were significantly increased, while in each of the two groups that received Lactobacillus plantarum, the cumulative immobility time and the average resting time per time were significantly reduced compared with the model group. Interestingly, compared with the model group, the GABA group did not exhibit significantly reduced cumulative immobility time or average immobility time. These results suggested that Lactobacillus plantarum had a better therapeutic effect than GABA, which may be related to the use of other probiotic functions to positively regulate the behavior of mice in addition to probiotics that affects the depression symptoms by producing GABA.

### Example 5: Expression of BDNF and 5-HT in Hippocampus

[0110] After the behavioral tests, the hippocampus tissues from the brain of the mouse were isolated, and pulped in normal saline, then centrifuged at 3000 rpm for 10 minutes. The supernatant was removed and used to conduct ELISAs for brain-derived neurotrophic factor (BDNF) and 5-HT. BDNF is a protein synthesized in the brain and widely distributed in the central nervous system that plays an important role in the survival, differentiation, growth and development of neurons. 5-HT is a monoamine neurotransmitter in the central nervous system and is associated with feelings of happiness. If a mouse has anxiety symptoms, the expression of these two substances in the brain is down-regulated. The ELISA results are shown in FIG. 4.

[0111] After restraint stress, the expression of BDNF in the hippocampus of the model mice was significantly reduced. After the administration of GABA and Lactobacillus plantarum, the expression of BDNF was significantly increased (FIG. 4, part A). As shown in FIG. 4, part B, compared with the model group, the 5-HT expression level in the P1 and P2 mice increased by about 0.5 times.

[0112] The various embodiments described above can be combined to provide further embodiments. All of the U.S. patents, U.S. patent application publications, U.S. patent applications, foreign patents, foreign patent applications and non-patent publications referred to in this specification and/or listed in the Application Data Sheet are incorporated herein by reference, in their entirety. Aspects of the embodiments can be modified, if necessary to employ concepts of the various patents, applications and publications to provide yet further embodiments.

[0113] These and other changes can be made to the embodiments in light of the above-detailed description. In general, in the following claims, the terms used should not be construed to limit the claims to the specific embodiments disclosed in the specification and the claims, but should be construed to include all possible embodiments along with the full scope of equivalents to which such claims are entitled. Accordingly, the claims are not limited by the disclosure.

1. An isolated Lactobacillus plantarum PDA6 strain deposited at Guangdong Microbial Culture Collection Center (GDMCC) under Accession No. 62262.

2. A composition comprising the isolated Lactobacillus plantarum PDA6 strain of claim 1 or a culture thereof and an excipient.

3. The composition of claim 2, wherein the composition is not naturally occurring.

4. The composition of claim 2, wherein the composition is a pharmaceutical composition.

5. The composition of claim 4, wherein the composition is formulated for oral, nasogastric, or rectal administration.

6. The composition of claim 2, wherein the composition is a nutraceutical composition.

7. The composition of claim 6, wherein the composition is in form of a probiotic composition, synbiotic composition, food supplement, functional food, food product, or beverage.

8. The composition of claim 2, wherein the composition is a liquid.

9. The composition according to claim 2, wherein the composition is dried.

10. The composition according to claim 9, wherein the composition is lyophilized or freeze-dried.

11. The composition according to claim 2, comprising Lactobacillus plantarum PDA6 in an amount sufficient to colonize the intestine of a subject when administered to the subject.

12. The composition according to claim 2, comprising Lactobacillus plantarum PDA6 in an amount ranging from 10³ CFU/mL to 10⁸ CFU/mL or 10⁵ CFU/g to 10¹³ CFU/g.

13. The composition according to claim 2, wherein the composition is in unit dosage form.

14. The composition according to claim 13, wherein Lactobacillus plantarum PDA6 is present in the composition in an amount between 10⁵ CFU to 10¹³ CFU per unit dose.

15. A method of treating anxiety disorder, comprising administering to a subject in need thereof a therapeutically effective amount of the isolated Lactobacillus plantarum PDA6 strain according to claim 1.

16. The method of claim 15, wherein the therapeutically effective amount further treats anxiety disorder-associated depression in the subject.

17. A method of treating depression, comprising administering to a subject in need thereof a therapeutically effective amount of the isolated Lactobacillus plantarum PDA6 strain according to claim 1.

18. The method of claim 15, wherein administering comprises oral, nasogastric, or rectal administration.

19. The method of claim 15, comprising administering the therapeutically effective amount in multiple doses of the isolated Lactobacillus plantarum PDA6 strain or the composition.

20. The method of claim 19, comprising administering the therapeutically effective amount daily for at least a week.

21. The method of claim 15, comprising administering the therapeutically effective amount until the intestine of the subject is detectably colonized with Lactobacillus plantarum PDA6.

22. The method of claim 15, wherein the therapeutically effective amount is a range of 10⁵ CFU to 10¹³ CFU per day.

23.-24. (canceled)

The application's sequence listing, which the Patent Office published only in electronic form, follows.

SEQUENCE LISTING (43 sequences)

SEQ ID NO: 1 - DNA, 535347 bp, synthetic construct
  source 1..535347: mol_type = other DNA; note = Lactobacillus plantarum PDA6 - Contig 1
cgttgagggcggtacggttgtctaggcttgatggacggccagtccggtatggcgggaagtatcctttgattcggtcccactgagcatcttccagttcgtatcgtttaggtgttgtcatcggaatgcctcgattcgtttttcctcagattatacctgaatttttagttttcagacagtccctagtacaactttaataacaataaacggccagctcggtgcatattatccagcaatagggcgaaaagacaatattgcgctgttttcgacaccccatgcgtcacgaatctaccgcggttgctcatcttgtccataatattccggcttttcagcctggacgggatgggcctgtaaccagctaataatctggcggctgaggtcatccgtcattggtgccgcagctgctatttgtgctttagtaatttggttgacatgaattcccgcagtaattgtacagcttccaactagataacgctgaatccgcttggccattcgttccgaaataaagttatctttatggaagcgaccatcatggctgggaaacttaaccgtttcgggaaccgtgctggcagttagtgtggtcacgtcaccaatatggggattggtcccaccggtaacgacgatcaacaagtcatatccaatcacttggagtgttgcttgcatttgatacccggcctgctcagtcgtaaaagttgccatacttaatccccctcccaacggcgatcagtttcattatgaatatgaaacgcatctaaaattttcatggtttgatgattgaccagatcctgaatggattgcggatgattataaaaagcgggaatcggtggaataatttgggcaccgagttttgccaacttcgttagattttctaaatgaatcacgcttaacggtgtttcacgtggaacaatcacaagtttacgttgttctttaatcgtgacatcagcagcccgcgatattaaattatcaccgaagccgtacgcaatccccgctaccgtcttcatactagctgggacaatgaccattccgtcattcaaaaacgaaccgctggcaatcgctgcgccttggtcattagcccgataagtagcatccgcgagcgccgttagctgcgcgagcgagtaatcagtctctaactccaagttttttttagcccacgcactcattaccaggtgaacttcaacatctggccgctgatgtaacttttctaataagtcgaccgcgtaaatcgtaccggacgctcccgtgattcccacaacaattcgtttcatcctgacaccctcgtttcggcaattctacaattataaaattagtcatttacctgtctatgataccttgcaaaaatactacaaacaaatcaagtttagactaattaatattcaaaaatggaatattaattagtaattggcatgtcaattgaatctgttatgactacgccaacagcattaataaaagagtcatagatttcctcaaaaatttgaaaagatctatgactctcttttgtattagcaagtaaacaaacaacttgtcaactattcgttatttaactgaaaccagctcaaacaattgctctagtttcaaattctctaagagcagcttgattatactcccgccaatcaaaacgttcaaaacaaacctgttgctccatatctagcacaatcattagtgctgcatcattttgtacatcataatgagcaagttgaccgttctgagcggcacgctttccgtcaataaacactgcgtaattcgggtaactttcaacgtgtttaatttcaacgaatgcacgcccgttgctaccattccccaaaacgatatctggattttcccaatcatctgagctagtaacccatttaccatcaacttgggtttcagcatggaagattttcaatggctcttttacagtttttacatacttgatactgtccttggtctcaattgagagagctaaagtattcgccaaactatttggatttgctacggcatttttaccgctcagcaagccaaaacgtccgcccttgattacatcttgaataccagcaacatctgttccaacaaccggcttgtgtgcaagcaaagcttcaataatagcaagcccttgaccctctgtaactgatggcagtacaacataatcagtaaatgacacaaatttcattggatgctgcaaaaaccccatcatgaacaccgattcatctaatcctaaaccggaaataagttgctctacttccagtcgtattggaccattcccgacaatatataatcgcgtcttcggataattatcatgtactaacttaaatgcttggattaatcctaaatgattcttttcaggagacagtcttgccaccgtcacaaaattaaaataattctgatctacaggatgaaataattgagttgtaataattccgcttggtgtctctgttttagtaagctctatcagtgaatcaccattatccacttgttgctttacctcagataattctttttcaatttcggcgccattaactagattctcaacccatgtaaacttagcagaatcagcatactgactcaaatcttctcgattttgtttatcagctgattgggaaactgaaataattttgtcaaaatattgatagtaagtaaacgtaacacgcagattcttacgatgcttgtatcgcccattaacaattttattatattcatcccacatagtattgtgtagaaagacaaccttttttggaaccggtgataaagcaaataatccagtaatagctttgttgtaaccaccaaagtcaataacttcgtatggcataaagttaccaaagatacgcctaaaattcagctggtacgttgccttcatcttattttggttaactaactttgaattaaatccaaagtggtagctagtgttctgattataagtatcaaagaatgttctagttgcccatgaaaaattaaaaataaagtgcacgctgccgggtaagcgattcatattatattctttttcagggcgcatccgcggataatcaacaaatactaattcatatttattagtgtcaaagtttctagacaaattaataatagaatttgtaatcccgttattatagaaacctccagcataaatcaataacttctttttattattgttgaaatcaagtcgctcaatcgatgacgactcttcaaacaatacttgcactgcacgatcagtcgcttgtccgtcatcataactcaagaattcggatttataatcattgtactgttgttcgtaagtcttggcccatgaatcaaagtatttttgattacagtcatcaagcaattgatcaaacttatccgtgaccagtcccggaagtgtatcaagcgacttgtaaaagcctcggttctgtgcgtaactatccttatcaggaacataaaacataacaggccgtttaatcggcaaaaagtcgaaaaagatactggaataatccgtaatcaatacatccacaccacgtaacaatgtattggtatcaatggcatttgaaattaattgatcaccatatcccatttcaactaatttatcataaataaaataatgtacttttaaaaatactttgtagccagatgggacacgttcctgcaatcgttggacttcatttaacaactgtaaaatatcagcttcagtagtatattccacatcttttttccaagttggcgcatacaagattatcttttcagctggaagccccaagcgctctttcaacgcttgcgtatcttcggaaactagtgtccccagtaagttatcaactcgtggattaccagtaatataaacttcatttggaaaaataccgtttaaatcatggctcgtaattaaatgctcagccgtaaactgattaggcatagctaagacatcagctgccaataaattacgctgaatgttcttatggtctgccctacctgaacccttaatatctaatcccagtgtttttaaaggtgtcccgtgccaagtattcagataccgttgcccatcccttttgataaaatagggcatgaaagaagtatcgttaattaaatactttgaggtagctaaggctttcatatactgacgtgattcgtacttaactaaatatacccgatgtctcttggtatccgccataatatccgcaggaattgtatctttgtctttgtatgcccaatagtacgtataatccggatattcttgtaccatcttttgatacatcgcatacacatttccagtcaaattgacagcatgatacgattccaagaaaacagccttttcttgaactttgctatgtttcacatagtataaataaacattaatttgacgaattgccggcttagttacaaactcccgaattggccgtgcaacaaacttacacgcgagtttgatggtattcatctttcccataatatatatcattactccttgtacttgactacagtactctagccctaatggattagcctgtataattatttgcgttctgatctatgctagtaatcaacttcacaactcgttgactagccgttccttgctcccattccgtgaactgtgtccgaaatgccatcatcttggctgtttcgtttggataaccatcattagtcaagaactgatctaacttggccagaaaatcctgctcattggtgacaattggaccaggaaccttgttgtaatcaaagtagaatccgcgaatatcaccctgataatgcgctaagtcataaggataaaatagcataggtcgattcaagatagcgtaatcaaacatgaccgaagaataatccgtaatcaataaatcactaattaagtacaaatcattaatatcttcatccacacataatttaacattgtcctcaaagccttggatattgatcgactcagctactaggtaatgtggccgaataataagcacatcttccttattaagccttttaacaaccgcggccaaactaaaaggcaagttcattttatacatacctttgcggataaaaaagtcatctcgccaagtcggcgcatataaaattactttgcccatcttattgccaacaattctttttttaatcgctgcaatcgcatcataatcctggcgctgatgcactaaccgatcgttgcggggatacccataatccaagaactggttgttaaaatcaaacgctcgtcgaaaaacgtcttttgaaaactgattgggtgcaattaaataatcccaccgtttactctccgccgtaaaattctgacgatactgacttgtatcggtaccaggcattgaaacttttggaatatcaatccccaggcgctttagcggcgtaccatgccaagtctgaatataggtcgttttcgcattcttcttcaaccaatacggcatccgcgcgttcaggacccagaattctgcaaccggtgccactaataaccatttggccgaaaagcgtggaataatattcaacttaggatacttttcctgggcttccacaaccaactgacgcttaacaccccagactagcttccaatctggatgcgcggtctgaagtgcttcgtaaacgtatagcgggttatccattggaactttaccattaaacgcctcaaataaaacaacgtgttttctcactgggcacacagtcgcaattacattgaacagtcggcgataaacctgactgataatatcttttaatgccattttattgaattccccgtcacacgtttatttttgattgaaattcaagtcttgcttaatcttagtcgttgagatttcaggagtccgtggtaaatagatgacttcagcgtcagtttgttcgcccacgaaatcaaatttaccagtccagtcatcacccattacaaagcgatcaatttggtataatttcacgtcacttactttttgatcccacgacttttcaggaatcactaagtcaacatagcgaattgcttctagtaatgccttgcgcttttcgtatgagaaataggccttcttttgcttgctgtcccagttgaactcatcggttgatagggccacaattaggtaatcccctagtgatttggcacgcttgagtaattcaatatgcccataatgtaataaatcaaacgttccgtacgtaataactcgcttcatagtaaaactcctcctaaaatttcttcgttaatctttattaaatcaatgtacacacctgaatgtaaacaaggctattatatcatgaaaagattgactacacccatcattatacaattcttaatgagccgcgctttgtatattttatattttaaaacaagcgaaatgcatatatcacgcaataacttgcccatattgcggtaattatcattgcaatttgtcatttattcactcgtgccttttatgtcgcaatccatataaattaccgagaagctaatccacaacagtttatcattaaaaccaaacattcaatgcgccacaccacgttttttggcctataattaaggtagtgtattaatgagggagggatgtctatggcaaaacgacgaatcacacacgacccacaccagtttgttaatactgctactgaccggcgacgcttacaattggctgtccaattagccttgccaacctgtgcgcacgtcttagcacgcaattttgcgcgttctagtgccagctcttactggctactaatgataaagacgccggggacggctgccccgcgctttttgaccttgcggatcgcggatcatttgctatggctgacgaaccatgatcaattaaccattagttgggaggctggtaattttgacgccgttcaacggaccttgcgtcaagaattaacaccagccactctgcaacaatacagttatcaactcacgacaactgatattatgacactgcgcttgattctgcatttggaacaacatcagctcatttggttggtccaattagcacctgaaatcgctaaggcctacaagaatcagcattttgaccttcgtgacgactttggtcaggccaaattgttactaggcaacatgaataacagtagtctccaactggtgccagttaagcaaccagctttccaaaatcatcttggacaatacttcggccgcaacctcctattctcacagttcaccagccaccatctattgcgactattgcccaccaatcaatggattcgacccttgctaaaggtgttgccacccacaccaaatctggaacaacaactagcagtcctgtatggcaccgactttgtccgcatttatgttgaagcgattcgacaacaagcacgcttgcaagcgattagttcataaaaataagacccccgctacgttcagcaggagccttattttagttactgattattagtcgcttttaagttttccttaggacctaacaacttatccgaaaagccaaatacataaactaacatcgttgcaatcactagtgtcccgtaatgggatatcaaataaccataaaaatttgacccgatgccgacacccggggtgataaacgcggggaaaccgatcaacgaccctgacaaagcatagttattaacgcgtaacagaccggtcagtaagccacctagaccactcgcaatgctagcaacgacaaagacccgtttgtatttcaagttgaccccgtatagcgccggctcggtaacaccacaaaaggctgaaattgcagctgccagtgagatctcctttaggtgcttatccttagactttaagaagacggccaacaccgcaccaccctgagcgaccattgtaatcgagaggattgcattcaaataactgtgcccattcgtcgcaatatcattgatcacaatgggaataatgccccagtggagcccgaaaatgaccatcgtctggtataaaccaccaataaccaatcctgataaggccgggctaaaattatagacggcgaccaaaccgttggccaagcccttactgataatcgtaattaagggaccgaccaccactaataccactatcgccaaaatcagggcttcgataatcggaataaagacgctccgtaaatacagcggaacaactcgttttaacccccgctcaacgtacacgcctagccatgcagccacaatcatcgggaacacggatgccgaatatgacattaaatgcgtcggaacacctaagaacgtgatttgggccgtggctcccttactagctgccgttatcagacttggatagataagaacagcaccgacaatcgccagcacgattggatctgaacctaactttttggcagcagtaaagcctaggacaactggtaaaaagtaaaacgttgcatcagctaccgcgttaaataccatatacgtcccactcgtgaccgccaagactttgaagcccgttaacgcggccaagattccttttaaaatccctgaacctgccaaaatgccaatcaccggaatcattgccgcggtcataacaccaatgacaccactaatgccattacgcacgtggcttagccaattaacgtcacttgatgcctcctgaaccggtggtactggcactccgtccgcaaattcaggccctagttgtgcgatcactgcatcaaaaacatcgttgactgccggaccaatcacaacttgatactgaccaccggcctttgcaacatcaatgacgccgtccaagttcgcaataaccgcatcgtgcgctagtgcttcatccttcaaataaaatcgcaaccgtgttatgcaatgaatcacgctattaatattttgttgcccgcccacattagctacaattgccgtggctaatgccgagtaacgcgtcgttgactgcggtaccgctgccactaccggtgacgcggttgttgtcactgttatcaagtgagccgttgcgacgactgcaccggccgcgacagcttgtggcagtggggctagcgtcaagtcagtgagtaccagctgagcgttcgtcacgacaatgatcaccgtggtcggtttgtgggcctgctcgatagcagctaaatccatgtcgactaatagtgtgccagccgtcacctcatcaccgaccttcacgtgaacttcaaacggtgccccattgagtgccaccgtatcgacacccagatgtaccaacacttcgaggccagtcgtagtcaccatgccaattgcatgtttggttgttgcgactactgtgattcgaccactaactggtgccaagatgtgaccagctgtcggctgaacaccaaatcccggccctacccttcccgccgcaaaaacaggatccggaaccgttgccaatgacaatacttgaccagtaactggtgctaaaatggatacttcatcgatttttcccataatcatcatcccccatgtaaaacccttaacctaaccttcaaaaatccttaagacgaccgtctcacgtccaatcatgatccattaaaattctatcatcacaattagaccaatctccatcacttaccatcacttcgttagggcgactaaatatcaaaaacaagcatttttccgaatcggaaaaatacttgtttatcctaacgttgattaattatttgacgtcgccattaactaggcggttgcacctaagtgtcgctttttaggcgctactttaactgcatttgcatcctcatccttaaaaccaaacatccaagttaaggcgaaggacacgacaatcgtggctgcggatgcaatcaagaaaccataaaaactaaagtccaagcccttcggattaacaaaggacgtgaagccaattagtgaacccgtaaagccccacatattgacattcatcaagccggtcaagaagccaccaactgccgccccaatactggcagtcacaaaggcccgaccatatttcaagttgatcccgtacatggctggttcggtaacaccacagaaggctgaaatcgttgctggccaagcaagttcttgaatgttagccagctttgactttaaggcgattgcgaatactgcgcccccctgggcaaccatcgtcgctgaaacaatcgcgttcaagtaactgtgacccgtcgttgcaatatcgttggccacaatcggaataaccgcccagtgcaacccgaagatcaccaatacttgatagaagccaccaatgattaagccagaaatcgcagggctcaaattgtagacccacacaataatatttgccaatcccgttgaaagcacagtaataattggaccaaggaataatagaatcgcaccggaaacaatcacaacttcaaataatggcacaaaaatcattcgtaataccgttggaatcactcgttttaaccatggttccaacttacttgctaaccaggcccccgcaatcatcgggaaaattgaatacgtatacgaggcaacgtgtacgggcaagccaaagaagttcgcgttgatccccattcctaaaagcgtactcgtcgctttaccacttgccatcgttacaatagctggataagtcagcaccccaccgatgattcccatgatcaccggatctgcccctaactttttaccagccgtaaaaccgacgaagattggcaggaagtaaaagaccgagtcgcccatcgcattaataatcacgtacgttggtgcggtcgggctaactaacttgaatgttttcagtaacgcaagaattccctttaaaataccagaggctgctaataatccaatgacgggaatcattgaacccgtgataacaccaattaaattactgataccccatttaactttgccccacggcgtcgttggccgctgagctgctgcggcagtctcagcaacagctttagccgtctccgaatcatttgaaaattctggcccgatttgcttgataactgcatcatagacatccgtgacagcaggaccaatcacgacctgatattgtccgcctgcttttgctacgtcgacgaccccttttaagtcccgcacgacgtcatcatttgctttactttcatcttttaaataaaaacgtaagcgggtaatgcagtgaatcaaactactaatattcccggcaccaccaacattagccacgatgtctgcggctaactgatcatatttacccgcttttggtaatcgattctgccgcttagcattaaatgtgttggcgttcagacggcccgtagctgtcacgtcaccggcagcttttgcccccgtaacgacgtccaacgattctaatttatcactagtgttagtcactgctaaaatcactgtggtctgacgattagcggcttgaatagcagctaaatccatggtggcaatcacgtcccccgcctgaacatcatcgcccgcggccactttgaccgtgaacggggcaccctttaagtcgaccgtgtcgattccgagatgcactaatacttccaaatgatcatcaggcgttgtgaacccaatcgcgtgtttcgtctcagccaccatcgtgacctgaccactgactggtgcaacaacttctccacttgaaggttgaacgccaaagcccagtcccatcataccggctgaaaagaccgggtctttaaccttatttaacgcaataacgtccccattgaccggcgacaaaattgttactgtttgtgcctttgccatacccattcctccattcttaacctaacaacagcgcaaccgcttgataaggttgcatcgtcaattgtgctgtgacattaacatcttgataattggaaagtaacacctgtgcaccgaccatttcttccggaagtgtcaccgttgttggctgaccataaaaattattaagcactaataacttttgttggcgatatgtccgccaatagccgaagacttgcggatcatctaagcgccacgattgatagccaccatccgcgacgatcggcatcgtttttcttagcttaatgagccgttgataatagtcaaaaatctcgccactagccaattcatgggccacgttaatcgtcgcctgattagtcggtgtcaaccacggtttaccagtagtgaaaccagccttggcactatcatcccattgcatcggcgtccgcgagttatcgcgcgccttggtcttaacgatcgtaaacgcatcgtgatgactgtacccactacgaattaaagcccgataagcatttaatgcctcaatgtccacgtaatcagccatattgtcatagtccggatcagtcatgccgagttcctcacccatatagataaacggtgttccacgcaagaggtgaatgaccgtcgccagcatttcagcggacttgacacgataacgaccggcgtcaccaaagcgattcagcgctcgtggctgatcatgattattccaaaacaaagcctgccagccaccaccagctgccattccactggcccaactatctaataattgcttcaatcgtgggaagtcgaaggccattcgggaccacttccgtccatcaacataatccgtcttcaaatgatggaaattaaagaccattgagagttcgtgattagccggattagtataaccaacactgttcgcaacggttgttgaagacatctcccccactgtgacgctatctacatcctggccgaagcttgccgcgttcaattcctttaaataatcatgaacaacgggggtgtcagtatacaacgtcttgctagggacccccttaggtgcgtccaccaacttctcagctttaccggtaacattgatgacatcgaaacgaaaaccctgcacgcccttttgccgccagaaattgacaacggcggcacacgcttgtcgtacggccggattatgccaatccaaatcggcctgagtcggatcatataaatgtaaatagtacaaaccagtatcaccaaacggcgcccaggccggaccaccaaatttagattcccaattggtcggtagactaccatcagccttgggaggacggagatagtaaaacttctgatacttctcatcacccgtcaaagccttttgaaaccactcgtgttcagttgaagtatgattaagaaccatatccaacatgaccccgataccatttgccttcagctttgcaacgagttcttcaaaatcagccatcgtgccaaacatggggtcaatatggtagtaatctgcaatatcgtaaccgttatcattttgtggtgagacaaaaaacggattaaaccaaatcatgtcaatattcaactttttgaggtagtcgatcttttcaataacacctcgtaaatcaccgacgccatcgccattgctgtcgtaaaacgacttcggataaatctgataaatcacttgttctgataatttcatgcgctatccctctcatgccagatcttatttcttagttcgccgagcaaaatcgcggaaactaaagcggtccgcccggtgtcgtgattccgtatactggaacgctcgcgcatccgtgaggctcgtcacgcttcgaacaactgccacataggcgcccttactaatagcgaggtgttcgcggtcctcatcagttgccggcgccatcgtaatttccttcgtcgcgtaaccgatcgtcaacccaagctgattttcaaaatacgcgtacagtgagtcttccgccgcttgcttgggaactttcggaacgatcgatttcaaaatataatccttatcaataatagctggttcgccatcgatcactcggactcgtttgatggccgtcactggcgcttccgtcaattcggtaccaagtgacgtaaagtcagcaaccggtaacgttgcatccggttgatagtcataaacaatattttgcgtcttaatgtgtaacttttcggctaactctttataactcacaatgccagaaactggaaattcatactgtcgatgctcaatcacaatggaccctttaccacgaattttttgaatatagccatcctcagccaatgtcgctaatgctttgcgcccagtctcacgtgaaatcccatatagctcacaaagttgatgttcactcggcaaataactcccgatcgggtaaacctccgcatcaattttctggagcaaatcttgataaactaaggccgctttattcacggcaaccacccctttgttatcgttttcatttatgaatatagacttgtttagacaagttgtcaatatttaaataataacccaattaaatttgtagattataccagccggatcaagtctagacatgtctagagttcacaaaatccgagcttatatttcagtattcaataactgcttcataataagtgccaacacctatacagtattggttgaactagcaggatagtccgcaccataataaaaaatcgacattcgcagagcgctaacagcaatctccaaccaatgtcgattctatatctgatgatttcattaatattactattttcgcaataaatctttcgctttcattgttgctacttcttttttcatttttctctttcggttcacgagtgcatctatccagataccattcagcacggcttcgccaactaacaatacggttactattgataataaagagacctcttttgtaaaaacaatgtaaataataaagcctaaaaagccagctcccggaattgccccaaaccaccttggtaagtatcgatctaacatatagagcactgcaacgaccaacataccaatcagaattcctttaaaatcactcatgttgttcctccctaaagtcagtaataatctgttttgctacctctaacgataatttctcatcgattaccaatttcataaccttcgtttcaaacgtatttgcaccgttgtcctcaataaagttaattttttgaataatcgtgtttaaccgcattcgcacggttggataactcacttgataaatcttagcgagttgttttagagaacctgaggcaataaccaattgtttaacaaattcctgatcctcacgttctaaattcacaaaccagtccatagcatccctcttttttaatattgtttattaaactttaacattgtttattataatgtcaataaaaaatcatatatttgataactgatacaatccggagctattcaaataaagacgagtactctaatccaaaagaattacagtactcgccttatttagaatattaacgctactagtctcagtaaatttattagctgacctttagtgattcaatccaaatgcctgattatcactagcatccgcgctagctgcatcactagctgcttgttcttcggccatcaaccgagcgcgttcatgtttgttataccaaggtgaaacagtgaaagccaagacatcgttcatcagataaacggaactattaatgaacattgctagtgtcgccgaaccttgacggaacgagatgaaccagaggaccatttgtgctaaaccagaggcaatccaccagaaatactggttgttgtaacggaggaagcaaataacgccggccgttaaacaaatcgcaaaactaatggcatcgacccatggccggggatcatcagttaaggcaccaataagatagccggagatggcataaacaactaaagttgcgacaattgcgacgatccacgtcttacccgtaaacttccgaatctttgaaaccatgttgacgttccaattagcacttaatagtactggaatatcaagcgttacgacgtaggctaattgttccccaatgcttaaatagttcttagctgaaaaaccaactacgatgaagcaagcggcggagatgacgcctaataatccattgactgacttagccgcattaatggctaacacacaaagaacacccaaagtggtcccaataaatgttaaaatagacaatgctgtaattggcgcacttactaacgtcattacttgacatcctaggctaaaatagaatagatagtagttctgttgtggccaaccttttagttggtgtgataagaatttaaaataattactcaaaatcatgctcctctttccgttttcatatgcggttgtaggtgtctagttggccaaccagtcacgtcacactactacatgtagtgtttccgtttgaaacaacacaatatattgtatcattatcttggccgatgaaaagggtaaaattccaaatttatattgaattgtttacaattaatccaactgcgccccggcaatttggtatttttggcgtgctgatttttttatatttttttgatttcgacctactgatagcgttgtcaatatcaggtcaaaacaatgcgttttgtcgcaatacaatgcttgcagtatactggagaggaacaaacttttagcatcacaatataattaatttttttggaggaacctcatgattacgcttaaatcagatcgcgaaatcaaagggatgcaagctgccggtgacatcatggttggcctgtttcacgcccttgaagactacatcaagcccggaattacgacttgggatgttgaccactttgcctacgaatacatcgttgcacacgacgctactcctggcgaactcaactttgaaggttataagtactcaacttgtgtcagcgtcaatgacatgatttgtcacggctgtcctagtaaagatatcttggtcaaagatggagacttattaaaagttgataccgttattaactaccatggctaccttagtgactcttgccacgcctttgttgctggtacaccatcacccgaagttaaaaaactcatggaagtgacccataaagcgctatacctcggtattgaccaagccgttgttggcaaccgaattggtgatatcggctgggctattcagaattacgctgaaaacgaaatgggttacggcgttgtacgcgaatacattggtcatggtattggaccgacgatgcacgaaaagcctgatgttccacattatggcgaagctggtcacggcacccgtctaaaagctggtatgaccattactatcgaaccaatggtcaatattggtgactggcgttctggcgaaactgccgatgacggttggactgttcgcactttagatggcagtcttagctgccaatacgagcacacccttgtcgttaccgatgacggtcctaagattttatcatcattcgataatgattttgatgctaaatacttatggaataagtaatatcatttaaattataatcacgaacaatcccaccctagtttagtcacttgctaatcagggtgggattgttttagttattatcaacagcacgttcactagctattgtcagaataaaactagttatatgtgtcttggaaaacgtcttgattataagacatgaaaaactgatattggataaattttaacatctttatcctcggtcacaatcaactgattcaaccacctaatatatttattttaatgacaaccgtttggcaaaactaacgctgattcaataacgttctcagccaatcttcatcttttaccgcttattgcaaatcgtcattcaccacttgacgcgctcaaaatcatcttgtatagttagtcccaattaatccagaggaggatcagacatgactcaattaacaagtagtgctttgaataactgttgttgccgaactgcgcgcttatcgcgatgttcggcctgttaagcattgactttttgaggagtgtcatcctaaaaatcaatgtccagcatggctggatattgtactgggcgcgaggaattcattcgaattctcgcgccttttttgtcgcttttggcaccccaccgcagcgattggaggaatttatatgctcattcagcacgttcaagaacttatcggccacacccccctgatggcgttacccatcgaggttccaaatcacagtcacatctatgccaagcttgaaatgttcaaccccggcggcagtattaaggaccggctgggagcctatctgattgaagacggcttgcaacggggccgggttaacgccaagacaacgattattgaaccaactgctggtaacaccagaattggtttagccttagcaactcaagcgcaccacctacgtaccatcttagtcgtcccagaaaagttcagtatggaaaaacaagttttaatgcaagcattgggtgctgaaattgttcatacacctagcgaggaaggaatcaaaggtgccattcgcaaagctgaggcactagccgcaacgatttccaacagttacgtccccatgcaattcaagaatccggctaatcccgcggcttattaccacacactggcaccagaaattctggcggacatgcctgcacctataaccgccttcgtcgctggagccggtagcggtgggacatttgccggagtagcggcttatcttcaagcccaagattcagcaaccaaagccgtagtcgttgagccagaaggttccattttaaatggtggaccggctcacgcacatcgtactgagggaatcggcgtcgaattcatcccaccatttttcgatcaggttcgcatcgatcagacactgaccatcgcggacgatgatgcctttgcccaagttcgacacctagcccgtgaccacggtttactgattggcagttctagcggcgctgcgctagccgctagtttacaacttgccaccaacctgcctgccaatagtcatatcgtgaccatctttccagacagtagtgagcgttatctgagccaaaaaatctatacgaaatgaggactttaacaatgaaatttgaaacccaattaattcacggtggtatcagtgaggacgccactactggcgcgacttcggtacccatctacatggcctcgaccttccgccaaacaaaaatcggtcaaaatcaatacgaatattcacggacgggaaatccaacccgggccgccgtcgaagcattaattgccaccctcgaacatggcagcgctggcttcgcatttgcttctggctccgctgccattaataccgtcttctcaatattctcggctggtgatcacattattgtgggaaatgatgtctacggtggcaccttccgcttgatcgacgccgttttgaaacactttggcatgacttttacagccgtagatacgcgtgacttggccgccgttgaagccgcaattacccccacaactaaggcgatttatttggaaacaccgacgaacccgttattacacattacggatattgctgccattgcgaagctcgcgcaagcacacgatttactgagtatcatcgacaacaccttcgcctccccatacgtccagaagcccctggatttaggcgttgacattgttttacacagtgcttccaagtatctcggtggtcacagtgatgttatcggtggcttggttgtcaccaagacgccagcacttggcgaaaaaatcggctacttgcaaaatgccatcggtagtattttggccccgcaagaaagctggctattacaacgtggtatgaagactctggcattgcgcatgcaagcccacctgaataatgccgctaaaatctttacttacttaaagtctcacccagcagttgctaagatttactatccaggcgatcctgataatcccgatttttcgattgccaagcaacagatgaatggcttcggcgcaatgatctcgtttgaattacaaccaggaatgaacccccagaccttcgttgaacatttacaagtcatcacgctcgccgaaagtctcggagcattggaaagtttaattgaaattccagccttaatgactcacggtgccatcccacgcacaattcggctacagaatggcatcaaagacgagctgattcgcttatcagtcggtgttgaagccagtgacgatttgttagcagaccttgagcgcgggttcgctagcattcaggcagattaagctggtgtttcagacggctcgtgccattctcaatcgtgaccccgccgcgatcaatttgcggacagttatgttgacctatcctggtattcacgcgctcgcctggtaccgggttgcccattattttgaaacacaccgtttaccattattggccgccttgctgagccaacatgcggcccggcgtaccgggattctgattcacccggccgcgcaaattggtcaccgggtcttctttgaccatggtattggtactgtcattggtgcaacggcggtcattgaagacgacgttacaattttacacggcgtcactttaggcgcacgtaaaaccgaacaagctgggcgccggcatccctatgtttgtcgcggcgctttcattggtgcccacgcccaactcttgggccctattaagattggcgccaacagtaaaattggtgctggtgcgattgttttagacagcgttcccgcccacgttactgcggtcggtaacccggcccatctagttgccactcaattacatgcttatcatgaagcaaccagcaatcaagcttgattcttatcaaaactgcagcttataataaccggttgctggtatcagttattgtatcaacaataaaacgtacttataaaatcaaaattgatttcatgttgcttatcaagtgacaaccaccgtcatcagcgaattagttctaattgtccgtcactagccatatccgccaaaaccatttctttagtgaattcgggcgcatcattaactgtcgcttgcgctagtatcgccgtagcaattgcaaaatccgttgttttttgtagtgaccacccctcaatcaggccagtaataatgccacttgcaaaggcgtcaccactgccgattctatccaagatcatcaatggccgagctttgccgacaactagttgttggtgctgataactaaaaccagcaaaccacttttgctggccaacttgataacgataacttcccgcaaaatagtcaatgtgataatcacgcacaaattgttcatagagtgctgcctcggattcacgatttgcagattgagtgcgatcttcatcatcgggataatctaataacgccgtcaagtctcgtttactcccaaatacaatatccacatatggcagaatttcctgatatcgcgctttaagcgtctcatgggcgactcccgtattgagctgctgacgataattgaaatcaaaacaaacgcgttgtccgttcgcatgagcctgttgtgctaaccgtagcgcggcttggcgaactggcgcagtcagactcagcgtgataccgcagatatgcacaaactgacagccaaccaacgccgccgcaatttcctgatcatcaggaggctgctgacagaatgcgctactgagccggtcctgataagtgacccgctccggccgcgacccgtacccaagttcgacgaaataagcacccatatgttgtccaccaaaggtaacgtagtcatcctgaatgccatatcgtcgaagttcgcccgctgctcgttgaccaagtgcattgtctagtagacgactcagtagtcgcgtgcgataaccgaagtgtgtcaaactacttaatagattgacgccagtgccaacggtgctcattctcagctcatcagtctgtgtcagcattaaatgttcgggcacagtcaagcgaagtaacacttccccaaacgctaggattttcataagtcaccgcccattagaattgtttcattatcgtcagcaattgggcgaccgcttccggttgcgtctcaccagtagttgcatcgataatcgaactgtatacatggggaataatctgccgtaccccagcggcgaccgcaatctgtacaatctgttggaaattagtgagatccagtccaccggttggttctagaccaaattcattgtcagcacacgccgcagccactgctttaaattcttctaggtgagccgttccttgcattggaaagtacttcagtgacgtcccgcccatatccttgagcattgtaattgcggttgcaacgggaatattcgcttttgctgactgcgaactaagtggccccgttgccacattgaccaaaccgacttcaccactcggcgcgactagcccattaatcacagtatcggcttgacctagcaacgcccggctagtcgccacaccagtgaagacttgattaacatgttgtggctggatttctgcggcaactcgcgccaccattgcactttgttgcggtgaaccagcacctaaaccaaccgaaactgcattgttcactgcggcttggtaacgccgcatatcagtaatggcagactcatcactcagatagtttttcgtgaggacacccaacaccacgtgtccttccgcagctgcataacaagcttccgcgttcgtcactgaattagccaatacgttcaaacaaatcccatttggtaaataattaggtgtcagttgcatgtgctttcctcctcaataatggttcgtaatcgttcaacaatttgtgtcatttcagcacttgtcaaagcgcggatatcaaattcaatcagtccttcgttaacacgatattctcgtggataaatggctggtcgaccttgccgtaacgcctgacagattttggccgcttcagcaatccgcacactcgctctaaaaatatcacgcccagcgccgtcttgaaccatttcaacctggacattcggtagcgtttgtaattccgcaataaagggggctaagcgggctttcatcgattcgccactctcgggaccggttgttaaatattgttcgacggcagctaccaaaccaagaatgttttccttaccgatcttcatggcccgaccgataccgtagttctgttgtcgtgcccattcgacgtacgtttgacgtcctagaaccagcccagatgccggccccgaaattgccttagcgccactgtaaatcacaacatccacgcctaattgtaaataccgacgaagatcgccttctgccgctgcatctaacaccagcggtaaatgatgatcatgcgccacctgcagggcatccgcaatcgttagcatgctcttttgaacagtatggtgactcttaatgtaaaggattgcgaccgtttgtggcgtgatctgcattgccaactgctcagccgtacatcgattagcataaccggccaacacgggttgggctcccgcaaccgcgagcatcacatcaacaggggccccataatcaacatcatgtccaagtggcatgataacctcccgttgcgtgatctgcgttgtatatggatgagtcacatgataggcgttaccacgaccaataataccggccagcacttgcgcaataccggccgaagcagaattgacgatcaacgcgtcctcactgccgattaaatctgccaaataacgacccgtctgaacggtcagttcggccatttcaaaaaagttctgggcgccctgcttttgggcggccgcaacttgatcactgacttgagaaacgcctaaaatcgtcatcttcccatccgcattaattacgggattcaacccgtatttctcataaatatccatgtattcactaacgtccccagtgagtaactatctcaccgatggcacggtttcctttcgtcataattagtttcacttgtctacaccacacgtgtagacccttccggcaataacactgtatgtgggtatgacttgggtgggcgcaattcgctcttctcccgttgaatcaacaacgacctggggagccgtcactgtctgaaagattgtaagatcagcatcgtaaccccgacaaagctgccccttatgggttaatttgaaaatacgtgccggattggtggtaatcataggaataatttcctcaagccgatatcctagcaatagtagcttttccacacaaactgccagactataaactggtccattcagacggttacgataataaatatctgaacttaatgtttgtggaaataggtgtgcggtacgggcaagcgctgctgttcgaaaactgaagctatcggtcccatgaccgacatcaaaaataaggcccttttgatacgccttccgaacatactgtgcgacttcacccgtggaattcacaataccgttcggcttgccgttaaaacagtgtgttaagacatcgccaggccgcattaacgcgatgattgccgccaattcagggggattactaccaatatgaaccattaacggcaactgggccgtcagatccgcttgatattgtttcgctactcggagtggctcgacaccattgtcgccaactactgatttactgacccgtactttcagtcctacaataaagtctggataacgttgaatcgctgttcgtagggctgaaaatgaaagctggttcaaatcggccagctcatcttgagccacaatgcccgtacgcgcaatattaagcaaggcataaacattagtagccgcccgatgcgcctgctggtacaaatcagccacattatccgcaccggtggagcccgcatcaataacggtggtcacacccgttcgataaccgattgcatcggcgtcgtcataataaagcgccgcgtgcgcattgcagtgcgtatgatcatcaatccagccagctgtaatatagcatccctgggcatccaaagttggacagccgactgggacagtcagttcagtccccacttccgcaatgactccgtcagtgattaaaactgccacgggcgcaccgctaacatctcggccattatgaatatataactcagtcatgagcgacctcaaaggaaaatttcgcccacggcccgattgcatccaataatacgagttggtcaggattgatcgttgccaccagattcttccgagtatctgtgtgtggctgttgcacaatttgtaattcatgttgatatttaccgaactgctcattgccaatcacaacatcaccgcgttgaaaagtgtgccggtcatcgttgacacgattaaaatcatgatagcgtttgcgaacctctgttgaccgaatcgttatatcgttgatatcgccacgccgctcgtgcaaattatcgagtaagatctggcgttctacgggctggatgtccgcactaggggtcaccgcaaacgtgatttgatagcggttaagcgcgccgagcttttgcaaatcttcctgcttcgcataggcgttaccaatgagcacactatcaattaatcctgtcgaaaagaggtgctgtacttgtacttgtagcggccagtcacggtgcatctctaaagtcggtaagccatcattgatatcccatggaccgattgttgcgcctggcgccgtgacaaacgctgccgtttcaattccagctcgtttgaaccggcgtgaacacgcaacgaaaaaatcaaagggcaaccccgtcccacgttgcggataaaagttatggcagccataaagaaacggtcgattggcactgtatgacaaaatattagacaaatactcaacgtcgttactcatgttcagttcaagattaagtccctgtgagttatacgataaccaggcttcttgatgcccatcaaagccggcgtctaatcggattgcatccgctcctaatgacgcaaaatagcttagatcctgataggacacacctagttggtcaaaaatattcggggacacatccagggtcgtggtgaagcccagctgatgcgccgactgaataatccgctgatatttctccgtaactcgttctttaccgtcttgtacttccaacatactgacgaacagtcgcgtaaacccataactggcagcgacctttaaataagcctggtcgcgttcaaagacactgtgatctgggtacaacgaaattcctaatgtccgcttcgtcatccgcgtttcccccgttccattgcttcaaaaacttgcaggtagcggttcgcaataattgttgcaaaataaatcgtcactactatggcaatcacagctggtaaatgaagccagccgactagcccgaccgttacaaggatactcagtaaagcacgccacaaagtctgacccgttcgtgctttgatcaaatatgctggcatcaccccccgactcactaaccattcactgccgattacgaatgctgctaatatcaatattccaaacatgctatccctctattctttgctaagctgttgcttctcaaacactttgaaaaacggataatagataacaaggtcaatgacaaagttaacacaagagagtatcagcgccggaacactccaatttgtactaataaacgcaccgagtggtcccggaacagtaaacggtaacctggccatcatcatcggaacgacgccggtgattgtcaacacgtaagctaagcttccagtaattaaaggaccaataataaacggaatccctagaatcgggttcatcacgatgggtgccccaaaaataatcggttcgttaatattaaacagaccgggtaacaaggacaacttgcctagatcgcgcaaataggtcgatttagaaaacataaacaacacaaccaacgctaacgtccctccggctccaccaatccaaataaaccattgcaaaaattgttcagtaaaaatggtcgacagattatgggcgctcgtgccactagtgaactcgctcatattttgggcaatcgacatttcccagaacggccggataacggggtccataatcgcagccccatgaatccctaatgtccaaaatccagtaatgagaagaatcgtcagtagaccaccaaacaaactattgcctaccaaaacacctttgaggggcatcagtagcgtgcttaaaaatgaggaaatattaaagtccaaaagatagcgaatgccccaaaacaacactaggataacggcagctgggactaaggctacgaaggaattagaaacttctggtggtaccccttctggcattttaatggtaatattgcgattctttaaataacgaaaaatttctaccgtcaataatcccgtaataatcgagccgaacaacgacgaggcactcaagttagcaatgttaatgtatcgcccactgctaatgacaccgctaacatttatagtcacgtgaactggtactgcggtcgacacgagaaatgctaagacggctaaaacaccattagttaatttatctaactgataactttcggcaagtgaagatgcgattccaaacgttgcgtacaaggccaagattccaaccgtataacgaaacggcacgtccaaaatttcagcgtaaggcgccaaaaagttagccaccgcttcaatcggcatattattgagaatggtaaagaacgagccgacaatcgttaatggcagcgttgagataattccttttctaatcgcggtcatatgccgctgcgtgccgactttattcgctactggcaaaactttagcatttaacatgttgataaagttatccatattacactagtcatacaaatatggtatgcgtagaagtcttaggggcctccgcgccaagaaagtttgtacatttcctttcatgagtttaccaatgagtgtattgttaattacgcaacatcagcaatcctgaccaaccaatgctgctacggtcgctgagctaataatcaacatccgttccaccccatatttactttctcatggaacagattcagtgctggtttcgacaaaattcacgtattattttcagaatggcgttccctccttttggcaaacatcataacattataatgttatgatgtaaaaaatagtgaaacccaatcgtattttaaacttgttggttggaccagctgatataaacaccatttttatccctcgcctatctctaaatgtctgaacacaccttttaaggtccgctgaaataaggccattgccccagcattaacggcaaggccccagtcttcacccaacatattcggccactgttatctgcatagcatccgcctgaacttccgacctgataaaaatgcgctgaccaccacagtgcatcagcgcatatcagaccaagtatcggttcaatttataaaacgtcataattaatttgatacgggacaacatccgtttgataagtcgcaatagaaaattcaactagccgctggtgaccatcataccccttacgttcgcgccgaatcgctaatggcgtttgactttcaagcaacgcccgctcactatcagccagagtgacagccctgaatttatcttgaaaatgtgtaatcgtctgaccattctcctgtaaaatcttatacagtgaacgatgccgaagggccgttagtttagtaggaaccaaagtattcggtaaataatgatcgacaaccgcaaatggttttccatctaataaataacggcgcttaatacgtaacatcgtcccttgagactcgctgggtagcaatgcagggacagctggcacgcgttcaattttgatcaactctttggtcaactttccttgctggccgaccgttgccgtaaacgactgcgtctgcgtcaacttgttaaatagatcgttactaataacgcgcgtgccaataccactcttcttctccaagtagccctcactgaccaaaacttcgaccgccttgcgaatggtaatcttgctgacttgatagtaacgttcaagttccccttcacttggaattaagccacctacttcatagtcaccatctagaatccgtcgtttaagatctgcggcaactttttgatatagaatttttgttcccatgctatcgttacctttcacgtacataaattattaatataactctattacatttcgatctaaaacaccagattacaaaactgtcaaaatcggtttattaagcggacttaacaatcaagtttggccgtcagactctgtcagcacttcataattatttgtataaataatttaaataatttttttgagtgccacgcacaaagtcttaataaaaaataaggcctatcagtggctaaacgtgctttcactgatagaccttattcataaatatttaacgacttatttagccaataaacttcgctgcaaattcgctgaattgcttaccagcaccagctaagaatgattgggtgccttcatttgtgatatgaccattttcatcagctaacttatcagtattaccgatgtacaattctggttgttgcatcgttggcatgtctaagaagaccaaagattgacgtaaaacatggtgtgctaagacgccagagataccagagatcgattgggaagcaaccaaagcaggcttgccgccccaaacactttgaccccatggacgtgaagcaacgtccaaagcattcttcaaggctgctgggatgctacggttatgttcaggtgtgacaaagatgaacgcatcttgagccgcaacggcctgacgaaattctgtatattctacgggtgaatccgcatcgtagtcttggttatatagtggcaacttagcgatatttaagtacgttacttcagcgtcgtctggtaacccagcaacgatggcttcagcgacccctttagaataagaatttttacgaatagaacctacaattacaccatattttgtcatatcaaacaatcctttcaaaactaatttcttcgtttcacttactaatagtaagtatatcaagttgttgaaaaagtgcaaccattttagcctatcaattttcaaaatcacttgttcaatcgccaaaaaacgttgttaaatcaagacttacgctccagaaaaatattttagtctatgtctaattaccgacagaaaaggtcatcggagtatcaatgattccgatgaccctttctttattttcaatacacgtctaatcgtcacgcatttcagcgcgatatttgatcaacccttcgtttaaaaccatcaaacatctaagaaatcttgataatcattatcaacttgttcaacatacgccgtggcccatttagccatggcttcatcaaacttcgccgaatttccaacgtatccccgaatcatggccgccgttggactttgcgcgtgagcctttgccaaaatcattgcgcacgtatttgcataggcttggaattgaccccagtctagggttggaatatcaatggattccttcatatcccgaaattgacggacataaaaactcttattttccatttggaaatagcccaggaacgcatccgaggttgcttgtaaaatgcgttgcgaactgacgatccgttgcccttccgtcaattccatggcggccgttaacgctggccgcgactggctcccgactttccgcgttggtaaagcttccttgatttgtaacaccatatggctaccatccgtactcgtcagaagaaccaagtaacatagtgacccaaaactcccgacgcccacactatgccgaataatatcagtaacttcatattgcgacaacagcaaagcgacatcggtccgtacgttcaataaatactcgctaattccggcctttagcccttgataagtttgccgatcaatatggacagaacggggcgcgttctccttaaattgccgttcaccgcgactattagtgaccgtaaacttacgcacaacttgttctgaattacgtttttgagcctttttaaccaaggatgcaattaaatcggccgtatcttcgggagcaccaccgaagttcaagacagcctgaacttcgttatcgcgataaaaacggtctaacgtcgtctgatcaaacatccgtttgagtgcttcccgataactcgcactcgccgcctgtatcaatttttcgaccttttttggtttaaagttagaatcacgagcagctagcaacacactaactaataaccgacgtaaatcccattcccacggatggacgccagcttcgtcaaagtcatttaagtcaaataccagtcgccgttctggtgacgcatagaatccaaaattaccaatatgagcatcgccacaaactacggcgggaatttcagtggacgactggtaatccaaatcgtaatccattaactcaactgatccccggaagaatgcaaaagccgaagcggacattcgttcacgccgcaatggtaatagttctggtaccagcatctcccgcacatgtttcagataatcactggcgtttcgcttcaccggtgtaaatgtccctaatttttcaaatggggtgacttggcgccgcgcctttcctagcgcaattaattcagcaaccgtatgatgttgtcgaatatgagttaaatcaagtggtggcatgagtatcaaatccttttatgatttactaattttattatagcgatatcttccaacgatagaaaataattcagctagttgagcccgcttctcgcgtcccaattattgaccagctgacgccaatttacaagcaattttcatgataaaacggcgattctagttgacgtacccctcaaagtcacctacaatttaagttataaacgataccgctttcaaaaagcgaggaggtcacgtattatggcaaattctgaaaaaacattggtcctagttaaacccgatggtgtcagtgaaggacacattggtgaggttatcacccggttagaacgcaagggttatcaaattgccgccttaaaggttattaaagcaaccgcggagcaacttcaacaacattacagtgagaaggttggtaagccttactttaaggaaatcgagacctacatgatggaaggtccactcgtcgccattatcgtaagtggtactggcgtcgtcaaagcggtgcatcgtttagctggtagcacccggcctgccgaagcacaacctggcacaattcggggggatttctctcatgaatatccagacggtattttacgaaatgttatccatacctcagatagccgtgaaaatgcgcatcacgaaattgcaatttggttccccgaattagccgttaaagcacgaaaagcagacaacaaagtaaaagcctagcttcatttttaacatcacgattacgcaattcgcaattactgatcaatggtctgaacgccattgcgtccagtaattgcgaatttgtatacactggatgttttccgtcacaacgttagtaaagcttccaaagataacccgtaaactggcccaactaactgccaacacgcgccgaaattttcgcactaatcgttcgcactagttatgattaaaccaatcaactaaatggtttgggggaatcattatgaacatagtcgttggaccatatgtacggcggccgcgggctgtcaaatcggacccgcgcaacaccagtaaattttcgatgtttaattcgctacgacgaattgatgaatgcctagtcttgattaaacgtactggcacaccaggattaattgattcaactgcaacgttaggtttgaacctaacccacttaatgggattgaatgtcatcgtaactagtcgtggacgttccttcaccatcattgttcaaggtcggcagcggtcgttcacgctgactggctgtctcattgaagacacgctctacaacgccgttcacccagcacaaccagactatctgatttcactaaatcgccagctcattaccaatagtgatgacttaattgagcaactctatgaccactattagctggccagcatcacgcaccaaaggctaacccaccgtgtgggttagccttttaaattgccccatattaaatgatcagttgaacgactttaagcagtgtcgcggatggtttagccggaatcttcatcttttgaacggctggcattgctgtgtgaacattttgggcaaccggacccacttgcgagcgttgccccgaacgactatgcgcaaccaatacagtattatccgcattccgcgcgtatatcacactattagtagcatcttgtaaatcatcactataaatctgggtcatttggtgatgatagaccgcgctgtgcggatcgtctggctgaattcgctgtccggccgcaattttgcggatatgtaacggggttgcctcgttgatgacccgagtccccttcaggtgtagccaaacttgtgcggcttccaccttagctgccggaaaatcactaagttgtggctgacggattgccttaaacgttgctgcggtactacgctgcagccgacgttgatgataggtccggcgctggcttgtatgccgttcaagctgcacttgttcccacaccaaacaagcaccaaagaggacgataccgacccgtaatgcccaaatcaattttttcaatgattagcccccactttaccataattacgctacttaatttaacatggtcttagctaattatattggcaaagccggtaataatttaattattaatagagcagtcgcaccaactcgccatttctagttgcgcttccccttaaactattaacgatttctaacttgacagctaaactgatttattgtcaaaatcactatttaaatattttattttatgatggcaatacaaacattttgattatcgcgatatacttagacgagcattagctttttcaataaggaggcactactgatgaactcattcaagaacccacttatgacaacaccctatctgctagccataatcgccacactgacgatgctagttagtccactgacaacggttgttatatcagtactgatatggttgtcgggaattacgctggtgtggttacaccgccagcaacgatggctccgcttcttctacgcacccgtgtttttgtacacttttttactagaacaatggtatttctccccatcaacccagccactgacagaaacgattctaattaacctcgcaattcttggcattgccattttcagcacatgggcagcttatcaattacgtcataacgcgtaaattactcaccaagaaaaataagtcccccagatgcggtaaccgtttcttgggggacttattgattgcttcaacagctaccgttaaataacgctcgttaggcaggcttcacttcggctagtttttgatccagatatttcttcaatgctgcttggggatgaaaaccaaccaccttttcagcgggctggccattcttgaatatcactaacgccggaatactcataatctcaaattgttgcgcaatttcctgatgttgatcaacgtcgagcgaagcaaatttcacttgcccatcgtacagttcatctaacgcttcaagcactggttcctgcatcttgcaagggccacaccaatctgcccaaaagtcaaccacagttaacgcggtaccatcagccaccgtcgcaaaagtcgtcttatcgactggttcgatcatatctaatcctcatttccaattgatttccgttctatcatagcatgttttcccacaaaattatgacttccgggtctgaatcacgtacataggtcacaaaatcttggtatatcggtgttctaccaatcaaaaattcgatataatagcgttatagaaacgatataacctaaaggaggaatttttgtgtccacacaaacaatcagtcccgaacaggactccgaattagtcgcttccgtcgccgctgaacaactcggtattaaagccgtgacgttgcgcaaatatagcaccatggttgaaaaacagcttaacgatgaaaatcgcttccgcccggccgataacagtcatcgcttatatacagccgctgatttaaaaacttttcaggcggccatcgaactcgccgaacagggcacaacgttagccactgcgctaggacgggcatttggtgctaaggtcccgacatccaaacaaccggcggcaacgacgactcagtctgagaaaccagcgcctgcaactaccaccaagtcgcccctcatcacgacaaccaccgtcgatcccagcaaaatggcaccagcggccaagccagatggcccgactaatgctgagctctataagcagcaagaaatgatcatccggcgcttagattcactcagtgaacgcttaaaccaagtccttgaccaacttgatcaacaagccagtcaagcggccaaaccttggtggcatttctgggaaaagtagccatatgctggtcaacatacttgctcatcagacttacttcggtagggcaagcattacctaccatccaaattaacgcgtgctgccagtcttaaaaataagctacctaccgttcatcgttccagttaactcgcctagcgatggctgctatcaagtggttctttgtcaggcaagacgcaaaaggcgcccagaattaaatttctgggcgccttttgcagctaattaccatggcggttagtaattagtttttttatcgaactactttgttgcagctaagtgcttttcgtacgcagctttgatttcattaactaaatcctcatctttcaagtcagttgtttcgcgaatgacttgttcgattggttcatccttcaataattgttgtaacttaacactttcactatcattaggatagttgaagaagaacatttcaccaactgtatcaactaaggcgctgtaatcgcgaccacgttccttcaattcccgaattgggcgaatgaaacgttcgttgaaacctaatttccgaattggtgtccggccgacccgttcaatatcatcagagatatatgggttttcaaaccgactcaaaatcttcttttgataagcatggtgtacttcaggatcaaagccccacttttgaatcaacaagtcgccggtttcacctaaaacgtgcttagcttggtcaacgacactgtcatccttgaccgcttcgccaatcgtcttgtagcctttcatgttaccagtataggctacggtggcatgaccagtattaacggagaagagtttccgttcaatgtatggttccaagtcgtcagcataatcaacaccctttaattgaatcttagggtttttcatctgggacttgtcgataacccattccttgaatggttcaactgaaacgaacaatggatcatcatgcttttgaagcggtacgatccggtcaacagcggcattggggaagcctgcattttggtcagcccaagcttgttcgtcttcatttaatgattcataaacggatttctttaatgactgactcccgccaatcatgttttcacaagcaatgatatcaattggtgtcgtattgttgttagcttgccgtaactttaacccgtcagcaattaatggcgcgatgaacttcaagatcttaggtccaatcgcagtcgtaaccatatcggcttgggcaatttcttcagcaaccgccttaggatccttaccgttgttaatacccttaacatcgtgaacttcaatatgtttttgaccttctgcagccaattcaatggtataaccattccgtttgtttaattcgtcaatcaaagtatcattaacatcaacgaaagtaatcttaaacccgttgtcagccaaggtttcgccaatgaagccccgaccaatattccctgcgccaaaatgtacgtctaacatgctaatcaacttcctttaatagatttatgatttcatcttcagattgagcgtccgctaacttagcaacgttggcaacgtcgctgcagtatatggcaatctgagacaagaggttcaagtgttcaccgttcaacccagcgatcccgaagataaccgttacagtcttatcatcatcgttatcatctggattaccccagctcacacccattggtacttggaccacggaaatcccggtctttttaatatacttcatgccatcttcagtaccatgggggatggcaatgaaattacccatatatacggagacatcctgattacgagcctgcattgcatcaatgtattctggttcgacacaaccgccatcgaccaatagttgaccggctaagcggatgccttcttcttgcgtagccacttgctggttcaacgcaatcattttcttatctaaagcttccattgttttcacctacgctatttcgttagttcgttcaaaaatgctttactaattaattgataaagttgctggcgatcgccagtcataaacgtctgcgtattggcctgactttcaatgactagtgcgcttaacttacccatcaaccgattttcaaaatcgctgatattggcgggcccgagcattaggacgattcgctgcaaccgaatcgattggttgtccatactcttaaatggtaatggctggtcaagttcgaaaatcgcacaatatggtgcagtgacttcctgacttaacgtatgcaccaacgccaagttcgtattgggaataccgaccggcgccagtcctaagcggtgtaacaaccggcccgcaacttctagcggatcatgaatcaagttcgaatcaatatgccgcgtgatcttaactagcatctcggccaccgtctcatcatcgttgcgaatcggcgtgatagtgaaacggtctaagatctgtttagcaatcgtcatctgttggtaaacggtgtcaaaatccaagttgattttcgtcggctcatcaaccggtgaatcgatcactttggtgcttggaaaatactgatgaatatattcccgtaaggcagtgacttcgttttctagtaacagtgggctgacaacgcggtaattcaacttaaatcccggtaacgttgtcgtggataaaatcatgtcaaagtcttgtaaattaacttggcctagattaccaatccgtgcaacctcgatagccgtgatttcaggtactaaccgcatcagtcgcgttttcaaaattcgcgccgtcgtcatcccattcgggcacaggaccaaaaccttgagtgcttggtgactcaactgttgctcatacgtactagcaaagtgaatcaacaagtacgtcaactcatcagttgtaaaatcctggtctttaaaaatcgttgcgaagccgcgcaccaccgccgaatacagcttaggatactgttcacggacctcttgtaactcagtggttggcggcacgggaccattaacaccgttacgttgtagggcaatttgcatatgtgccgtcaagttattcaacaagcggtcatccgtcccaaacgaccagttaaagttagtcgcaaccgcgtcaataaactttttgacccgatacgttagttgcaaatcataattcgatagcgacgcgtcttgatcgattcgaaacgtcaagcccttaatttgctgggcgagaaaatcaatttcagctcccgtcaccaccgtcttaatctcagcgggtagttgggtcataattgccagagcaatccgttgatatttcaagaaatcatcccgattgatcccgcgcaaatatgtgacccgacgttcatgctgtaaccgcattactcccgtcgtcaacgtgatgatcaactgttgtagctgaccatccggcaccgaagaaaagtactttttcttcaaacttcgcactgcttgataacagataatcaacgtttgggcgtccagtaagttcaaaaaatacgattgctcatcacttgctgatattgctaagccttggttcaacttcccgattgttttaaaaaactcgtagtcgttgatttcattattcaaaatggtggcaaacagattgcgaatactaccctcagtccccgccacctgaatcccccgggacttcaaccgttcaattgataagtcgtagtcggcgaatggcgttgctaatgccgtcaaatcgtttgaaatcgttgcaacgctcacatcaaagtcaagcgcaagttcttttaattttacggaatggcccgtcatcagtaaccgacaagctagggcgttttgccgcgtttgtgagtcaaacgccggtgcaatcttccgctctgctgtcaattggctttgaaacttggccagggccgtctgtgatccacttagttgaaagtgatgcttctcattaacaattttcaaatcagcattggctaataccaattccaaattactgaactcgcgataaattgttcggcgactactattgagaccggtttcaatctgactcattgaaaggccggcgggattcgctagtagcagctgtagcaactcatcttgacgttgtgtaaacttaaccatgatgccacctcatacgataatggtaataatatcattttatttcaattctgataccatcttatcatatttaggtgaactcaatagatcgtcagtaattaatacttggacctgcgtgtaacgggtctttaagtttttagctgcttctgcacttgaaacaactaataaactattattatcagccaattcgtcaattcctaagttcttaacactcacatgcttgttggctttcttgacccgatccttcatcaaggacgttgccattgtggctgttcctaaatgaccatcgtggtgaacaaagacaatttcatcaacaacactcaaatctaagttagctggtaggtcgtcgggtgcagccgtcgttgcttgtggtgctgcggatgcaggtgcagcatcgctaacttgatcacgagcctttaagttaaccacaacttggtcatactttggactgctcaagaagttgtcaacggctaaccgtaaggcgtgtggtgctttttgagccgcccgatcagctaattcgttttgcgtaatcactaataaaccaggttcgtctttcaaattgctaatcgccgtgttggtgacggacatgctaatgccagccttcttgactttatcccgtaataaggaagcccccattgcggatgatcccattccggcatcacaggcaaagataatatggtcaacatctttgtatgaagcaatcacatcagctggttcagcgtcagtagcactgccggcttcagtattgccgctcttcatatcgctcattttaccttgagcagcggctaagtcatcatcactggtcgacttatcacgtttcaagacaattgcggcaacgataaatgatgctaaggttgctaacgttaccccgataattaaaccaatgtagttagaaatactctttggtgacattaatagtaatgaaataatggaaccaggtgaaggtgttgaacgtaaaccaacgtttagtaaactgaatgtggctgtcccagtaaccccaccagcgataacagctaggaacaatgctggcttcattaatacgtatgggaaataaatttcatgaatcccaccaagaaaatgaataataatcgcactgggtgcagaagccttagcagtccctttaccaaacaaggcaaaggctaataagaccccaagacctggacctggatctggttcgagcaagaacagaattgacttacccgcactagatgcagcctgaatcccaagcggtgttaagataccttggttaatcgcattgtttaagaataaaatcttggctggttcaatgaagacgttggctaatggcaatagcttcatcttaatgatccagtcaacaccggcagccatagcagcacttgcaccagcaaccaatgggccgattgcaaagtaacccaggattgctagtaacatcccgataatcccagcggagaagttgttaaccaacatttcaaacccgctcttaatcttatcggaaatggcgtcatcccacttcttaatgcaccaaccgcctaaaggccccataatcatggcaccgataaacattgggattgaagaaccaacgatgacccccatagtggcaatcgcaccaacgaccccaccacgatgaccggcaaacaaagtcccaccagtaaacgctatcaataatggcaataaataatggaccattggttgaatcatcttagctaatccagcattaggccaccaaccaccagccataaagatggcggtaattaagccccaagcaatgaaggcgccgatgttcggcataaccatattacttagtgcactcccaaatttttgaacgcgtgccttaacgcccagtttctttttcgcaacaggagcgctttgggttgcattcgtatttacattttcactcattaggtaaagctccttcctttttcttaacaacttaatcatatccatcggggtaagcggtttcaagaacttctagttagacccgtggcacaggaaactgtgccacaattaaactcactaattcacaaagttaaaatttggcacagtatcgataaaaacttttatatcggcaataccagcagactaattaaacttttttcgtcagctatgatttaattttcacaatcaaattcaacattttatgcagaaaacacctggcaattctctcatcattttattatttaaatgattacgaatacgatttaacgttgaaatccccccgcaagctcctatacttataattaactaaggagtgacctatgtaatgaaaaaagacactgattgtaccgaaatattggttgggaaagctgctagcatggatggttcgaccatcgttgcccgcaacgaagatggctacggcccaattaatccgattaagtttattgtgcacgaagcccacgaccaaactaacgccagctacacttccgtaactaccggcgtcaccgttccgctgcctgaccatgcctaccgctacaccgcaaccccccaagccgatcaaagcgatgggcagtacgaggaagctgggatcaacgaattaaatgtcgggatgagcgcaactgaaaccactgccaccaatgcccgcgtactcggttatgatccgctcgtccatgatggcgtagatgaagaagtcatggtcaccctcgttttaccctacattaaaagtgctaaggaaggtgtccaacgcttaggtgccctaattgaaaaatacggaactggtgaaagcaacagtatcgcctttaacgatcacgacgatatctggttgttcgaaaccgctggtggtcaccattggggggcagttcggatgcccgaagacacctacgcaattgttcccaaccaaaccgtggtgcaaaagatggatctcaacgataccgacaatttcctaggtgccagtgatttagtggacttcgttgaaaagtatcacctcaacccaacacccggtcactttaatttccgtgaaatctttggtacccaaagtgaggcggatgcttattacaacactccacgaacatggtatggtcaaaaactatttaatcccgaaatcgaacagaatcccactgatcaaaacatgccgctattccgacaaccaagcaaaaaattggctattgaagacgtccagttcttcttatcttcacactataacgggacgccttacgatccatttggcactttcgcttctggtaacgcccgtgaacaaacacgttaccggtctatcgcgatggatcgcaatcagtgctcatctattctgcgaatccggaatgacgtgcctgctaagcaagccgccattcaatggatcgcactaggtttcttcgcttacgccccatacgtgcccttctttaccaacatcaatgacacgccgattgattatcgcaatacaactagcacggtcagcgttgataacgtctactggttatcaaaaacgctctccgtcttgattgaaccacactggcatgaattttctgaaacggtcaatgcctatcgcgacgggtgccaatcatatgcccgtggccgggttgccgcaaccgacgcagccattaccggcaatccgaccgatttcttgaccaaagccaatagcgaaaccgccgccgaaatttccaaccggacccatgcgttgtttgatactttggttaagcaagggctgttgttatcgaaaacgacttgggaaaaaggacaaaatctataaaaaaatcatcaacgacgtgctactggaacatttcagtagcacgccgttttgtgtttttaattatcattgatatgctgatgtgctaaccgatacccatgctgctcacgataatcattgggagttatcgccacttcgcgtttgaacgcagtaaagaaactactattatttttatagcctaattcagctgcaatttgttcaattcgcttattagaaaatgccagcattcgtttggccagttcaatacgaataaatgttaattgttccaaaaagctcttgttgaacagtcgtcgacacagccttgaaaaataatttttgtcatatccaaagtaacatgccgtttcttttaacgtcgcatctgcgttatgtgcgactaaatacgtaaaaatcatccctgattgcgtatcagcattaacatgtcgaatatttttaccaggaaaataagaatccgtaatcgaaatgcgttcctcatgatgccgcaatagttccgtcattaacaatcccaccgtcatctctcgttgataatcaataaaaacatcttgcaaatcttgccgttctaactccgtcaacaaatcaaagtaccgttgggttatctgatttcgcaattggcgataaacaataaaccgcaatgtccgctcacccgcattcattaaatcatgaaccattgggttatcaccgacaaccaccaagtttaatggcgtgggcgcatgcagacgttccgaaaaaacacttaactttactggtgcccccctattaataatattaattggctgcgcagatgaaaccattacaatatcatctggggacagtgccacgtactttccgactaatgttaattcagcgaaatcgtggcttacgataaagcgaatgtgaaactctgaactgcaatttggtgaacttgaaagatcattacggcgtagaccaataaaatcgctttctttcaattgataattgctatttaccgtctttatagaagccatcactatcacctgtcaatcccttaaaagatatataaacatattaataaggatattatacactatcaacttgtgcatattttagctttatactaactttgtaaattcgaataagggagtgcaactattatgactaatcaaacaattgatactgatgtcctcattgcaggcacaggtggtacaggactagccgctgcgtacgcagccgtgacccatggacttaaagtcaccgttattgaaaagcaatcacaaattggcggtaacacaaaaatctcaagtggatttttcgccattaatagccgtgaacaacgggaagccggtatgcacctaacaactcaggaggccattgcacaattagccgactacaatcactatttgtccaatggtaccctacttgcgcggatcgttaaccgctcggcagataccttagcctggttggaaaaaatgggaatggaaatcaaactcaacccaactgccaatacgactcagtttgcgcatcgtaataatgattatcgtgggggttcctatcatatgtaccaacataaagacgagagctatcagcgcatccaacaaacattaacgactgccggtgtcgattttcactttaatacgacctttactgacctggtaatcaccaacggagcagtcactggcgcaacagccatgaccgcttcaggtgaccagctaacaatcaccgcccacgcagtcgttgtggcaaccggtgggtacggtggtgatcgtgaaaaagttgctcgaaccatgcacaccacgcatctaagaaccttaggtgttccaaataacggtgaaggtctggctgctatggttaaagctggcggtactgacatcgacagccatgcgctcattcatgctgcgcaactagctaaatcccaagtcactcaaaagacttctcagcaacaccttgctggtttttccggtaatccattaacccaattattattaacccctcaactatgggtcaacatgcagggacaacgattcaccaacgaagatgtggtctacgataccgttgaatgggcgaacgctgcttggtctcagggtggtcaatatctctttatcgtggatcaggccacgctcaatacattcaccaccaaccgcaatcgcgaagaagtttctcaagcaggaccgggcgcagcgactggcagtggtgactttaccgcattagctgaagaagctgtcactggtaaaacagcttttaaggggaacacactcactgagctagccactaatgctggtatggatccttcaacattgagccagaccgtcgctacttataatcaagctgtcgcatctaaaaacgacagtgaattcagtaagcgcttgcagtctttggattattcaattagtgatggtcccttctacgccttcatctgccaagccgcttatcttggtacggtcggtggtgttcgggtcaatcgaaatctcgccgttttagatgacgatttcaaacctattcccggtctttatactggtggcgccaatgctggcggttactatgagggacacagctatcctgcatttgaaggacttgcctctggctttacttggacgtcgggccgaattgcaggaacaagtgccgcggcttacgtcaaagcaaagttcgccactgtcaactaaatcataaatccaatattgattcttttatttaaggggatgtccagcatggaaacaacaaaatcgatatcgggaccaagtaaaagctacgtttctaagacccggattggggttcttgcagtcagttcaatgggtatggcggcactcgcaattaccccatcctatgcagcaatcgcatccaatttttcactcagtaatacgagtgtccagatgctaacattattgcctaatctatttatgatgttagcagggttgattattggcaaactaacggcaaccaagctcaatctcaaaacattaacccttagtgcggcaatcttagtaattatcggtggttttctaccattagcctttcacacaaactttatgtttttgttattttgctcgtgcttagtcggtctaggtcaaggcgcctgcaccaatttatcacaagtcttaatttctcaaatgctaccagaaaccgaacgccagtccactatgggtttaacaaccaccttcaccaatctcggtggtattgtcttcatcatgggtggcggccagctagctgcaacgaacggttgggtaaataattattggatttacttattctcagcacttattttgattgtgatcttaacattagtgccgatgcatccggcagcagtcaatgcagccaacgatcaggacaccggtgaacagattaagctcaacaaatacgtcttttactgtgccttctggggattctgcacgttactcttaaataatgttttgaacaacaacatttcactatttgttgctgaagaagaacttggcgcaacctcacaagccgctctaacgtcaaccgtttcattaattggggggatgctatgcggcttgattgttggcgttatcggcaagcggttcaaatactcatccatcacaatctcgtttatcttatacggcctgtcctacctgttaatcggtcttggacattcgctatggttagcctttgtaggtagcttcatcgtgggtgccgcaatgagtatcgccatgggacaatttccatatttgatctcaatttcagttggcaaaaacagtgtttcgatggccctaggtgtgtacgtcgcgatttactcaatcgggggtgtggtcagtcctttcatcgttaatccattgactaaattagttgctggtatgggtattaacgtcttcgtagtcagcggctttattgcgctgatcctagatgtactatgtatgggatttcaattccagaaaaaattagtaacggcggcacaataaccgacttgaccgacaaagttaaaaagccgtgcttcacaacgcaatcgttatgaagcacggctttcagttcatttttagcttaattaaaattaatacttcttgcttaacttgctagcagccgcttcgtcaatgataacggtaacgtctggatggttttgcaagatacttgctggtaattcaggggtgtctgggccttcaatcatacccttgaccgcatcagccttgttttcgccgaatgcttcgagcaataagtgcttgctcttcatgatggaagctaagcccattgagaaggcttgcttaggaacatcattttcgctggcgaagaaccgcgcgttagcttcaatggttgattcagttaaatcaaccacgtgcgtcgtaatatcgcgaggagtacctggttcgttaaaaccaatgtgaccattacggccaatccctaagatttgtaagtcaattgggtgttcgtcaatcactttgtcgtaacgcttaacttcagcttctggatctgaagctaaaccgtttggcaagaatgattccttaaatggcttgtcattgaataaatgagtttgcatgaagtatttataactttggtcgttgtctggtgcaatcccaacgtattcatccaagttaacggatgtgcagtcactgaaatctaagtcactattaacgatttctttgtaagttgtaacgggtgtcgaaccagttgccaacccaaatactttcgcaccattgtctaaagcattcttaaatactttgaaaccttcttttccgccggcagcttgatcctttactacgataactttcataattaactgactccctctttgtttggtatagtccaattgtatattggtctagactaaaattcaagaggtttgtctgaaatatttcacttttattttttgcaatcgttatcattgttaaactgtcaagccaaactcctttaataaattaattgtatttttcgataattttgcctatacttaacatgttcgtaactccgtggaacgtgagaaattccacgactagccaaggctgcaaagtcattggctatttttttgcgctcatacctctacgccaaccatttatttgttcacatttcaatcaaactatccaatatttacattgcaattggtaacggctaaaattagctttgtatggaagatatatattacataaagggaggtgttaaccgcgaatcatgtcaagcaataccggttaatggccggattctcacaaaaagaactcgccagcaagactggcatcacccgtcaaaccctgagtttgattgaaaagggcacctataacccatcactgaaactctgcctcaacctctgtcacgcactcaaccaaacactcgatactgtcttttgggtcgaacccagttaggagatccctgccatgaaaaagattcgtgacgaacgtttaattttacaaaatttcaagaacatccgtaccacgttgttaattgaaaatagtgctatcttactgattttattttggcaaggctggcaaaaaaacaatcttcagaaagcctttacgtacgacaatccgttgtatattgtcctgatgattgccgtttttaccatgatcattttgtctgttaatgtcagcaccccaatagaagacaaacccaaacggtcatggcgctaccttggcctgtgggcactcattgaactaatcggtttcaccgccctattctacttcctgattgcgataaatcagccgttcattagtctgatcgctggtatcgccctgaccaccgtcactagcggtatcatgctgtatagcaaccacctgcgcgatcgtgattaacatcagatatcacctagacggtaccattctaatcacatttgcggtaaactattcccagaaattcaacggacacgaggtttttgctatggaaccaacttttaacaaaatgactgcgactggttaccatgccatcgaacaggaaattgaagacttaaagcaacaacggcccgagcgaatcagaattctggctgcggctgcggcactaggtgaccgttctgagaatgccgaatatagtagtgccaaacgggacttaggtcgcttagaaagccgcctgcgttatctcaacaagcagttgcaatacgcccaaatcgttcaaccagctgacaacaatcaactcgatatcggtaaattcgtgaccatcgaatttctggatgatcatgaccaaatcacctatcaattagttggaaaacaggaagccaatctcgaacaacaaaaaatctcattcacatctcccatcggtcaagcgctcgctaatcatactgttgacgatgtggtcactgtgaacgcaccgaacggggcttatcaagttaaggtaatcgcggttaagcgcgcgtaataaaatagttatgccaatcgattggaagcttatctttatttttttgaatcaaaaatacactttctgaagcgtatacgtgctaaaataaagacagtaaaaaagccggtacgttaataccgacttgaatcaaggcccgctctaagagcagttggctttaaatttagataatcaaagaacagtcacccaataccggccaaagttttggggtggctattttttgtttctggagttccatacctgatacatcgctagtgcgatgctcaaaatgatttgcaagaaagcaaaccaaacaagtagagtgaccacggctgaaaacctttcctagtgtgggaaacgtatttgtcatactaccacgacctttcaagatgaaaacagccaaccgcccttaaaacatacctataaacatattttaccagatagtggctcacagctacacagttagcattttgtatgattaaaaaagccaatcgctactgcaccatgcattgcgattacgctgatatcacaaaccaatcatcaacaagcagttgcccataaaaagatagcgacgagttatcatcacaacgtcgctatctttttatatcattcaaattaaaattcttggtacactgctggatcttgattattcaagcgaccatccacttggctcaaaccattaattgttgccatatcagctgcactgatttcaaaatcaaacacgtccatattacctgcttgacggctcggcgttgacgactttggaatcggcaaggtccctaactgtagttcccaccgtaaaatcaactgaccaacatttttatggtagtgcactgcaatctctttgagcgtctcattttgaagcatctcactggcccggccaaggggactccaatcttgcgtcaaaataccgtgtgcttgatcataatcccgttgtgcctgctggttaaagtacggatgtaattcgacctgattaatgacgggtaaaacacccgtttctttgtttaatcgttctaaatgttctggtaagaaattcgagaccccaatcgaacgaatcaagcctaacttctgggcatcaatcagtgcctgccaagcttcaacataatgatcttccttagggttaggccaatgaattagatataaatcataataatccaggccagctcgatataatgattcttgaatcgtattgatagcttccgtgtaggtgtggtggcgaccaggaagttttgatgaaatcaagagttccgaacgcggtactgacgaacgccgaaccgcttcaccaacagcaccttcattttcatagttaaaggccgtatctaataatcggtagccgcgatcaatcgctgagtcgatcacttgcacaccatgagcaccattcagtttatatgttccaaagccaattttaggtactgttaaaccatcacgtaacgtataagtttccaacttaagccacttctttcttttaaattaaacgatcagccaaggcatcacgaatcgctgcttcaaatgttgccggccgtgtcgttggggcatagcgttcgagcacacggccatcacgaccaatcaggaattttgtgaaattccacttgattcggccatgtcccgccgcctgtttgaggtaagtaaataacggatcagcgtcatcaccattaaccatcacccgtttggtcatgggaaacgttaccccgtagtgccgttgacaatagtcatgggtctcatcgtcatccgccttttcttgatgaaattgattggatggcaatcccaagaccactaggccctcctgctgatacttctgataaagttcttctaatcctttaaactgtggcgccaggccacagttgctagccgtattcacgattagcaagacctgaccgcgatattgtgacaagtcaagtggcgcaccactcatctcagtttctgtaaaatcatacactgattctgccatcgagatccctcctaagaatattaaccaaatacattgctttatccatagtaaaccacaaaattgtgacttttcatcatactttgctttagtttccggaaaattgattgcactgaatgtcattatccgttacactaaacgtatcattcatagcaactggggtgccatcacggctgagataatacccattgaacctgaatctggacaatgccagcgcagggagcaatgcttttatttggggaaccatcaattcagacttagccgcctgccaccgataatcgtggtaggcgttttttgtcgcttggatgcgtgaatgacaaactacttttgggaggatttaacaatgaaatgggttaaatcatggtacttgaacgatattattttactggcactaattggtattttctttggtgccatctttatggggactaattttgtttataacattttaagtgcggccctgacaccatttggtctaagcggtctggctaatgaactactacttggcttatggtgcatgcccggcatgttagctggctacctcattcgactaaagggttcggcaacgctaggtgagctcctcgcagcaaccgtcgaaatgtttttcggtggtcaatggggaatcaccacattgatttctggtgtcgtgcaaggatttggggccgaactaggttatatcgtcactggctacaaacactatgactggttaggcttaacggctgcggccgcaacaactactgtggtcacctttggctgggaccttgcccgtaatggttactataaattacagctatggctcttgattttatacgtggtcgttcgctttatttcgatgtttgttttcgggggtctgttaactaaaaccatcacggacctacttgatcgcagtcatgttttaaaatcaacgcattaatacactttataaaatggaggctttctcgaatggctagtatcgcgctgaataatttaacttacacctatccacaggcgtcgacacccattctggatcgcgttaacctaacactaccacggcaaagcttcatcctattgacagggccatcgggaacaggtaagtcgacgctcctaaagctgattgcaggcttactacccctgactccagattacggcaccattacctttgatggtcagtcattaactgctagcaccgctaatcggcgcgctcagcacgttgccatgatgtttcagaatcctaatcagcagtttgccatggataccgttgaaaatgaactaattttcgcacttgagaacttacaagtgccccgtgaccaaataccggcccgcttacttagtgcgcttgactttgttggtatccgaaatttacagtcacgactattaaatcatttatccggtggcgagaaacagaaagtggcccttgcaatcattgtcgctatggatagcgatgtcatcctactagatgagccctttgccagtgtcgatccgaccgcacgagccgtcttgttagaccgactcgtggaactacgcaatcaacatgggaagacaatcatcttggcggatcatgacctaacaggttacgaacagctcgtcgatcaagtcgtccaaatcaaggaccagcacttacagctcattgaccgtaccacctggtctgagttattttcagcctttactgagcagccacaacggtcatggtcagcaccgcaacgcgttgaacgcccttgttttcaacttgatcacgtcactttacaggcaggtgatcgtcaactattagtaccgacaacgcgtcaattgttagcacaacacaatacgctgatcacgggtcctaacggtagcggtaaatccacgttatttgaagccctcgtccgtctgcacccctatactggcgaaattcgttacgaagggacacctatcgacaagctaaaacgcaaacgctatgctcgccacgtcgccttgctttttcaggacgctgagacccagtttttaaacatcacggtcgctgaagaactggctcaaagtaaacgctatgcgtatggcgactactttaccgcagaccgtattcaaacggccttagtgcaactcaacttatccggtcgtgatgaacaagtcatctatactttgagtgagggacagaaaaagaaactacaaattctgctcatgttaatcatgcagtcaccagttctactcatggatgaacccttaaaagggctagatttgcattcgatcaatgccctggtcgcgttattacagaccacccaagcggcaactaagcagacactgattattattagtcaccagttaaccggcctgatgccattgattgactatcagctacactttgaaaatcaccatttagattgggtggtgcgatcatgaatcctagcatgaaattattattactactcatcattgcgctagaaatttcattcacgacaattgtaagtttgaacgtggcactgattattctggcactgatttacctgctcggtcaccgaactcggcttcgaacattagggtggttgctactcattccgttgctaccagcaattggactttggagtacccagtacattaacggtagcggtgacaagactttgatggcctgggtcctgttcacacgaatctatgcgtttgtttttacgggcgctacttttacgctcacgactgacgtcttacaattaaccgattcgcttgagcaaaactggcatttacccgccaaatttgcatatggcgtcctcgccgcgtataacttggtaccacggattcggcacgaagttcaagtgattcgggctgctggtctgatgcgtgggcaggtcctgtccttctggtcgccacagctctactttaaagcaattttggtctctatcaattggtcgcagaaccttgcccaggccatgcgctcccatggttttgtcgaagatgcaccccgcactcactatcgtcagattccactgactaagttggattggaccattgtgattagtggcggcttgcttttacaagtcggcgccttcgtcattccgtggcgctagtggtctcattcactgaataaacactaaattaaaacaggttttctcaattatgagaaaacctgtttttgggtaatattccccacttaggtcgggtcacaacaataacaagttgaccttaattcatgctttcagccgatcaatttgttgccgtaacgcctgaatagcagctgtagaagacgtcgggtctgccattaattgatcatacttgaactgaagtactgctaagtcagcttctaccggttgcggcgctttaacaactttgtcaggatcaactaattggtgcgtctcgaattgcaatacccgagtagcaacggcctggcaaaacggttcatcatgtgaaacaaaaattacggttccaggataattttgtaagtaatcggccaacgcatccagcgcgtccacatccaaataattggttggttcatctaacattaaaacgttatattgaccgactaaaatacgaattagctgtaatttaactagttcaccaccacttaacgccgataccagttgcggataaaagcgtgctggcaggcccaacgcgcccatgacgttacggatcgtttgattcggtagctgactgacttgccgcaccgtttgccacactgactgtttaccgtcgagcactgtcatatcttggttgaatactccgactcgtgccgccggagccaatcgtaatcctgacacccggccacctaaaattgcacgcagtaatgtggtcttaccgctaccgttgggccccacgatagcgacccgatcatgtggcctgatttgaaagtcagcgtgtgctaacaacgtttttccatattcagccaatgtgacattaagaccagttaccacggtcttacctgtaaacgtcggaaaatctgtcgcgactaacttaaagcctgaagtcgtaaagggcttagcaacttgcggttcccgttgtcctcgggcgaccatgcgtttagccgttcgttccatcttggccgcggtagcttccctagtcgctttcgtcttggcacgctctacttgcgacattcgccgattgccttttcgaatccgctgcgctttttcattacgttgacgctgcgctgctagtaactcacgctgatgagtgttttggcgctgatacgcggcttcctgagttgcgatttgctgcgcttttaccgtctgataatatgcgtaattgcctgcatatgcggtgaatttttggtgttcaaccgcccaagtctgtgtcgtcacagcatttaataattgccgatcatgtgaaatcaacaacagcaacccacgaaaacgttataactgattaataagccattgctgatgtgtttcatccaaattagatgacggttcatctagaattaaaattgttggccgggcgctcaaagcctgccgaattctggttagcatagcttgaccaccactttggtcaaaagtcggtgcgatttgggcaacatagctgactggctcgtccaccataatttgtcccgtataatcacgatcagtacccgtcagtaaatgggccagtgttgatttaccagcaccgttccgcccaaccacgccgattttatccccggcattggcgactaatcggtcaattgtaaatagtggccgtcccgccatatctttttgaatattttttaaattaatcattgtcattaataagcatccccttagttgcagggactaatttatggcacaaaaaaacgtcctcaaaatgagaacgctggcaattgattccaccagcaccctaattaatcccaaaacggacagtccacccctatcgctaggcatggctctgttcagttactagaattaattagttgcgcattggctgaatacctcgtgttttataagttactttgtagattagcatgtttaatttcaatttgcaagaaccattgttttttaaaagttttttcagtaaactaaaattactttcagaaagcaggtgtcagcttgaaaaagatcattgcaattaccggcttcgcaatgctaggtggtggtcttcgggaggggcttagtttgctcgtcacttggccacagcatttctggataacgtgtctgattaatattgtgggagcatttgttcttagcctgattactaacttgttaccagcgcggttacccgtctctgaagatattgttatcggtatgagtgtcgggttcgttggtagctttactactttttccaccttcacttttgaaacgctacaatcgtttcaaagtggtcatagcgttttagctttaagttatgtcgctgctagcttagggttgggtttgctagcggggctagctggaaacttccttagcacctattggctaccaaaggaggaattttaatgttagtcctagtcggattggccggtgccggcgcagctgtaggggccttaagtcgttacggcatcatgcgcttagcactacctctcaatcgatggccgttaccaattgccacgttatttatcaatctaaccggcgctttattgctcggttggattttaaccagctcattaccgcccaactggcagatttttctaggaactgggattatgggtggctatacgactttttcaacaatgatcaacgaactcgtgttgctcggccgtaaccaccatcaacgggtcgcctgggaatactttggcttgagtctcgtcggtggcctagtcatggtttatctcggaactttaatctaactcaaaaaacaggaagtctcacaaaactaactgagatttcctgtttttgttcaatgactatttagttccaacaagccgcctttacggctagcgtgccgatgacactagttttaacaacgctcatctttatctttcaaattacgtggtggcatttccgaataatgcaacgccggcaatcgccacgacgatcaggcctaaccataatgcgattttaaataaaaacaacccaatcacaatcatgaacacccaaccgataattttaaaaccaattttaaagataactttgagcaaccataaaccaattactaaagcaatcaataaaccgatcatctatgcgctctgcgaagagagcttccctccttacaagtcccatcatgggtaccttgccagttagtatagcacgcgctatacagcggcagactgattgcagtcgtaaattaagagaagcttaattttgcaacgccgcaacttgtcgcaccatcgctaattcttcgttagttgggatcaacatcactttaatcttggaatctgcgccactgatgagtccttcttgacccgcttcatttaatttcggatccagggtcacaccaaagatgctcagttcatcaataatttgctggcgcaaggtcgcattatgctcgccaatgccgcccgcaaaaatcagcgcatccgcccgttttaattctgtcaaatagctaccggcatacttaacaatccgattgacaaaaatttcaacagctagttgggcttggggattcgtggcttcttgcgcacggatttcacgcatatctggtgaaattcctgagattcctaacaacccagactgattgttaagcatcatcatgatttcattcggatcatcgatctttaaagctttcatgaggaatggcaatacggccggatcaacgtcacccgcgcgcgttcccattgtgacacccgttaatggcgtaaagcccatcgatgtgtcgaaggcccggccattttttacggcagctaatgacgcgccactacctaagtgtaacgtcaccaggttgaggtcatctttcggcttagccagcagttctgcagcccgaccggttaagtaaccatgcgagataccatgttcaccgtaacggcgaatatggtatttttgggtcaattcatatggcaaactgtaaattgcattcatttctggtaaatcggtaaagaattgactatcaaataccgcgtactgtttaacggtcggtaaagcctgagccatcgtctcaataccacgtgcctccatcggattatgcaatggtgcaaagtcactaagccccttaatggcctctagtaccgctggcgtcacttcaactgcttgcttgaacgtttcgccacccgcaacgactcggtgagcaactgccgtaatttccgttaatgagtcaataattgctaatcgctgtaattcagccaataacatctgcgccgcatgattttgatctaaattatcgactgtcgtttcaaacttttgatggtcaccatacttgatggtgaaaattgaaccgggcatactaatccgttcaacgagaccactagcaaccaccgtttcagcaggcatagcaaataattgccatttcaatgatgaactacctgcgttaataattaatgttttttgcatttctcaatcaactcccatgtaatagaataccgaacttttctgaaaattgctcaacttttttcaatcgtgtcatttgacatcttaattcattcgctagtcccaatcttccactgttaactaaccagaacatgttattattaagacgttaacttttacagattagaggaacccattaatgacgaccacaaccgatgtcgacctagtccaaactggattagcgcacttaattcaccacacgcgtaaacaaatcgaatcattaactaaagcattagaccacctgcctgatgtcagtgatttgcaactcaagggcacgttattgaagacgtatgctagccagatcgaagggcaccatcatttcgtcgaattgcccgactatcaaggccaccaactcagtattaaactcgatattaaaaaatcaattattgaaaatgccgaggattattttcatcattatcacaaaagcaaacgcggtcaagcgaccgttcaacaaaatttggcgacggccaagaccgaactataccagcaattagcaactcaagcagctttcgaccctaatgatccacaagcggtcgccgcgcttaagcaaacactgattgctgcgggcgcgattcatacccacgttttacactcgtctaaggccccaacacccgcccatccccgccgcttttacacgcacgaccacgtgctggttgaagttggtaaaaatagtcgtcaaaacgaccacctaacattgacggcccgtaaagattactactggatgcacgcgggtggtgaaattcccggttcacacgtggttattcacagtaatcatccgagtgaacaaaccttgcaggaagcggccgtactgacggcctattacagtaagggtcgtcagatgaaccgcgtacctgttgatgtgctcaccgttggccagatgcgtaaacccaagggtgctaaggctgggcttgtcacctttagtggtcctgcacgcacgatcaccgttgtccctgatgctactttagccgctgaattacgtgaccaagaggatattcaccatgacgccgattgaggcctatattgctaacacaccacaagcctatcaatcgcaattaatagccttacagcaaaccattgcaacggtcttaccagaggcgcaagagcagttaaagtaccagatgccgaccttatattggcacgaaaacgtcatccattttgctttattcaaacatcactttggcttgtacccaacgccaagtgcaattgagacttttcatgatcaattaatcacctataaaacaagcaaaggggccatccagtttccgctggatcagcccctaccacttgaattgattactgctattaccgaattccgtcgtcacgaaatcatagcgaaatacgacctttaggattaccgctgccaccaagactgtttaagaaaatcaatggcggttacgtcactcaacgcaatcggcttaacgactcccgcttgttgattcaaaaaaagctgctggtcgtccacagccgcaattaagccactcggctgatgaccatcacttaaagttaaccgaaccacgcagtttaactcataagcttgcaataacgacgcttcaattggtttcagctgttccattagatcacctcatcgaaatagtagctccatcatagcacatttttagaacgtacgttcgataaaaactattacattttgatgacgttgataaaccggtcacttgtaccaatcagtaatttcaccagctaactaattatgccgttaactaccgaggttaccgaacattcgcccaaattattttaaaattgcccggattcggtcagttgaagttagcgcacggctatggctcagttcaaaacatgaccgtcattaaattcaaaagccgccagcttagaataagtctcgtatttgagactgggcgggttcgggctcaaatcgatgtcggtttacgttccagcaattgtcgctccgccccggaggtcggaaatagggcgattattgctgaagaacaggagtctacctaacgagcctaagagtgagctatttttgaccttaataaacaggacgcgctaataaaaaggccactccccggcatattgggggagtggcctttaatgcaatttactttagaatcgcggtaatagcttttacttcatcatcactaaaggttaaattgtgcgttgcttcaagattagcgtgcaagtggtcgacattggtcgtaccaatgatgacgctcgtgacgacctgtgaccgtagtagccaagccaaagccatttgggccaaggtttgtccccgttgctcagcgattctgttcagggcattcaactgattgacaacggctgcagtcccctgatcaaataaatatttattcgttcgatgaatcggaaaatcggctggaattccttgtaagtagcgctgcgtcaataatccttcagctaatggaccatatgccaccaagcccgcattatgctggccgagatagtcaatcaggcccgttgtttgagcctgttgattcaacatgttatatgagtactgattaaccgtaaacggcgtgtgcatctcattaaaatacttaaccatcgttgccgtttggtcgcggtcataatttgaaattccgacatacaacgccttcccctgacgaaccaactggtcaagggccgcggcagtttcatacaaatcgatgttagggtctggacgatgtgagtagaaaatgtcgacgtaatctaaatgcatttgcttaagactacgatccaatgaactgatcaatgttttgcgtgagccgaaagccccatacggccctgaccaggccggatatccggctttagtcgtgatgacgagctcatcacgatacggctttaaatctcgttgcataatttgtccgaacgtccgctctgccgatcccttcgatggtccataattatttgctaaatcaaagctaaaaacgccatgatcaaaggcatctagaaccacttttcgtgaattggcaaacggcgcttcatccccaaaatttcgccatagccctaacgagacaacgggtaactgtagccccgtcttacccacgcgtcgaatcggtaattcgtcatagcgcgttgatgctgctgaatatgtcatcattactcacctcatctaatttttgaatactatttatattataccgcgcctgtaatattggtactgatcaaacgcttaagcggatacaaaagggcgatcctcgccaaatgctaggaccacctcacttaggagtttatatgtgatgtctgctgttgctgcctaattagactttgatttgaaataaggttcaacagtgcgtggctatttcaaaccaccatctattgtagcccggaatcgcccgttcgttaagtcattgcgcgtcagaattgaggtaggcggttataatatgctaaatattggcgaccatggacagcatccaccattactttagtgacgctcgtattagctggctccggtaagctcatcggatcggtcggctttagtatcgctaaggccatggctttgacggtaaaaccatgggtcacgacaatgatctgctcgtctggatgggcttgtgctgttgtcttcaaaaatgctgctacccgttgttgcacgtgcacaaaagtctcgccatccgtcgcaacctccacgtagcttggcaaaacgtcctgtaaaagtggatcaaagtactgcggataggccgctagcaactgatcattatcctgtccatcccactggccgtatgaaatttccaataaccgctcgtcctggctaacaggtagttgccggccttgattcaaaatcgccgccgtggcctgggtccggtcaagcgggctacaaatcaaccgatccgcgaagctaatgtcaaacgtatcgtgcaacgtttgcgcttgctgcttgccaaccgaattcaaatgcgtgacggctgtattaatcgtgccttgttttaaattttgggcgttggccactgtttgtccatgtcgtaccacgtaaaaggttgtcatcgtgcgcctccaagattaaattattattaataatactaattgtgccacagtcttttctcattatctagcttgacaaatagttacgtgcttgctaaattaataccaacgcaattaactgactggtgccaacaccagtttaacgaaggagtgtccaactgatggttctaactaatcctatcaatcatcatatcagttcctcctggtctacacacccatctgtgtcggcctaattttgcgtacgcaaatcagcctgagcacggatgctaagacattcgctaccaggtggaattgcttaatctcgttattatccgtcctggtagtcgaaaccgactgcgaggacttttttattaccttgattaaactactgaaagcgagggtttttcatgccaatttataatttttctgctgggccagccgttctaccacaaccagtcatcactcaaattcaagcggagctaccatcatttcgagactccggcatgagcattttagagatctcgcatcgctccgatttatttgcgcaagtccttcaagatgccgaacaagatcttcgcgatttaatggccattcctgacaactatcacgtgctcttctttcaaggcgggggcacgctacagttcactgctgcgccactaaatctggcgcctcatcatcgtatcgggttgcttgacagcggtcactgggcacaacgcgccgccgatgaagctaaacgggtcggtactaaagtcacgatactggggagtagcgctgccaaccattttaaccaactgccaacggtcgtccagcccatcgatcaatccctcgattatattcatcttacaactaataatactattgaaggaaccatgatgacgcgcctgccagttacgggtcaagtaccactggtagccgacatgtcatcaaactttttaggtgaaccttaccaagtcagcgattttgggctcatctttgctggtgctcagaagaatctgggtcccgctggtttgacaatcgtcattgtccgtgatgatttaattggtcaagtcgccaacctgccaagcatgctggattaccagctattcgcggctaaagattcgatgttcaacacgccgcctgtttttgctatttacgccgcgggtctcgtactcaagtggctaaaggcccaaggcgggctcagcacaatgactgctcgcaatcacgctaaagccgccttactctatgatttcttagaccagtcacaactatttactaatccagtcaagaccagcgaccgttcgaccatgaacgttccattcgtcacaggtcaggccgacctcgataccgcagtcattcaaggcgcccgtgagcacgggttattaaacctaaagggtcaccgcttagttggcggtatgcgtgccagcctctataacgccatgccgttagccggtgttcaggcattagttgactatctagccgcttttgaagcacaccatcgttaatcaaggaggatatttatgtatcaagttaaaacctataacgccatcgccccagccggcctcaacacgtttactgctgattacacgctcaatcaatctgagcatccggatgcttacttaattcgctcggtcaacctacataccgagacattaccgtcatcgttgaaagtcattgtgcgcgctggtgccggcgttaacaacattcctatcgatcaggcaaccgccaacgggactgcagttttcaacaccccgggaagtaacgctaatgccgttaaggaactcatcatcggcctgctcattatggcatcccgtaatctaatagctgcaacgacctattcggcccagcataccgaagctgatatttctcaacgcacagaacacgacaagacgcaatttaatggtattgaattaacgggtaagaccttggccgtcatcggactcggccatgttggcgctctcgttgccaatgcagcattgagtctaggcatgaatgtaattggttacgacccctatctatctgcagatgccgcttggaacattgccaaacaagtccagcgagcggccacgctgccagatgcagtcaaacaagctgattttgtcaccgtccacgttcctaaaaatgccgacacacttcatctgattaataaagatgcgttagccgccatgccaacaggcgttcaattatttaattattcacggctgggcatcgttgacaatactgccgtcatgaatgcgttagccatgggacaagttgcccactactacaccgattttggcgaaccccagcttgccaaccaatccgcggttaccgtgacaccccatatcggcggctcgactatcgaggctgaaatcaacggtgccacacaagctgcgcgcactatcatgacttatttggaaaccggtaacgttcatgcggccatcaatctgccagacttaaacgtcccgttcaacgcggcttaccgctttacagtcattcacgaaaatgtgcctaatatggtgagtcaaatcacggccaaactagcagcggccaacctcaacatcactaccatggctaacgccgctaagcaccagattgcttacaccatcattgacgtcgacgacctacagcagccacaacaagccgacctaatagctgaactgtctaaaattccggcagtgagtcgcgttcgactattaaaacggggtagcgtcgaatgaagattgaacacttacaacacccgacaactcaccaactcgatcagttaatgacaatctggttaagtggtaatttaacggcccatgactttgtcagtgccgactactggcgtcaacaagcccccttagtacgtgaagcattacaatcagccgaactcatcatcggactgaccgacggacctgaagcttatattctgggctttataggcttacaaaacgattacattgccggaattttcatttgcaatgatgctcaacatcaaggtctggggacggcgctattggcgactgcccaagctgaccatcatcaattacaattaaacgtctatgttgctaatcgcccagccattgccttttatcactatcacggtttccgtgtcattgatcagactagtgaccaagcaacccagcaaccagaatatacgatgcaatggcaacgttagttttcttaattaagccagtacgattcttaacgagtcgtactggctttatttgcttaataatattaatgattaaaaaaataatattgtatttaatctaattttaatgtattctcatctacatatcataatcatttgaagcagggggtacatatatgcaatggaaattatttgccacagttgccacgttaacggcaacgaccggcgttttactcgtcggctgtggtcagtcctcatccagttcaagcaatgccggcaacacaacggccaaaatggccaagactcaagtcctcaattggtcggaaaacggccaggatttgaccacccttgacccgtccttagccactgatgttatcagtgggacgatgatcagtaattcgcaagaaggtttgtatcgattaggtaaaaacagtaaggtcacaccaggtattgccactaaaacgaccgtgtccaaagataaaaagacttatacttttaccctgcgtaagaatgccaaatggagtaatggcgatcaagtgaccgcacaagactttgtgtatggctggcgtcgtacagttaatccgaagacggcttcccaatacgcctacttatattccggtatcaaaaatgctgacaaaatcgtcagcggcaaggccaagactagtaccttgggcatcaaggccgatggtaagtataagctgaccgtcaaacttgaaaagcccatgcagtatttcaaattattgatgggtttcgtggtcttcttcccgcaaaaccagcacgcggtggaaaaatacggaaaggactacgggaccagttccagcaagatggtttacaacgggccattcaagatgactggttggaaagggaccaactcgacctggacacttaagcgcaatcctaattactgggataaaaaacacgtttacttaactaagatcaaagaccaagtcgtgaagttgacgacgacagcctttaacctcttccagagtaataagctcgacatggcaacgttatctggacaacaagtcaagaacgaaaagaataataacaaactggtcatccgtaagtcttcacgtctaaattacttggaattcaatcaaaagaaggtgaagttactcgccaataagaagattcgtcaagcaatgtcactgactttgaatcgtaagcagttggtcaacgatgtcctcggcgatggttccgtcactccaaagggctttgttacgaccggacttgctactgatccaacgactggtaaggacttcgccaccgaaaatacggttaaatcagctgttactcaggacaccaccaaagctaaaaagctctggaaacaaggactaaaagaaaccggcaagaagtcggttaccttaacgttaactcatgacgatacagatcagatgaaggccctcgctgaatacgttcagggacaattagaaaaggaattaccgggacttaaagtgcaaagtgtcaccgttccttataagacaagaatttcccgagaaattgcgggtaatttccagctggttatctccgcatggcaagctgactttgctgatccagtttcagacctcggtatcatgacatcaactaacgattacaactttggtaagtggaccaacaagactttcgatagtgctatcaacacagcaaatagtacaaccagtacaacgaagcgttggcaagctctcgcaaccgctgaaaagacgatggcgacggatcaaggggtcgcaccgctctcacaaaacgtcatcgcacaaatggtcaaccctaagctgaaaggcctagtctacaacacggcgggcattaactataacttcaagagtgcctatatggccaaataaggtgacctaactagcatcgcctcacgtcaaactacccttaaatcgcacaataaaaggtatcgtagcaacaaactacggtactttttttgtgtttcttgacacattttgcggctgttaattactttaattattagaatcaaagcattgattttaatctttctttaatgtattctcgtgaccattcaagttggggggaagttttactatgaaatggaaagtaatgttgacaactgctactgcggccgcatcgaccggccttttgttagctgcctgtagtcaaggtcagtccaagtcagataatgcggggaacttacgcgcgggaatggcacaaaagcaagtcttgaactggtcagaaaatggctccgaactaacgactttggatacttcgctagtcaccgattcgatcagtgccaatatgatcaataacacgatggagggcctctaccgtattggcaataataataaaatcacaccgggcattgcgacccatactgtcatttccaaagataaaaaaacttatacgttcacattgcgcaaagacgccaagtggagcaacggcgatcccgtaaccgctcaagatttcgtttatagttggcggcgaaccatcgatcccaagaccgcttcgcaatatgcttatctttattctggtatcaagaatgccgaccaaatcaccaatggtaaagctaaagccaatagtttaggaattaaagctgacggtaaatacaagctaaccgtgacacttgataaacccatggcttattttaaactcctaatgggctttgccatcttcttcccgcagaaccaacacgccgtacagaaatacggcaaggactatgggacaacggccaccaagatggtctacgatgggccgtttaccatgaagggctggaaaggcactaatacgacatggtccctgaaccgcaatcctaaatattgggataaaaaacacgtttacttagaaaagatcaatgaccaagtcgttaagtcaaccacgaccggattcaacttattccagagcaacaaactcgacatggccaccctgagcggcgaacaagtcaaaaacgaaaagaataatcccaagttagtgctccgtaagacatcccgtctgaactacctcgagtttaatcagaaaaaggtgcccgcgctagctaatgccaagctccggcaagcgatgtccttaactattgaccggcaccaacttgtcacggacgtactagcggatggctcagcagttccaaagggctttgtcaccaccgggctcgcaaccgatccaacgactggtgaagatttcgctactgaaaatgcagttagtgcggcgacaactcaagacaccgctaaggccaagaaactgtgggcagaagaattaaaagaaaccggcaaaaagtcattaaccttaacgcttacgcacgataatattgaccaaaccaaagagacggccgaatatgttcagggacagctagaaaaggaactacccggtttgaagattaccgatattaccttgccattcaaaaaccgacttgcacgtgaaatatcgggtgatttccaactcgctatttctggctggcaagctgacttcgccgaccccatctctgacctaggcattctcacttccacgaatgattacaactttggtaagtggaaaaatgctgattatgacgctgctgtcaagcaggccgagcaagcaactgatccgacagtacgctggactgctctaggcaaagctgaaaaaattattgggacggatgaaggcgttgcaccattaactcaaacaacgctggcacagatggtcaaccctaagttaaagggcctgatttataacacttctggtaccaactataacttcaaagacgcctatatggcaaaataaaccatcagataactcacagacgctcactagcaaagactagcgagcgttttttatatagtcaagatatatttttagaatatgcaagattatgtttaaatattgacaaaattatataaaaagtttttaattagggtaaatgaaagctgtttcaattatgacttaaatatgtaaaggaagcgttgatggtatgaacattgagcttttcatcgcccgccgcaaagccctaggactttcacaaaaagccctagcagatggtatttgtactcaggcgacactaagtaagttcgagaacaatggcaaagcacctgccatacgaatcgttgcccaactttgtcagcgactcaacctacaattggaagatgtctttccaaccgaacgcgtcgctgatgccgctgttttgaagattttggaacaggtcgagttcgacctcattacaactgaatatcaagatgccgaagtacaacttgaaaaggctgcggatatgccgcgacatgaccgcgaaaccaaattacaatattgttatctaaaaggctatgttgctgcccttaaccaccacccgatcagtgatgtcatctttaattttgaccaaatcatcaccgatttggacgaggctcacatcacaatctatacacagctggcctactgtggtatcgggattgcttatcagcagaaccaggataacgataaagcccagtactattttgaaaaagtacgccacgccctaccgaacctaccgctagaaacgaccgctagtgtttggcgcgtgattaacttagcttattacacgggggctttttacgctaacattaatgatacaccgcggagtttgcagttattaaactacgggattgagatttgtgcgcgattccacgttacctattacgcagcgcggatcaaattcttacaggctcaattatccgatgaaccggatcaaattcatgaatatttaaatgatgcggccgcccttgccagaatgaacaataaccggcaattacttaagaatatttcaagttattcagattctcactaatttacggttaaataattgatttttgttaataagtcgcctaaactgcaagtattaaaagacgagtttttacaactattgaggaggtcttgcccatgttattagcaggtttattggccgcagccggactagctgccgttgccggcgtcgtggctggcgcccgtgttcccgctgcccaaccagtcagaattaagcatgaccaacgcacatctcaaaatcgtcgataatgtggcgacacttatctatgatataaataaaggctactggaagcgaaattccagtagcctttttgtttaattaaatcgccgttgacgactaacaactgttagccctagcaagaaccagcccaaaatcattagccaatccattgattgttcactagtctgtggcaattgttgcgccgacttgcgattagttgcttttgtaactttaacaactggtttagaagttgctactaattttattggctgtcctaacaatttcgttggccgagtcgtggttactaaattagtttgcttgactaacttagctgtctcagtcttcgttgtgacaacctgatctgaatcactatcctcgtcagcgtgtcctggtagcaccggttcactcggttcactcggctcacttggttcactcggttcacttggttcgcccggttcgcttggttcactcggttcgcttggttcactcggtttgcttggttcactcggctcacttggttcactcggttcactcggttcactcggttcactcggttcactcggttcactcggttcactcggttcactcggttcactcggttcactcggttcactcggttcactcggttcgcttggttcgctcggttcacttggttcgacctcatcggcaaaaactaattggccttgataagcgctttgctcattcaacacaagcacttgcgcctgtgtattgatcaagtaaccgtccggtgcttgaatttcgctaaccgtataagcaccttgcgttagacctgtaagctgtgcttgaccagtcgcatccgttgtcaactgagcaaccagcgttccggcagcatttttcacggcaaaaaccgccccggccaagcgattggcgccactcgaatccgtcttaaccaccgtcaatttcccggtttgatacgtattcgttaatgtcaccgtctcaccactagttgtttgactactgatatagccagcaatggccgtttcaatcaccgtataagtgtacgcattgccataaacatccgtcacatccaaatcactgaaagtgcccgtatagccatttgctgacgttaattgcaaggtctgataagcttgaccattgcgttgcaacgtcacttcaacggtcggcgtttgcactccagctggcacgtcagcccaaactttgttaacagtcagcgccgtcttagccattcgtttgtcaaccacactacctgtgaccacgttagccgttgcttgcactgcggataccgtgaagacgtgcttggccgtgtcgatctggtagccactcggagccgccgtctcaactagcatgtacgtcccagccgacaagttaccgatgcgtaactgtccaactgaatcagtcaccaaatcggtccgaagtaccgtacccgtactatcctctaactgataagtggcaccagcaactgactggccgtcaccatcagttttattaatgaccaaactgtaactctgaatgtcatcactagcagttccggaaccaccaaatctaacggccacgttcgattgttcactttttggttcgcctgtcgaactgccctcatttggatcagtcgcatctccaatgacaggtgcatacgttacacccgcattattggtgtacgtatgtcctactgtcagaccaacttcataaaatatattgaccgctacatctaattggtcaatattaattgtcatctgctgacccacaaccgtcacggttacttgtggtgttgataccccatcagcgtaggtaaactgctgcgttgcaaaatcataagtgcccagtgccgcgtctttaacaaaggcaccgtcagtataatgaccagtttccatcgtcatggtaccttcgtgcgtttgataaaggcctagctgatcaacaatcgcaacttgctgccacttttcactattaatgtttgcgacaacttgccagatcattttggtgggattaccatcagcatctaaactattactatcggcccagccaaccttattaatccagtcgtactactgccagtggttgcgctagtcccagtaacataaaacgttaagtctccttgacgattataacgatcactagtcgcataataatcattaaaagttagtgttccggtttgactaccggtctcggccgtaaaagtcccgacgaccgttccatctgatttttggacatcaatatgctgcgtaccattggtaaagacaacattctctggtaaggtcaccgttgctgtactgccagcagttacgctaacatcatcggctattgaccaatgatacttcgcgatatagttcgcatacagactcaatacatccgtagcgctatacgtaacaccatcatcgtcagtcaccgttgcgtcagtagcatcgagcccctgaaccgcaaccgttgcccgttgtgctaaactgcgaagactggcccggctcattctggacagtgtcgcgacagacgcagttgcttgatccgtcgtagttgccgttctcgccgagtctttttgactggtaacgacaccactgtacatattagtcgtttgttgctgattctgggtcgttgcttgctcgttgttcgccttcgcactagccgctcgttgatccgctttggcattagccgtcgcccgggacgtcgctgtcgtatcagtactgtccgttgttgcttgagcggctgtcacacctgaagtcgtttggctagtagccgttgtgctagatgattgggttgatgactcagacgcggtgaccgctttgctagtcgccgtttcggtcgcagcaccagttgccgatgctttcgtgctactgctactgctactgctactgctactgctactgctactgctactgctactgctactgctcgtagtttgtcgcaacaccacttgattagcaagtgtactcgagccagaagtctgcgtcgtttcagtggcagtggtagccgtgtccgccgcactcactgtttgatttgtcacaatcaatgtcaacatggcggccgttcccattatccaagttttgaaatcgattaatcgcatgatatccccccctttcttatataagttaaaacttttaaaccgattacacgccttaattataaaccacattccgcaaatttgaagacactttttgtcaaaattcgtcgctcacagatagcagttacataccagcaatatttgttcaaaaggctcattacgtctatataatttttatttatgtacacttaattaatttaccgatatatcaacattttaaagacattaatcataattagtattataatattttatacaaaagttgtatgccatcaattttgacgagttcgtgacagttgttagctaattaaaataatttatgctgattaatatagatttaactaattgcaatcagtaaaaatgatgtcattcgtttcatttataatttaaacccattaactgctttagttgcttgtcaactaattacgtcgaaaaacggggcagactggcgctaccgatggcacgtagaccaattattgatttatcgagcgatatataacagcaccttaactgataagtattttttatagctttattactaatagtttgccattaacttgtatgcttcttaatctgcataatgtttacttatcgctttaacactttaacctttatttctaacgactcccacttaagcaatgcaactttttttccggtgattaatcagactaaccgacacgtcatgataatcaaaacgatgcggcagccctttaactgataaaattatataatgactcaaaacttaatttaccagcaacactacatctgtaccaatcagcactaacattcttattaataatcattatagtttaagcacgttaactattttgtaaattaattttcactaattatcctgacactattcgttataacaatggtatgattaacatgacgtataataaccagctttaatcaatcagtcggagcctgcttacctgcgactattaattgcgcaaccaacattaatattttatggaggctacatttttcatgaacattaaagacttgtattacttccaacgcttaatcagcactcagagttatacgcaaacggctgctgattttcacgttagccaacccacaatctcccaagcaattaaacgactagaacgtcatttccaagtgacactgttctttcgccaagcaaagaccaaggcgctggtgttaacacctagtggccagcaactattgctcgcagccaacgacattatcaacaactggcagcatgtcaatgaatcaatcagtcatttgcgtcaacatacactgcggtttggtatcgaaccatccgtcagtgaacattatttaccggcattaacaaaaccaatcatcgagcaagatttgcttagtagcgtccacactgttgaaatgggggctaatcaacttgtcaaacaggttttagccggccaactcgacttagccatcagtggtaacttggatcaaacattggatgaacggcttgcagtaacgccattacggccctttaaatttcgcattctcgctaatgctgcacaccccttagcaaaggctgagcatccgacttttgcagaagcgctaaaatcgccttttgtactgcttaatgcaacttacttaaataaactagtcttccggcaacttgctgaacaactttcgattgaaccccaagttctcttcgaatctgatagcagcaccttgatcaagggattagttaaggagaacctggcactaggcttcatttccgacatcacgacccccaacgatggtctcgttgagattccgttcgacgacgttcaggttcctagcgtgcatatcaacttgattcgtcgggcccaccaatttccaattggcttagtcaaacaggttatcgacattattgaaaaaacatttgcggctgacaatgccgaacaaaaatcttaaccacaaacttgatcataatcacacatgcgctccaataaaaatacccaacttatctagaatgataggttgggcgttcttattggggcgcatttttggttaagtcatcacgattaaatttacacgaccaactcgtgctcgtaatcacacaaccgccgttaaaaatcacattcacgactccagcagcgaagctaattgtgacctaaaactggtaaacttttgcttcgtacgctcgtaatacgtcttgatgatcttcatcgtagttactgatcaacagatgcgcatcagcgggtaattctgcaaagtgtcgcgtctgggttgccgcagtaaagttacaaattactagcaggtgctgcgaccccatatgccgcatataggcataaacggccgcatcatcaggtgataataggtgataagttcccgtcgttatgactggtaaatggtgccggagcttaatcaaccgctgataatagctcagaactgaaccgggcgttcgttgcgcgagttgcgcgttgatccgcggataattggtattaaccgctagccacggtgttgccgttgaaaacccagcattctgactatcatcccactgcatcggtgtacgcgcattatcccgcgacatatgggcgagataacctaacatctgttcaggttgaacgacctgttcgtcatcaacaaagtgatgatacgcattcagtgattccaagtcttgatagtcggttaacttggtaaaatgggcattcgtcatgcctagctcctcaccttcgtagatgtagggtgtcccttgaagaaagtgcaatagggtcgctagcattttggctgaacgttcccgataagctggccgttcatccccgaatcgtgacacaattcgcggttggtcatgattattccaatagagactattccaggctgtcccttgtaagcccatttgccacttagacaagctctgctttaggtcaaccagtcggacgggctggtcattccacttacctagcgccggatctggattaccatccaggcccatgtgttcaaattcaaacaccatgtttaattcctgaccttggctgcttgccagttgcttagcatcagcaaccgtagccccaggcgtttcgccgaccgtcatcagttgatggcctgcaaacacttgctgattcatttcttgtaagtattcatggagatgcggaccattggcaataattccgccgattgccgcgtatggttccccagcttctggctgcccatctgcaaagctatcaggcttggaaatcaagttaatgacatccaagcggaaaccgtccacgcccttattgacccagaaattcatcatgtcatagactgcttgccgtagttgcggattatcccagttcaaatctggctgttcaaccgcaaatgaatgtaagtaatactgatcacggctggcaacatatttccaagcagagccaccgaaaaagccaccccagttgtttggttcatgcccatcaacaggatcacgccaaatataatagtccgcgtacggattatccttactttgcgcactcgtcgtaaaccacttattttgatcagatgaatggttgacaacaatgtccatcatgatttttaaccctttcgcatgggccgttgttaataattgatcaaaatcagccatcgtcccgaattctggattaatatcgtaataatcactaatatcatagccattatcgacaccgggtgaacggtaaattgggttgagccaaatcacatccgcgccgagctgtttaatataatctaaccgttgtgtaattcctggcaaatcaccgattccatcaccatttgaatcctgaaacgaccgtggataaacctgataaacaaccgctgattgccaccattgattagccatatatgattatccccctaaaaaagtttgctttaaaaaacttgtcacggtcaaccataaaaggcaccgcttacaacactaaccattctaccattgtcggtcatttgagcgtacccacttatcgctatttatttgttagcctaacacgtttctagccatatcttagttgacgaatcaaaaacgccatgctattatcgcttatattcaaataacgaacgataatcttactttcaagtagcgaattaactgtgcgtcaggaagtcggtgggtgctgcgaaccgatcaggttaatctcgatgaaatacggtaggagaggtccgggtacgcccggcggataacaactagagccgttaactgctagtgagtggagtcatattgtggctcaagctgggtggtaccacggtctaatcaatcgtccctgttgcattattatgcaacagggacgattttttatattcacccactattatcggcgtacaaccgctgttgaagcagtccgtgtcgggctattcactgctggtttaacgacctcaaaggagttaattattatgcctaattcaaagaaatggcgttcagttcagttaccagaagccctactcgttttactcattatgcttgcaattatgggacttggcgttattaagttcggcctgtcaccacagacccccgttattctcgttatcgccctcatcattttatgggcccgaattcgcggtgcccactgggatgacattcacggtggcatcatcgatggtattaaaactgggattatcccaatttttatttttctactcatcggggcactcatcagcgtttggattgcagctggcatcattccttcaatgatggtctttgggtttcatctgatctctgcgcagtggttcgttccatccgtttttctcgtttgtgcaattattggaacttccatcgggagtgccttcacgattatctcaacgattgggattgccctctttggaatcgggacaacgatgggcatcaacccagctttgattgccggagctatcatctcaggagccatttttggagataagacttcaccgttgtcagattcgaccaacctggccgcagccattgccgaagcagatttattcgaccacattcgtaatctgatgtggtctacgattcctgcttttgtcgtatcactagtactctacgccgttttaggtgccggagccgcaacacaaagccatttgggcaagattcaaacgacgttgaccgtcctcaataataactttaccatcagctggtgggcggccttgccactcgtcgtcatgtttgcctgtgccctacttaaaattccagccattgcaaccttgttgatgaatatcggtcttgccatcgtcatgatttttatcgagcaacctcatattgccttaactaagatcgccacgatgatcgaaaccggctttgtagccaaaactggcaacgccggggtggacgccttactctcacgtggcggtatcagtgccatgatgagcacggtctccttaatcctattaaccctgtcgttaggcggtttactaatgaaattcaacctcattcagacagcaatggtgccgctaactaagcgattgaaaggtgccggggcaactgttacggctgcgattttagcgggaatcggtgtcaacatctttgtcggtgaacagtacctttccgttatcttgcctggtaaagcgttcaaaacgaccttcaatcagcgaggattggctaacttagccctcagtcgagtccttgaagacggtggaactgtcatcaattacctgattccgtggggcgttgccggggcctttgccgctaacacgctcggggtatcaaccttagcttacctgccattttgtttcttcagcttactatcaccggtattctcaattatcagtggtttcactggctggggcctgaagcatcagccagccaacgaagccggttaatttaaaactaggttgtttaatttaatcggtgaccgaaccaatcccggaatataattgttactgcttgtgattcgcccccactgctggctacaattagacaagagcatgttttggatcaatctaacaattcgtcaattgatactgcatgatttatttactaataagtcacatcccggcaccacgtcaactaacgaacttagatatgaggagggggattacaatgcttgcatacgggtatcaaaaatttgggggacctaccgtatttgaagaactaccacaatcacagctgattccaacagataatcaattattaatcaaaactttagccgttaacctaaccgagggagaccgcttagaacggctaggtactatccaaagcgtcgcactaccgcatattcctgggcatgatgtcattgggaaaatcattcaagttggcgccgctgtcactgacttggacgttgggacagtggtggctgcccgcacgaaccatacttacgcggaccaggtttgtttagatagtgatctagcggtgaccatgccaactaatcttgatccggtcaccgccgtcagcttagtcactccagggattgtcgcttacaaaacggtgcgctactttgcggacatccaggccgaccaaacggtgattgtcaaaggcgctggcagcccagtcggcttgttaattattcagttagccaaacgattaggtgcccacgttatcgcgattgctagtgaccgttatgctaaattgattgcgacactgggagtcgaccaattcgtcgactatcagcatcaaaatccagttcacgtgttagccgaccgcggtgacgtcgtaatcaatgtcgctatcgatagcgttggtggcaaagatgacttagcaatggccaaatttgatgcgaccatcgcttcatttgcccgtcacttgccagccaccagtaaatcaattcgtttccaagcaatccaaccgaccgaagtgatttctgatcaggccgccttacaattgctattcaagttgctagatactggtcaattgaccacgacgatcaatgaacaactaccgtttaacctcacgggcttcattcaaggtcaccaacgactagatgagcctcacgtgggtcaagtggtcgtcgcgcgctaaaaaaactgctttcaaaaggataacttttgaaagcagttttttagtcaggtggtcgcttattaagaccatcgcagaattttgagcaacccaattcacactaatcgtaacgattgggtatatttcaaagaccgcctcaattagccaagtcccggatacctatgcgagtcggtagacccaagcctcataaggccgtaatttatttggctgctgctcgccataattactaatcaagcatttggccgtgggcgtcagatattgatccagtggtcgggacagtgtctcggctgtgaaattgcaacaaactagccaggtccgcccttcccattgccgttcatataagaatacctgcggatcatcggcccacaagagctcaaacgaacctaacgtcactaaggggtattgatgtcgtaattgaatcaagtgctggtaatagtaccacactgaatccagatcagccaaagctgcggcagcattgatttgacgatagttgggatttgaccgtgagccatggcgccgcgtcactaaaacccgcgttaacctccgtgtcccattgcatcggcgttcgcgagttgtcccgagaacgcgccgctaatcgggccatcatatctgccggtgatagtagttggcgctcagtcactaaatcacgataggcattgagcgattcaatatctcggtaactggttaattcagtaaaatgagcgtcagtcatccccagttcttcaccttgataaatatacggggttccctgcaagaggtgtaaacacgttgcgagcatttcagccgaacgtacccgatatgctggtcggtcatcaccaaaacgtgagaccgctcgtggcgtatcatgattgttccaaaacaggctgttccaagcccgcccttcaagtccgacttgccagtcactaatgactttctttagcgccactaacggtgtcttacgcgtactccacttaccaagaccatgctgactattatcaagtcgcagatgttgaaattcaaagaccatatctaattcgtgccgatcagcgcccgcatacttcagcgcatccgctggtgtcaccccgtgggtctcaccaaccgtcatgatatcaaactgtgacaacacttcttggttcatttcttgcaagaattcatgaactcgcggtccgttcgttactcgagcatcgccaaactgactgtgcggtttcagtggaccatttggtaacccgggtaacttagagatttggttaatgacgtccattcgaaaaccgtcaacacccttgttcagccaccaggtcatcatcgtataaactgactctcgtaaggtcggattctcccagtttaaatcaggttgttttgttgaaaacgtgtgtaaataatactgctgggtctgctcatcatattgccatgctgaaccaccaaaagccgcatcccaattattgggcgcctttttgccgttacctgagcgccaaaagtagaaatcacgatattgattggtgcggtcctggcgactgcgtttgaaccatggatgctcatcagaggtatggttaacaaccaagtccatgatgatctttaagccccggtcatgggcggcttgcaataattcatcaaaatcagccatagtgccaaagtcggccgcaatttgttgataatcactaatatcataaccattatcatcgttgggtgaacgataaatgggattgagccaaatgacgtcgattcctaattgctttaagtagtctaggtgggccgtgatcccctttaagtcaccaataccatcatgattggtatcttgaaaactccgtggatagacctgatagacaacggcttgttgccaccacttgattgttgctgccataattacgattaactccttagttacgcggtaaggcccttgatgagcttaactggtaacgtatattttgattccagtgtacaattcgcatcctcaatccgctgcaatagtagagaaaccagtaacgtgctaatatccgctaacggttgttctactgttgttaattcagaatgataatcacgtatgagcgccgtgccatcataaccaacaacgcgtaattgctcaggaaccgttaatgacagttgtcgcgcgacgttgagcactagtaaagcggtcaaatcatcactacaaaaaataccatcatactgatgttgtgtcataatcgtcttaatttccatcatcttcagcgcgggggtcaattcaaacggtaattcgtggacatggggtgttagctgttgggcagtcaagtaggcttcatatccttcacggcgaccattcgttggcgaaccagcgtgtgacttaccagtaaaaatagccacgttagtcgcccccgcctgatgcaatgtctgggttgctagccagcccccctggtaattatccgaactaacgatgggaatattgtcggataagtaccggtcaaatgaaataatcggaaggccgtattgttgatattcttcaatacctaaattgtgggcaccagcaataatcccatcgacctgattagccatcaacatttgtaagtagtcgcgttctttttgcggatcatccgcactattacataaaatcaccttataatttttagcaaataagattttttcaatccgggacaccagttcaccaaagaacggattactaatatctgaaaagatgacgccaattaagcgcgtattctttccttgcagtgagcgtgccatattattcggctgataatgcagttctcgcatcgccgcgaaaactttttctttagtctgactactcaggtagccatggttattaataacccgagaaacggttgtcgctgagacccccgctagcttcgcaacatcatttaattttggtttcattgttatcgactccagtatgctctgattggcgccattcccagactttaccggtgactgccgtagtgtcaccttgaacgttaaggcgactcggggtagcgtttaagaagaaacggccggtcattacggaatagccattatcaatatagcattcaaagactgacacatctatgattagccggatttttatcgtcttatgggccgttaactcaacttgacgagtctgaccataatcttcagcaaacgaattccccgtatgccgccgatcaatcataacctggccatggttggcatcaacagtcacctgcagctggccactttcctgctgatcagcaatgttaaccgtgaccgttttatcagcgggaaccgtcagtaagagttcaaagctgccattcaaagcggccaccgtcgcccgttgttgctcaaagactaggtcatgcgccgtcatccgcaaatcatccaccgctgccactggattttgatagaggtgcccatctttaagcgttagttccttaactaagctcaaacaatgggcccaattttcacgatcagttggataggcaatttcaggtaacccaatccagctgacggctaacgcgcggccatccggcgcattgattgcctgcgtggcatacacgtcaaagccatcatctaattgcgtcagggcgtggggttcagtgaattgtgcctgagccagatccaattgatcggcaactaggtacatgttcggataaatattctgatacggggtcgttgtttgtgataacccttggggacagaacaataagacgggctgttgatcgatccagaccagatttggacactcaatcatataaccccgcgcatttgcgggaacgttcaactcgccttgacacgtccaggtggtcagatcctttgagaaataaaccaagatagcaccgatctcagtagtcgtctgcgcaccgatcagcgcgtagtagccgtggtcagtccggatcaagtccggatcacgaaacgaactcgtgtacccagccggagcatgcgcaattagtggccgggacagctttttaatgtgattatccgtgtccatccaggcacctaattgatacgattcacgttgccagtcggcagtgcggacattacccgtatacataataaataactgatcatcaattggtagtgctgtacccgtgtacgcgccgtgtgagtcgtacggcgtatctggtcgaatcgctaagccctcatcatgccaatccaccaagttcttagaggtcacgtgttgccatgacttcagtccgtgtaccggaccgaacggaaagacttggtagaacaggtgccactgaccatcaaagtatgaaaagccattggggtcatttaacaaacctgatgtaggctgaatatgatgttgcatccgccacttagactggcgtgcctgggcaacgagctgtggtagcttagttgctggccactgttcataaggggtataacgggttttacgattccatatcatgacgatgagctcctttttaacgttcgacttaattgtcactattataaaaccgcttacaccgatatgtcaatcgtttgacatttttatattatattttcatgtcagcgtttcaaattcggctttttaacaagattatcaagcaattcaattttgtatcaaacgcttgacatattttccaaacttgttattattgggtctgtaaagcgcttgcattattaaattaaaaataattttagactcagggagtgaattattatgaatcatcaagaagttgccgaccgcgtacttaatgcaattggtaaaaacaacattcaagccgccgcccactgtgcgacacgccttcgtttggtcatcaaggatgaatccaagattgatcaacaagccttagatgacgacgcggacgttaaggggaccttcgaaactaacggccaatatcaaatcattattggccctggcgatgtcgataaagtctatgacgccttaatcgccaaaacaggtcttaaagaagcgacccccgatgacatcaaggcagttgccgctgcgggtcaaaagaaaaatccattaatggacttcctcaaagtcttatctgatatttttattccaatcgtccctgcactagttgctgggggtctattaatggcactaaacaacgttttgactgccgagcatctttttatggcgaagtcagttgttgaagtttaccccggtctcaaaggtatcgccgaaatgattaacgcgatggctagtgccccgttcactttcttgccaattctcttaggattttcagcaacgaagcgcttcggcggcaacccctatctgggtgctacgatgggcatgatcatggtcttaccatcacttgttaacggctatagcgttgcaacgaccatggccgccggcaagatggtttactggaacgtctttggtttacacgttgcacaagcaggctatcaaggccaagtgctccctgttttggccgttgcttatattttggctactctggagaagttcttccacaaacatatcaagggtgcatttgactttacgttcacgccaatgtttgcaattgtcatcactggcttcctaactttcacaatcgtcggtcctgtcttacgaacggtgagcgacgcattaactaacggtttagtaggcttatataacacgactggttggattggcatgggcatctttggccttctctactcggccattgtcattactgggctccaccaaaccttcccggctattgaaacccagttattggctaacgtcgccaaaacgggaggttcttttatcttcccagtcgcctcgatggccaacattgggcaaggtgccgccactttagctattttctttgccactaagagccaaaagcaaaaagccctgacttcttcagccggggtctcagcgttactcggaattacggaacctgctatttttggggtcaacctcaagatgaaatttccatttgtctttgcagcgattgcctcaggaattgcttcagctttcttaggactattccacgttctgtctgtggcgatgggtcccgcatcagtcatcgggttcatttcgattgcttcaaagtcgattccagcattcatgctcagtgctgtcatctcgttcgtcgtcgcatttattccaacttttatctatgccaaacgaacactcggtgacgatcgtgatcaagtaaaatcaccagcaccaacgagtaccgtcatcaatgttaatgatgagattatcagtgcaccagtaacggggactagcgaaagtctcaaacaagttaacgaccaagttttctcagccgaaatcatgggtaaaggcgccgcaatcgtgccaagcgctgatcaggtcgtcgcaccagctgacggggtcatcactgtcacttatgatagccatcatgcttatggcatcaaaacaactgctggtgccgaaattctgattcacttaggattagatacggtcaatttaaatggtgaacacttcactactaacgttcagaagggcgataccgttcatcaaggtgatctactcggaacgtttgacgtcgctgccttaaaagccgctaactatgatccaaccgtcatgctagtcgtcacaaatacggccaattacgctaatgttgaacgactcaaagtcacgaatgtccaagctagtgaacagctcgttgcgctgactgaaccggcagctagctcagttgctgctacaactgtctaaactttattaggaggacgtcatgcctgttgaatatgaccccaaaaccggcttaatcaatcttcataatgaccaaattagctatgttattcaaattttagcccatcgttacccagtgcatcgatattttggacgttacttttcaaaacaaccgtactttgagccgatgccatccggtagccatgcttttgctaatgacccaacagaacgctttccatattccgtgacttcactgccactcgaatattccactattggcagtggtgactatcgccagccagcttacgttattaaggatgctaacaatcaattactgccaattttagaatataccggtttttctgtgaatgatcagccaatcaactcgcgccaattgccacccaccgttagcaaacacacgcctgtaacaaccctagtcattcatttggccgattcagtgaccaagttacagatggatcttaactacactatttttgaaaatcagccgcttatcttgcgaagcacaactctgcgccatcacggcactactaatttgcaagtaacagccctatccagcgctcaactagatctaccaactgaccaatatactgcgctgacattaagcggtacccatgcacatgaagctaatccatcgtttaaccgtttacacccagggttacaaacggttcgcagtctgcgcgacactagtggaccacaacaccaaccgttcatggctctagcagaacctaacacgacagaattagctgggactgttattggttgtgcactagcatggagtggtaacttcgacagtactgtcgaagttgaccaatatcaacatagccgcctaacaatcggtcttgaaccagatacattcgaatggcagctcaaaccaaatagcagttttcagactcctgaagccgtgctaacttggacaaatactggttttaacggcatgtcacaagtatttcacgactttagccatcagctgatgccctcccagactaacattccaagtgtgcttaacacttgggaaacactgacatttgccgtttcagagtctaaagttcaacacttaatcgaacacgcccaccagttaggcttacaaatgcttgtcttagacgacggctggtttgtcaaccgtaacggtgaaaatgggcaattaggtgactggtatgttgaccccattaagtttcctaatggtctgaaaccccttgcccaacaagcccatcatcatcgaatgaaattcggtctctgggtggaaccagaaatgatcaccactaacagccagctttaccaacaacatcctgactgggtattacaatatgttgatcggacacccatcacagctcgccaccagctagtcttagatctttcgcaggctgctgtccgtgaccacttagtcactactctgacgaacttggttcaaaataaccaactcgattattttaaatgggatatgaatcgccatcttacacaggttggcagcacacgcttaccggctgcacaacagggggaactgtattatcgctacgtctgtggaatttatgatattctcacacgcttgaagcgcgcctgccccaagctgattatcgaaaattgttcagctggtggtggccggtttgattttggtatgctaccatacaccaatcagacgtggataagcgatttgactgatccagtcgaccgagcaaccatcgagaacggatttagttatctatttccaccacggatattcagcaaccatataaccgcatcacccaatgcgcaaaatggccgaataacaccatttgaaactcgattacaattagcctgcatcgggcaactaggattggaacttaatcctaaacaacttgctcctagtgaacagcaacttcttcgaggagccttgattaaatatcagcaactgaaatctacttttatcaaggcccacttttatcgtctaccgacaacaagacacgttgttgcgtggttgttagtaacggcagataaaaagcaggcaatttgctgttacttaaatgggcttaattctgctgtcaaaactcagcacccattaccattacactatctcgatgctgaattaacttatagcgattcatcaggtaatagctatacggggcatcagttaaacacgatgggaattccacttaaacccaccaacgctgatttcactagtcagctaatttatttacgtcaaagttaatgtaatcgttaacaaaatttctgattaagagtatactattaataaataggactacatttttaactacaggaggcacactatgcttttaggtgcaattgaagctggtggtacaaaatttgtttgtgccacgggcgctgaaaacgggcaagttagcgaccgaatttcgatccccacgacaacccccgctgaaaccatgactgcggtagacgactattttacgactcatcccgttgacgcgattggtatcggttcatttggccccatcggcgttaatcccgatgatccgaaatatggttacattaccacgactcccaaacccggctggggtgacttcgattttttaggccatcttaaaagtcgcttcaacatcccactctactggaccactgatgttaacgaagccgcttatggcgaatcaatgattggaatcgctaaggacgtccctaacagcatctacatgacgattggtaccggtgttggcgctggcgtcattagtcagaaccacatttttaatggtcgcactcatactgagcttggtcacatgcgactcaaccggttacctggggacgatttcaagtccaactgcccctaccatgacatctgtttagaaggtttagctgctgggccagcagttggaaaacgaacggggaaagctgggaaagatattcccgtcgacgatccagtctggccaatcatcgctgactacatcgcacaggcatgtgtcaacctcaccgtcgccttcgcacctgataaaattattcttaacggtggtgttatgaatcaacggcagctctttcccatgattcgtgaaaagtttgccgcctatctaaatggctacgaagaagtcccaccactggatgactatatcgttcccgctggactgggtaacaattctggcattgccggtggcctattgttagctcaggctgctttaaagaacgcttaacaccttgcaaaaaagtccgccgatacgcgtttaaacgtatcagcggacttttagtttacagtcaatttgtcattcggttaatgaatatatacggttaaaacagtgataaatccaaaaaccaccccgggacatttgaaataataacgggccaatccttataagtcttgaaccagccgtaaccagtccatagtatcccattaatcattgccacgagtggttgtagcggcgatactgggtcacctgagaaattcgaaatgatttgtggaatatacgacacgtacatcgcaatacacgtaaatgtcgctaacttactaatcaatttcagatatttaactcgcttgggatccacagcgtccttaccactgggatattcaccattatcaactttatacttaataaataatcaccttcctagctagttattatactacataccactcatcacgcaaaaattcgcgttcgttaaattgtatcggcaccgcaacaatcctcaactattcgcacgttgcgcgcaagttgaaacccagcattccccttacatcaaaattgattgaccctatcaattagtttaatttgtggaagaattcccttaatttagctatactcatctgtcactgaaaccgatatcatacataccagcaatatatagatttttgtattttacgcgttgtgctagctaatttgtcatgagtcatgattaaagtaggcaaaataattaacgtcaaaagcagtcagcttaggctcgctggaaagagttcgggttagcgtaaacatgcttagttcaccctacaccgacctccaggcatttctgccaattgccagagcgcggtagtcaaaaatctaagtcgaggccacgttttaattacgattcatgcaatcatcgctcacataacgcggatatgtcaattttgcttagttcacaggaggatatcgctatgagacatggacaatatcgctacattgttggcacactagctttgataacgactgctgtaggtttagtagcttgttcgaaacagtcagctaatcagcagatcagttaccgtcaaacggctgaggccacccttgataaggggatggataatcaacccgaagcaccgtactggtttccaaaacaactgctgaaatggcagttgagcaaggataaagcagccaagtacaacaccgcctcggttccactagccaaacggatcgataaatggcaactgccgacggttaacaagacccaggacccaaagatgaaggtcgtcgcgttatccattatgaatagttcaactagtggcaacgcgcctcgcgggattaatacgttcgatgcgaatgtcttctccaactggcagtatattgaccaactcgtctactggggcggttcggcaggcgaaggtttgattgtgccaccgaccgcagatgtcatcgattctgctcataaaaacggcgtgcccgttcttggaaccgttttctttccacaagtggttagtggtgggaagttaaagtggctcaatgacttcttaaaacaagatgctgacggacattttccgatggctgataaactagtcgcggttgcgaaagcttacgggtttgacggctggttcatcaaccaagagaccgaccccgaagttaaaagttttgattcggcttccaccggaaagaccgcaaccagctcaactagtaatgggctgagcaaaaagcacgcccaactaatgcaacagttaatcaaagaatacaaacaaaaggccggctccaagctagacctgatgtggtatgactcgatgacgaaggatggtaaaatggattggcaaaacgcattgaccaaagaaaaccaatcttatctagtcgatgccaatatgaaaccagttgctgactcgatgtttcttaacttctggtggacgaagaagcgtctcgccagtcaagaattactcaaaaagtcacacgaacgcgccgaaaagcttgggattagtccttacaacctctttgcaggaatcgatgttcaagctgacggaaccgctacccccgttcgttggaatctattcgctaataaacaacatgtgccatacacgtcgctaggattgtacgcaccggactggacacacgcttcttccgatacggttgacgaatttcaagccaaagaaggtgctctgtgggtcaatgatcaaaatgatccgtcccgtagcattccgtcaactacttcaacacattggccgggtgtttcaacatacgcggttgaacaaagtgccattacgaaacagccctttgtcactaatttcagcttaggcaatggctataactacttcattaaggggaaaaatgtttcgctacgtgattggaacaatcgctcactgcaagcagtcaatccgacttaccgctggttaatcaataatggcaatggtaatgcgttaaaggccagctttgactacactgacgcctacgaaggtggcaatgatatcaagttagccggcaaaatgcgtaaggacaccgctagcacaatcaaactctacaccacggacctagacgtcactgccgatacccaggttagtttaaccgctaaggcatctggtaaatctacagctaaactagtggtgaccttaaaggacggccgcactaagaccatcgcgggtgaccggacactcagcaagcactggacgaccgttagctatgacgttagtcagttaacaaaaaaaacaatcaaaggccttagcctcaaaatcagtgccgccgagactgatgctagctacagcgttcaattaggtcgcctcgcaattaccggcaagcagcaggccgcgccgaaaaaggtcaaccaggtcaccattgataatcggaccttcgacgaagaaggcaagtacgccggtgtcaacctgagttggcaagccaccactaaaaataagctggatcattacgaaatttatcaggttaacaatgacggttctcgctcatttctgggggccactaacacgactaatttctatttaaacgcgttgaaacggaatgggcagcacaacgagaccaatctgatggtcgttccagttgatatttggaaccaacgtggcgatgcttctgaccaagttaccttaaaatggccggataatcgtaaacctaaagcggcatttacggttaaccgcaccctggcagctcccggtaacacgatcaagtttacaaatgcctcatccaaaaacgcaaccagctataaatgggaatttgacggtgccacaaagacgaccagcaccgccaaaaaccccacggtcacttaccgtaaggctggcacttataacgtcacattaaccgctaaaaataaggatggccaacggcacgttacaatgaaaaagctcattacgattacaccgaaagctcaaggcgctttaaccttactatccaagaacgccaagaccagtgcctccggatacacgaatagtagtgaagcacctaaaatggcggtggatgggaaactcgatactaaatggtgtgcaaccggtaaggcaccgcataccttgacgctggatttaggccgtcaaacgactgtgagtgcggttaaattagcgcatgccaaagctggtggcgaaggtgctgatatgaacacccgcgcttggaccattcaggtcagcactgatggcaaacgctacacggacgttgcccggacctacaataacacgcaagccactagtctcaatactttcgcggctacttcggcgcgctacgtccggttagtcgtcgataaaccaacccaagttgctgacaccgccgttcggatttacgaaatggacgtgctaggattgacgcaaacactcaaataaccctaccgatgctatttgaatagaacagccgagcccctcacttggaaatcgatatttccaagtgagggactcttttatgtccagacactaaaaaggcccgtatcagctgatacggaccgatttagaagttaggttggaatgaattgagctcattcttaggttggaaacttgattgtggccaggtacggtcagaccacaatcaagcgttcatatttacttagttgttacggtgctagcgacctcgatagcttgcccattaagttcgatagtcagtggttccccactaaccagttcaacggtcgtaccctgttgatcgacatccactttaatcaagcgaccgcggaagttaacgtggaattgataatgggtccacgctttaggcacaaacggtgcaaaggctaaggtatcatccttaactcgcataccagcaaagccttgaacgattgcgagccatgaaccggtcatcgacgtaatatgcaagccgtcgaccgtatcattattataattatcaagatcaagacgggctgtccgttcatacatttccacggccttatcctcataatgcaagtccgctgctagaatggcatggacggctggtgaaagactggattcatggacggtcaacggttcatagaaatcaaagttacgtttcttctgttccgccgtgaatttatccatgaagtaatagattccttgcaagacatccgcctgcttgatatacggtgaccgtagaatatgatcccatgaccagtgttgattgattggccgttgatcagcaggaatacttgaaactggcttgacgtccttatcaaggaagccatcttgttgaacgaagattcccaatttttcatcatacgggaagtacatccggtcaacaatatcttgccactttgcaagctcagcatccgtgatttgaagtgctgcacgcttagcggcatccactttcttcaaactcgctaacgtgtattctaacgtccagcgcgccataaagttcgtataccaattgttattcacgttgttctcatactcattaggaccagtgacaccgtgaatcatatactgttgtttccgttctgagaagtggacccgatcagcccaaaaacgtgaaatccccgtcaaaacgtcgattcctttagtcttcaagtagatctcatcaccggtataacgtgtgtaattgaagatggcatacgcaatagacccatttcgatgaatctcttcgaacgtaatctcccattcgttatggcactcaattccgttgaaggtcaccatcgggtacaaggcaccagccaagccctgcattttagcattatggaaagctccagcaagctgattataccggtattccagtaagttctccgttacttctggtttcgccaatgaaaggtagaacggtactccgaacgcttcggtatcccaatacgtcgcaccaccatacttttcaccagtaaagccttttggccccaggttcaggcgcttatcttcgccatagtaggtcgagaataactggaataagttgaagcgaatgccttgttgtgccgcatcgtcaccgtcaatcaacacgtcagataactgccagcgtttagcccaaccatcaacatgggcctgccgtaagtcctcatatgactgtgtgctgaccgtttcacttaattcggctaagccagtccgcatcgccgccatatccgcgtaatcccgtgaagtcaccacgaggactcgtttttcaaaattcttggtttcatccggtgctaacgttccccggaagatatttgtaactgccttttcggtttctggggcgttaatacctcgaaaagccgtttcatgaagcatctgcatgccgagcgtaaagcgcggtgttccgaagttattcggcttcgtttctgcaaacatgctgccaccagtaatcgcatgactcttgtctagcacttgccagaactgctcatcatagttcgcatcttcattgaagacgtccgcatcaatttgcgaaataaatccaatttggaccggttccgcatccaaattgtgaacactatagtgcacatcaaataactctttttgtgcaacgctgacgaaccgatcaatcatgaattggacgcgcttttcacccttggtaataataaatgaacgccgtaaaattcccgtatgcatatcaagatccaacgtaaagtcactgactgtgtccttcgccaaatcaacttgatcaccatcaatcgtgatattgactttgatgaaattgaccgaattgatcaccttaccgaaataatcgggataaccgttcttccaccagccgacccgggttttatcgggataccagaccccaccgatataaatccctttgagggtatcgttagaatagtgctcttcaaacattccccgcatacccatgtagccgttaccaatactggtcatgctttcctgcaatcgcttatccgtcggtacgagtttatgactaatgacgtgccacggatctacttcaaaaatacgtttcattgttgttgctcctccgtcgttcgaaattaccgaataacatctttagtttcagaatcaaagaagtgggccttcggcatttcaaaagcaacttccacattctcacccgggttatgataatcacgtgcatccacttgggcagtaaatttagatttgccagctgtacaatataacatgctttcggcacctaagaattcagaaacgacgaccttcgtcttaacaattgaatctgacatcgcttcaagcgcaatttgctcagcatgaatgtcctctggtcggatacccacaatcatctttttctggtcatagccttgagcctttaaaactttcaattgaccttccgggacagctacgtcgagtccctcaccatcagttacccgaccatcatgtaaggtggcattgaagaagttcattgaaggtgatcccatgaagccagccacaaattgattaaccggttcgttatacaattcgtgcggtgtcccaacttgcatgatcttaccgtcattcataatgacgatccgatcagccatcgtcatcgcttcaatttgatcatgggtgacatagatcatgttggtcttcaagcgttgatgcatttgagcaatcgtagtccgcatatcgacccgtagcttagcatccaagttagataacggttcgtccaataggaacgtccccgcgtcccggacgatggcccgtcctaaagcaacccgttgccgttgaccaccagataaattggctggtttccgttgtagataatcggttaagcccaattgctcagcagcgttatccactcgctttttgatttcagtattactgtaagttttccgaatcttcaatccaaaggccatattgtcaaagactgacatgttcgggtatagtgcataagtttggaaaaccatcgcgatatcacgattttttggttctacgtcattcatgacttgaccgttcatcttgaagtcacccttagtgatgtcttccaagccagcaatcatccgtaatgtcgttgacttaccacagccagatgggccaatgaagaagatgaactccccatctttaatatcaagattcatatcggtaactgaatatttatcgttaccctcatattttttgtaaatgtgatcgagattcatttcaaccatcgaaatccactcccttgttttctcacttctaaactactattacacgtgcaatcgcccgcaaacggttgctttttgatcgattactcaaagctattaatcagctaattggactggtcagcaactttagttaccgccgtattagtggcatatttaattaatactggttgaccatcaactgtcagcttgccatccacaacttcagtaggaccatctgttaacagattttgatagctaccagctgctagcttagtcgcaactgctgtgacctgaccttttaacggaatccaggctgttaacgcttcgccagccgcacggtaagtaatcttaacgataccttcttctacgactgccaattggtagtccgcagcacgcagtaatggtagttgcttaatagtcactagcttttgaatcagtgatgtcacgtccccatgacgatctgcaaccatggtgtcccgatcgaacaatgatggttggtgttcggccaaaaattcttgcccgttatagattaacggaataccacgttgcatgaagatccaggtcaagttattaacggcttcagctttgctgtgcatcaagctcatcatgcgtgcattatcatgattttccaagaagcgcatcttgacataattaccagggaaagtggcatcttggcgttgtaacaagtcaacataccgttcgaccgtactgcgtccttgccagtaatctttaaaatcaccgaagacgtcgtaatcgtatgtcacatcaaaagcttgataaagttcactgtcagacagacccgtgtagccttgtgaccgcagttcctcaataaaaccactgccggctgactccgctaaccataacgtttccgggtacttcgcattaacctgtttccgcgcttcaagccagaaatcaagtggcactaatggcgcaacatcacaacggtaaccgtccacaaactggctccaatacaagagtgtgtcgatttgatactgccacaactcatggtgaccatagtctaagtctttaacgtcactccagtcgccgaccttattcgtcaactgaccatccgcgtcgtgataaaaccactctggatgttcggttgctaagactgaatcaggcgaagtgtgattatagacaatgtctaacatcactttcattcctaattcatgcgccctatccgtgagtgctttaaagtcagctaaagtcccgtattccggattgatcccacggtagtccttgattgcatatggcgaaccaagtgtccccttacggttgacctcaccgatcggattgattggcagtagccacaaaatatcggttcctaaatccttaattcgttgtaagtcagcagttacgccagcaaaattaccagcttctgagtagtttctaacaaagactgagtaaatcatctcattgcgtaattgcgtttgcgtatcgcgtgccattaatcttcctcatttctatgcttactaattgacctaaagcaacatggtttggtcaacttccggatctttgaattttgttttcagatatacccacaacacaacgaaggccaagctgagggactgcacggtcaattcgatggtgacatcaaaatgaattaagccaatccccatcgctaacagactcccaatccccatcatcatcaacgttaagttaacgccttcgcggaaattccgaatatgcgtgatcttattatgtcgtgacaagaataagaagaacgccgccccatttacgaggatcaggttgacccccacaataattaatccaagtgccatgagcataaatagaccaatcatcactttattgctttgataccaagaattaaccagaaacgcatgagcgtttgtctttaagttatggcctggcacatacttggctttaaattcactaccgaccgatttcacttgaaacgtactagcatgtaaattaatgacattcttgcgtcctgccatatcatcgttcgtgagatcgaagccagcaacattatccttagttttaataatgatttgatgtttgacatccttgaaccgctgatcacggtagttcgcagttttcattgccgtttgcatctgatcactggccatcattttatcaatgtgtggtaaaaatggtgacagattaaaattcgtttggtgattatagtaaaacggaatcggcatgaccattaccgcggtcaaaaagataaataaaacaataatctgtaaccaattaaactgatcacggttggcaaacattcttcgaggtgagaagaggctgccaaaaaaccggaccggaaaggcggttgttttgtttttcgtactctgcatctaatttcacccctactaatatttgagttaacccttgctgccaccagcgagcaatcctgaaacgaagaaccgttgtaagtagaagaacaaggcagcaattggtaacgcgactaagattgcccccgctgagaagagcacaacttgttgattttgagcgttattaatgaatgtctggagccctacggcaaccgtataatgtgattcagacgtcaataagaacttcgccatcaggtaatcttgaactggtgacatgaaggcccataacgcttgaaccgcaatcattggtttaactaatggtaagacaattgaccagaaaatcttgaaattaccagcaccatccaacttagctgattcatccaaatcatacggaacattgtcaaagtaacctttcatcagccaagtgttctgtgggatcccaccaccaatgtaaattgcggtcaagaaccagtaatggtccaaagcgttcaacatgttagctaagacgtagtaagcagtcaaagcggccatggttggtaccatttgaattacgatgaaaaacgttagactgaactttttaccagcaaaacggtaacgactataaacatagccggctaacgtcacaacgatgacttgaatgaccatacatgagactgaaataatcatggtattcaaataccagctaccatacagggtttgcgtaaataagttcttaaagttaaccaacgtccacttaccaccaaaatcaaggacgaaggcttgcacgttagcatccttaaacgccgtgatgaatgtgatcaaaacgggataaataataataattccgagaatgaccatatacagatacgtaaagaattctttccagaaacggtgccgacgcgcgctattttgctttgaattggcattcttaggtgccactgcttgtgcattatccataacactagtcccccatttcaaacgcgtgggtcttcttgaagacaatcaatgagatcccgataactaagacggaaataatcaacgtaacggccgcggccaatgaatactgtggtgacgtccccgttgttaacttgtagatccatgagatcaggatatccgtcccaccggcgttagcaccgacatcaccagggccaccttggttaaacagatagatcatcgagaagttattgaagttaaacgtatactgcgtcacaaagattggcgctgcaatagcaaaaatcgttggcaacgtaatcttgttgaacttttgcattactgtcgcaccatctagcgttgcggcttcgtagagatcttctggaatcgcttgcaggataccagtaatcataacgtaaatgtacgggaatcctaaccaaccttgaatcataataatagcaactttagtccagaacgtatccgtcatccagtggatcggcgcaatgtgagcaaatggaactaacgtattccataagccgatgacctgcacattgatcgcaccagctgaatcattaaaaatgtttgaaaaactcataattgatacaaacgctggaatcgcccaaggaagcaagaagatcactccgaagaagcgcttacctttgatgaagttttggttagcaattactgcggtggcaatcccaataataatttgtaacgtggttgcacatacggtccaaataacggtccaaccaaaaacagcgttgaaggttgcccggtaactactcaagaagaacattgatgtgaagtttttgaacccaatccaatccaataacatagctggtggaatatgcgcaaaatcatagttcgtaaaagccatcagtagtgtaaccaatactgggaacacaatcgtaaaaaccattaaaatataggccggtgtggttaataaataagcaaagccaccatctactaaactcgcacctaactctttaaacgtatgggagacctttttaccattattaattaactgtgcaacgtgtttcgcatcgtaaaggtttgcaatataaaatacgataaacacaattgtcaatagaatctgcaacgtcccatagatcatcatgaacaaagagttgtcttccattgagactgaacccaatgtgactaaattggcaaatgcgctaaagcccccgaagatgaactcagcaataaatgccaatagaataataatgaagccaacaccttttatggtctgaccgttatacagctgaccgagcccgggaataattgacaggcgttgcgctttctttacatccttgacttgcatgtcgcccgcacccctttcctaaataaattctaaatatcgtgcatttttccttttaaaaaggctgagacaaaacgaattttgtttcagcccccttaaattacaattttaattacttatcatacttttgtgagatattagttaagatcgtcttttgcgctttattagcagcttgctttggtgtcatcttgccgctagcagcattggtaaccatcgtttgtgctggtgtccaaacttctgacatttgtggtaagttgatcaaaggaacatccttgtcgtattgctttgaaacggccgtagccatgtcatcgccagtacttacagcttccttacgagcagctgtgtttgctggaatttcactagcagacttgtaaagcttgttttggttagtcttgttagagatgaagtctaaccaagcttgtgcagcagtcttatgcttagagtagtttgagattgcccaagctttaccaccggcaaacgcttgataatctttgccgttattcaacttaggtaaaacagcaacaccataatcgatattagacttcttgtaagttgcagccatccaagggccatcaataacagcagcagtcttattagacgtaaattgtgaggtcacaaagttttcgttagaagtgacattttgcatcccacttggccagtacttcgtaaaccacttcgtcatgtaagttaaaccttcaacggcgccagaattgttcaagcccatcttcttggcgttcgtattgccatcagcaaagacgtaaccaccataacctttgatgacaccaaaggcattgtagaagtttgtccattgagtcaagaaggcaactgacttagtcttatcattagcgtaagcatacttcttgtcagaagctaacttttcaagttccttgaagttcttaggtgcagtcttgattagcttcttgttgtagtacagaacgtcagattcgatcgttacaggcgctgcataaaccttattcttataagtaacagatttcttccccgttgcgttgtaacgaccactggtcaacttgactgttgatagttgaccttgtgacgccatttgaccaacccggtcgtatggtgccattaaaacatcaggacccttgccggaaggaccatccagcttcaaagcatcgtcttcatcaagcatggccttgtatgaaaccttaaccttaacgttgtacttcttttcaaactttggaatcaccgatttcatgtatgacttatatgaaggatccgctgaaacctttaacgtcttgtccatctttgaactactagatgaagatttactattaccacaacctacgagcgtgagtgctaaaccagtggctaggacacccatccccaactttttccaagtactcatagtgcttcctccttgcgaagtatcttaattcatttaccataatttattatgcaactgcgcaaacgctttcgcaagcgttttcgtaatgttaacgttaacagaatcataccaaaaataaatcctaacgcttaaaaacgttaggatttattggtccatcaacctttataccaatttatataaagattgataagttaattaaaatacatcacatgatttatatataccaattttaggataatcatgcactcacattgcttatgccgatttaacgactaagctactccaagctggtaacgtcacttggcgtcccctatatgttgcaccaccctgtacaagcaacactttaccaccaacaaacggcaacagatacgtttgcgcttgcgcacttaaattacaaactatcgctgcttgtttttgaccatcatcaatgaggtaggtaaagagttgttcagcacttccgagcataatgaactgaccattagtaaagggtgcgcactgctttagctgcagcaactgttgataatagtgataaatactgtcggggtcagcgatttctgcttgcgcattcatgtcatcagtatcaccatgtttccatggtaagtggtcagagaaaccatgataaaccgtattgtcccattgcatggggccgcgccccgccattttatgagtttgattcaacatccgcatgatttccaccttagacttaccagcggcttgagcgctcgcaacaaaggtgggtaccgtctggtcttcaaagtccgcaatatcatgataacggatatttgttaatcctaattcttccccataataaataatgggaatgccacgctgcaaatacagggccgtcgctaacgccttggcacttgcttgcggataatcaggatcaccgtaacgcgtggcgacccgagccatatcatgattattccagtaaagtgttggtagactggtgtctgctaaagccgcttgaataccgaccgtattttgcttataggccgtcacatccatcgttcggggctgaaatgtgtcggagaagctcggatcatcctgggtattgtcgtccgcaaaagttctgaacgtaatcacttgatcacactcatccgtacctagtgtcgtatagtcgaccatcaaatgggggtcagcggatgacgcttcaccgacgacgtacgtatccgggtgcttatctttgattgcggcgacaaagtcgtgtaagtactgatgcactttcggtaagtgggcataaaacatatcgctaatgatgggtgtcgaatcaccagtccgatttggataagtttggcgaaaatctgctttagccagatgaataaacgcatctaaccggagaccatcaatccccttttcaacccaaaactcagcaacatcacgcatcgcctgttgcactgccggattcttccaattgaggtccggcatccgtttatcaaacaagtggaaataatactgtgagccgcctgccggatccttcgcccaaacactgccaccgaaaaatgagccccagttgtttgggcgcccaccatcggctgcgggatcttgccataaatagtagtcccgatacttactctgtggatcagcgagagcttgcttgaaccatggatgctgatctgaagtatgattcaagacaaagtcaaagataagatacatgccgtgctcatggaccgttttaatgagcgtctcaacgtccgtcatggtccctaagctcgaatcaacttggtagtaatccgaaacatcgtagccattatcaacctggggtgattgataaattgggtttaaccatatcgtggtaatcccaagttgcttcaaatagggaatcttcgcggtaattcccggaatatcaccaatgccatcgtgattactatcgttaaaactcttaggatatatttgataaatcgtttgttgatcataccaatgcttgctcatctatccagactcctctttaacgggtcgattcagccaccgacaaccgtgaattaatgatgattttttcttgatcatgccgcccgcgagaacgatcagtatggttgatattagccaataatagccgtgcagcagctcgtcccattgcttcaagcggttgcttcatcgttgtcaaccgtttggctgcaatctgatttaataacacgccatcaaaaccgataatgccatattctatgggaacgcgaccaccttgattaataattgccgtttcaacgccgatcgccaaccgatcacttgcacaaataaacgccgtattacgtggaaaaccagaccaatggctcttcacatacgcagttgcaacgtgtgaatgattggctaatcgaataatctgagcgctaatatgatgtgtcgtgacgtactctcgaaaacctcgttcacgatctagctcaaacggttcggcaatagcgataccaataaagacaagatgcgtatagccctgttccgcggcataacgtgtactttcccagaccgcctgataattattagtatcaacgtagtcgtatccctgacgattgctaccaacaaagacgactggctgattaagacgttcgacccatgcgtaatcggcttgccgaataccagtcaaaatatagccatcacattcgccaacctcatagctattgcgcgtcgcaatctgcaaggcgtattgatgttgattcaattcattcgcaatccccgcgagcaacatcatgtaatagggttccgtcgtgtccatgtcttcaaaaatcgttaattttacaacccgggttctccgccctactagggctcgcgctgccgcattcggatgatagtctagctgtgtcatcacatttaaaatcatctctcgaagctcaggacgaacctgttccggatgattaatgactcgtgaaactgtcatttttgagacattagcttttttcgcgacatcgtttagcgttatcataatcaaaatacccccctaacttactactgtaaggacttgatttggtggacggaatggcgtttaacaatttgatgaggcacaattactgccgttgataattcatcagcaggatggtcagccatcgcaatcttggccgcttcttcacctaaacgctgtggaaagaccgcaatcgatgtcagcatcgggtgcgctaaatcagaaaaaatggagttattaaaaccaatcagtgagaattgtttaactttccagttcggatcattatggagaacctgttgtaatttcaacgccaacatatcatctacggccacaaacccggtaacatctggatactgttcaaaaaacttatgtagtgttttaacacccgccgcatgagtctcaaaccgttcttccaacataatatttggtaactgattttgcatcattacacgttgatagccaagcatccgatcactttgcaccatccgtgataaatccgaatacaaaaacccaatgcgccggtgtccatgatcaattagatattgggctgcatccgttccggcttggatattatcattatcaacatacgatgttttattgacgtcttggtaaggtttaccaatcacaacgtattggacatcaaattgcttcaagcgctcaacaactgggtcatttttttcagaatacagtaaaataaaagttttgatatggccttgtgcaatcatgacatcaatattatgcaccagttcatcacttgaaatccccgttgctagcgttgtcattgcgccattcttactacaaacttcattgataccccgaatcatctctaagaaaaatgggttagaaaagatttcgtgatgatctactggtagtaccaccccgattgtattactagccttagttgctaaattctgcgcattaaaatccggcgcgtaatttaactcccgcgccgctttaatgaccttgtcacgtgttggcttactgataatcttgctaccatgcattgcacgtgacgctgttgaaggcgaaacacctgcgcgctgggcaacatctttgatcgttgccatcatgatccccccgatctatttgaatccatctcattaaatataaaacgttttcatcgttattgcaagcgattgcataaacttgcattatttatttaattatactttataacaaaaaactgtgcccaacaaaatcggcacagttgtgagtatttaactaataattgtttccagaccagctgccaaaataccaccaagcaatggaccaaacattggaacccaggcataaccccaattagccaaccctttattaggaaccgggagaatcgtgtaggctaatcgtggcgcccaatcacgcgccggattaatcgcaaagcctgtggttccacccaaggtctgaccaacgacaacaatgagcagccccaccatcaatggctttaatccctgggtaaagttaccgagattcaacaacacgaagataaagaagaaggtcgcaatcgtttcgcttagaaaattaaataccgggttactgatggctggaccagttgcaaaaatgccaacttgattgccatctgccgccgttttggcagcttgaaagtgtgggtagtactgaataataacgattaccgcgccgataaaggcccctaagaactggcctaataagtacggccaaacgttagccattggcaaataaccgaataacgcaaaaccaactgtcaccgctggatttagatgaccatccgaaccaaattgtccggcaacatagaccccaaacgtaacggctaggccccacgccaagcaaataaacgtccaattctgatggcgtgcataattaccctttaaattcatggcggcaccactaccaaccccaaatacaattaacaccatggtacctaaaaattcacctaaaaaaccgtgcatgtttcgtcaccatcctacttgatttttaatggcgctaattgagcttcgacatccgcaagtggcacagccgcctgtaatagcgatgcggccgtgtaggcactctcaatgagtgccgtatcatataaatggaccgttttatcactcatttcaatggccatttccagattcattttggcactaccaagatcataaaaggccaagagttcatccgcatgatttgcatcaaacgcttgtgtaattttggtcaggctggttccgacttgattgtcttccgtaccaccagcaatcgtaatcgaaacgtcctgggcaacttgccctaacaaacgctgaatacctgcggcaatttctgggacgtgtgaaacaactacaattcctaaactcataagattccctccgtatccagtaacgttgtaaataaataaccactcgagacagcacctggatcaaggtgtcccactgaacgttcacctagataggatgctcgcccttttttagccaccatcggttcggtgctagcaactgcatcatcgataacatcctgcgtcaattcgcccgcttggaccgcctgaacaaccggcgcccacacatcaatcagcgtcttatcgccggttgtcgcgccaccccgcttttcaatcccagctaatgcagcggccaacaatccacctaaatcgctatcaatcttactttgctttgccatttctaagaaagctgttccgtacaatggtccagaagcaccaccgactttgctaatcaatgccatcgccgttgcttgaaatagtttagttatgtctgctggttgcgtggcaagtgctgccttaactgctgctaggccccgagccatattacccccatggtcaccatcgccaatcggcgtatctaattcacttaggtaactttggtgttgttcaatctgatcagcaaacttattcagccatactgttgtgttctcaactgttaacattctcaattcctccttatgaccacgcgattgttttgaccgggtactgtaagtaatctagccattgagattcagcaacatcgaatatcgtcagtgaaataccggccatatcaatcgaagtcatataattaccaaccttcataaaggccggttgaatgtgccgtgttgccagttcatccaacaagtcatggcaaaagacatactgatccatcaatggcgtcgctcccataccattaaccaagaacgcatactgatgatctgactgtaggtgtaattcatcatctaatttacctagcaattcctgaacaagttgtttggatggcttgattttttcgcgccgataacctggttcgctatggattccgacgccaaactcgatttcatcatctgccaattcaaagccaggtttgccgacttccggcaccgtcgctgcggataatgcgaccgcaatcgttttaatccgtggtaaaacatgcgttgctaaactttctaaatcatccaaatcagcgccttgatccgcggccgccccaagtatcttatgcataaagatagtgccggcaaccccgcgacgaccctgagtatataaactatccttaacagcaatgtcatcatcaacgacaatcgatttaacttgaatatcatctaattcagccatatctttcgccatatcgaaattcatgacatcaccagaataattcttcacgactaagaaaacgcccttaccttgatcgacagccttaattgccgcataaatttggtctggcgtcggtgaggtgaaaacctgtcctgccacggcagcgctgagcatgccaggaccaacaaagccggcgtgggcgggctcatgaccactcccgccaccactaacaattccaacttttccccgcattgaatcttgatcactacgaaccattgcttcggtatccggtaatttagttaaatattgaggataggcacgtactaacccatcaaccatttcgtcgacgacattcttgggatcattaattatttttttcatttttgttgtccttcctttctcgaattaacaagttaattgtaaatgaatccgctttcaaaaataatggacagttttgttattttgtccgccagcttccgacaagcatggtcattcgaatgcgttataataaaatcaaactaacaatataagaaggtgttcccatgcaaatcattaatgaacctcaaaatgccctgagtcaagcaactcagggcattcaatgggcctatccaaatttaacatgggtaccaaatacattcggatgttacgacagcaactttcaagatgatcagattccgttaattgctggtgggggcagcggtcacgatccggcacactggggttatgttgggcctggtatgttaactgccgcaatcatgggaacggtttttcaaccccctacatctcaagaaatcgttaaagtcacaaaacaggtgacacgccagcgtcgcgtttttttcattgttaaaaattttccagcagatgttagtgcgtttacggctgctcaacaacaactgaaaaaggaacattggcaaactggtctatgtattgtggcagacgatatttccgtggatcatgaatctttaaaacagcgccgacgaggagttgctggcacgattttagtgcataaaattcttggtgccgctgcagctcagggggcctctatcgctgaattgacccacatcgctgccgccctagtgccaaacattcacacgattggggttgctgctagcggtgcccgcattccaggacagtcaacggcatcgtttaacttgaatcctggtgaaatttattacggtatcggtattcacggggaacccggttatcggcgtgaaccttttcaatcgtcagaacgactcgcacaggaattaattagtaaattacgtctcaactttaagtggcatgctgacgaccattacgccgttttcgttaactccctcggtgggacaacgcccatggaactcatggtgttcaataatgatgttcacgaattactcaccttagccgcactaacaatcgacttcaacaaagtgggaacttttttaactgctaacgggatgcatgggttgtcattaaccttactcagcctagccgaccctgactggttaactgctctaaaccgacccgtcaaaactgctgcttggcctaactagttcaaaatttcgagtgtcatttcgatggccgcaatagcgtgctgagaaagcacctcataatcttcaggatgattcgcaacgatattatgcgttaacgattgtgcgattcccaagcacagcaaccagattagggccgccgtttctgttgtattggcgtgcgttagttcagtcaataacgtggctaagtggttaccgacaagtgccgtcacgtcaatttcatgctgcgtgttaatacattctgcataaaattgacgattcgcatctaactcgtaacaaactagtttaataatgtcgatccaaggcaaataattcagattatgttcaaccgtttcagtcagggtgtcatcaataaaccaggttaataattcatatttatcttgaaaataatcataaaatgtttgccgtctaaaatcggcggtgctcataattgccgtcacggaagttcggctaaagcccctcactaggacgacgtcatgaaaggcttgtgcaattttcttttttgtaatgtatgccattcaaacgcctccatactgccttttatcaacattgtagcgataactgcaacccatgtccaacggaagccatattccggattaattgaccactaggagaaacgctacataatgtcatagcgtttctcctagtgatatttttatattacttataaccaataatttcaggtctagtaattctcaacaaattcccctaaaatacattcaacacacttagggggcttcaattattatgacatcatcactcacggttcggcgtatcccgttactcggtgctttaattgccatgcaacttatcttaggaagtttactgtcaattcaactattgctaaccaagatatccttcgcgtttattattattggtttaacggtccgtttattttcaccactagttacagccggcagtagcgcgatttcctccctactcggaatgctgctcttcccaaagttcaccttttttcctggttttatcctaaccgcttttctgaccgggttagtctttggatacgcctttcaacatcaaacttcactgacacgcgttctcgtcgctaactttatcgtcgtctttattctcaatttgtttctaaacagcctctggcttcatctcatgtacttaacaccatggtccgttttgctaacaacgcgcatgatacaagaagtcataacctacgtctgctactcagttatcttgatcgccctatttaagattccgattctgaaccagctcaccgcacgctttaagtgacggtggtcattaattatttcgttaattaagtaatgactggtggtacttaatttaaagctaagtaaaaaaccaagggccacagtacattgctgtgacccttagtttttgtgcaaacaattgattgtcatacgaccccgtcagacctaccaacagtgccgaactcgacttcgtattaatttaatgctgccaccattccggccaaaaattcagcggcaccgcccacgaaaatttgttgtgaatgcttgaagattggcgcttgttcatccgtattcacagaaagaacgtgttgcgcaccagccatgccagccaagtaatcatcatcaccagcgacgccaatgttgatcaagacttctggtgcaaccgtcactgctgaggcaccaatttgttgctcaatgctaaattgttccatagccgttagcggctgggtaacagccaatgctgcaccaatccacttggccaattgttgggcttgaagcaatactgccggttccatcgcgcctcgacctaatgccacgacgcgtttcgccgtagcaatactgccgacattgactggcacatccctagtcaaattcaagcgttttacgacccgatgtaggtcggccacgactaggtgctcaggagctgtgtggggtcccgttgtcgggacatcggccacttcgtcattcaggctcgtcgtggcaaaagtcaacgccaattgcgtatccgtgccaacaatcaacggtagtgtcgccacgtcattttgcaaggcacttaacggcgagtgttgcgtataggctagatcaccgatcaatggcatcaaaattttaaacggcgccaaggcattttggctggcaaacattgccgccaattgcgctgcgtctgtaaatgggcgctcatcatcggcctgttgggccgcattgtagacactagtctgtaaggcggccgtaatcgccattgctggcgccaaggcagttaacggcggctgttctgtcagcgctaactgtcgtgcctggtctgtggcatgttgccatattcccgctgtaatcgccccggcaaataattgccccaagctttgcgcccgttgcatcactcgttgtccttgtcccaattgaccgatttgatcagcggccgtaaccgggacatcggtgagttgaacatccgcgatggtcaatccgtgtaaccctaaaggggttattggttggctgaccgtgacgcctggctgatcagcactaataacaaaggcccctgtagcattcggtggtgtctgtgcgagaactaaatactcagttgcctgtgtaacattcaataccgttttaaccgcaccggacagttgccagccagctgttaccggcgttgctttgacggtactactagccatgacttgttccggtaatgccgcgagtccaaaaacacctgattgtgcacaataccgttggcgttgttgcggggttccaaacgttaatattgcatcctcaacttgccaactactggcaaaactcatagcgagcccagctgaactttgcgccagcgctaatgtactcaaaacccgttggctcaggcggtcatctggtagtggatcgtccaaagccaattgctgggcaagcgttgtcagtgtcggtcgatcgactttcccagtcgactccatctgcatggcgagtcccatcaattgctcacgtgccagtgccatcaaccgttgccacaatcccgtctgtcgtgccgttaaatgtaattccattccgatccctcacttcatccgtcatctattaagtctaacttaccacatttttagcctgctaacgaaaaaagcgaataaacattatcactattgaacgctgccgaatccaccggtcgaaaaacagtcgtccggattaaacatccgtcgactgttgaaatacgtattattactgctggtcatctaaatctgccgccataaacccatgttctaaaatcgccatgtaggtttttgcgcgactgaccacccattcgatatcggccatcgattcaacttgatgattctcacgcatataggtctgaaattccataaaaatctgattgtaaacacccataatcaaagcaatcgttgcatcacgatcaacatccgcacgcagcgtcattttatccagcacctgactgatcatttcccgggaaatagtcatcgacttagtatacaggatcttcatttgtgcctgtatctttaccggcaagcgctccagcgcgccatacgcgtcaatcaagaccttcatttcatccgggtggtctttaccaaacgccgccttgtaacgcgcactccgcaccatcaacgtgactaggtcatctggaacatcaaaaacttgttgattaatggtggcaataatcgtgtcagtagcaagctgaacagtggccaaatacaagcgctgtttgctaccgtaataatgaaataataggcccttagacaccgttgccgcggacgcaatcacatccgttttagcatctcgatagccactgacggcaaaggtgtgcatggccgcgtgcataatacgctcgaccttcgccgggtctttaggaacaggttgttttactgccatgtcacgcactcctttcgtttactgagctagatcacgccgccgataacttagtgctgctactactaatattagcacagttaataacaggcaccagctacttgtcgttccatctaagggcttgattggtaccttgttaacaaagccaaggggcgttaaacggcgtgcccattttggcaaatcaatcaaattaccaagatacaatgagaagaaggcgtaaaatacccagatccacgcagcataccgccatttaggtcgccagcccgctaaggcactcgtcaccgctaccatcactaacatcgccggtgcataggccgcaaacacgtgccaataggtcacccaactgatgggcttgaccatactcgtcaggcccatcaaatacataccacttagaccggcaagtaaaacgagcagtcccgttacgattgcccagccggtatagcttgcccacacgtgccaccgtgatgtggccgtcgcataaacttgatgtagatagcctttttgttcatcattgaccagtttgagcattaactgtactgctggaaccagtgcaacgatcaccatgacgatagccaacacagcaatgaaatttttgacgatcaagcgattcgctgctgctaaagctaacgcacctagcagttgtttgatcattggattgctctttgccagatcgccaatcgtattaaagacggacgcatacgcggcacctaagataaagttccctagtagccatgcaataatcagaccatgtgcctgccgccataatagggtcacgggaccccgcaacaaaccgctagcctgtcgccgaccgcgccgtgattcgactaagcccgcgcccaagtcccgataagcattaagagctgcagccaaacttaaacaaccaagacccagtaatacatacagaccgattggtaaccaatcattggtttgatacgcatctaatttttcaatccaaccaaaggggatccaccaagtcaggtctggacggttaacatccgtgcccattcgtgcaacgtacatgacgcccagtagcaaatagctcagcatcgtcgtaccactcgcactagtcattacctgtgcaagtaacagcgtcaacattccaaaagcccagcctaagccccctaagcccagaccaattaaccaattacctggcgtcgtcgctcccggaagcttggcgacggtcagcccgagggcaaaaagaaaaccaatcaaaccatttagcgccgttaactcagctgccccggcgaatagtggtgctaaccgaccgaccgcgtgggcacgcactagctctagcaggccatcatcttcatccccgcgcgtcgtaaccacggccaccatgatattcatcacaatcatgacgatggccataaaaaccatcatttcagttgcaaacaccttggccgtcgtatatggcgatttggccgaaaacgcaccaaataaggaaatcatcgcgggcgttttaagcgttttgacaatttcattcagtgccatctgagtgccataaataccatcaaacttcgcggcgatggccgtgaatagccccgtcaacacgacgacccaaatgagcaactttttccaatctcgtcgtaagttgaaccgtatcagtaatccggtacgagcaaatagttgtgttgccatcagcatcacttccccttcaccggttgttgttcggtcgtgtaatagcgcatgaataaatcttttaacgttggtggggtcgttgttaagctgatcagtttccgactcgccaagtactgcactaccggcgtcaactggtcagcatcgacggctagactgacgtggttatctccgtggcgcgctgtgaccccgtgaacaccagctagggtggtcaagtcagccaaaggcagtcgtgtttgcacatcgaccgtggttcgggttaagtgccgcatctcagctaacgaccccgtttcaacaatctgtccctcacggataataccgatgcgatcacacattttttccacttctgacagaatatggctagataacaggacgctcttctctcgccgttttaaagccaatacttcattttgaaacgtctgctcatttagcggatccagtccggacgttggttcgtcaaaaatatatagatcagcatccgttgagagtgccgcaatcaaggccaccttttgccgattacctttagaataagtgcgcgcttttttacgcggatccagttcgaattgtttaattagcgcgtccgtcttagccgtatgctgaccaccgtttagtttaagaaacaagtcaataatttccccaccacttagattaggccataaataaacatcgcctggcacataagcaattcgcttatgaatcgccacactatcctgccagacatcgcgaccaaaaatcgtcgcctgcccaccactagcttttaaaattccaagtagtacccgaatagtagttgatttaccagcaccattcggaccgataaatccaaaaacttcccccgcgttgatttcaaaattaatatccttgagagcctgaaacttcccgaaatgcttttgcaagtgactaatccttaataacggttctttatccatatgactcactcccatccttcaaattcgagcatcttattgttgatgctgcaatcataggcgccgttgactagtaagtcaatgactagccagtcaatcagttaaaaatttcattttaaacatctaatccgcttgaaactggcttctgaggctagtcaagtcaacaaaaaaactgttttggcgataaactttactcgctaaaacagttttttgacatctgaatttctatggcagaaccagaaagatatatcgtcttcattagccactagaagatagttgggactaacccaccatccgcccgcaatgcttcaccagaaaaactgctagcaaacggactagcgataaacactgctaaccgaccaatttcttccggccgaatcaaacgctgaatttgtgatagtggtcgatgattaatcataaagtcatgctcccactgatcctttggcaaatctgaatcagcatacatatcatctaacattttctgaacaccttctgttaatgtcgagccgggcataaccgtgttaaccgttacgtggctaccaactgttaacttcgacagactcttcgctaaagaaaggttcatcgatttagtcatcgaatattggggcatttcccccgaaggcataactgcttcttcactcgcaataaagataatgcgtccaaaatcttgggctaacattgcaggtaaataatgttttgccaaccgattgccagacaacacgttcactttaaagaagcgttcccaagttgcatcgtcaatctcatcgtaagccattggcccaaagattcccatattgttgaccaatacgtcaaccgttggaatttgttgaaacattttgtcagcttgctgcggatcactaatatcatacggtgccgccactggatgagttgttgggtatgccgctgcgagttcatccacaaccgctgccaccgtatctgtgcggcgaccattaatgaccacatccgcgccttccttggcaaatgctaccgcaattgcccgtccgattcccttagtcgaaccagtgaccaagacccgtttccctgctaatcccatttccatgctcaaagttcctccgttctaatttaaattgctcgttaagtctaactagtttgatcaataaacacaaataatcggtcctcacgggtattaatctaactcgtttatttcccgggtaataatcgcaaaaaaagcacaccagtctcctggcatgctaattatgtacgcatcttaatccgcgcttgatttcgcatattcttctaacactggcataacgtagcgttgttctgcttgcttacgtgccatgatggcatcatccatatcagcaaactgctgattcaaaactaagcggccccgatacattaaccgtgcgacccacttctgtgagcatcggtcaaaggaaacaccaatgaccccgctccgattccggctattcggtttcaatcgatcgaccgaagttccttgataaagcggtaagttatcactacgtcccatatttttacgggtttgcggattttcaaaaatattctttcgactaacatctgcccgtaaacagccacagctcttcgtaatccctttccgtaaccgataactatcgacaactacttgtcgtccacatgaacactgacacaaccaccgtgcattaccattcggcgcactttcagcccgttcgataacggtcaaacggctgaaagtctcaccagttaaatccttaagtcgcatcaaaatcacctcactaagctttctgtgtaatcagctcaattgtcttcaacacaatcgagcttgtactatttaagttaacccgattatatgaaatatttgtgacgaataaaaaaacttttatagtaaaattcgcgcaatatccattaatttccagctgattaactaacactcaacctattccagctttgtcttttatttagaatactactattatgattatatgtcactttttatcatttatattatcatcagaccggtaaacacaaaaaaacgttagtctcagaatagtctaacgttttatatgttaattgtacaaacaattattgccaatcacacaaaccagcccagtggcgcgagccctaaccagctcagaacgttaacgttagtgtcagtcgcaacaaatggtcgtaaagtctgcttaatttctgtcgcattggctagcgtttgcagatcataccaatactggccctttttactatgacctactaaggtccaccgacctaacgactttaatgccggtttctcggtgtcaagatcagcagtcaatgcactcacaaaaacgtgcatcgtcggcatccaggccccgtcgtactgttcagtgtcacgccgtaactggctgatttgattctgcaaacgatgcgccgtccgatacagtcctaataccgcgagaagtcctactaacagcattagcatccagacgcctattaaatctgtatcaccccgatgaaggatcagaatcaaaaacaatccccataccacaacccctgcataaagactgaggttgatcgtattcatcgcccgatcacgtaactgcaaagctacttgcaaacgaatcttaggatcagttggtgccattgtcgtttgctgtaatgctggttggtcgctgccggtatacacaatctgaatatctggttgctgtacttgcacttgggcgagaacttgaaacgcgctgttactgttgctcatgtcagccgcgattgcttgcggcacatactcactaaagacccgataaatcgtcggcacttttttaaactgataccaatttccatgaatagccatcaataaatagcgtcgctgcgcttgcgcattcagccatgccaactcctgttcagaacctttgatcaaaaatcgatgccgccacatacctaccacttccattttaaaagtttaaacaaatccaattggtgccaatcccagccaacttacaatcgatacagaaacgctatcttccacaattagctgtagcgattgcttgatttccgcagcacttgccagcgtcttcaagtcataccagtacatcccgtgatgatcttgaccgacgtaagcccacgcccctagacctgccactttttctgtatccagctcagtggacatgtttttcaagaaaacgtgcatcgttggccgccaagcatcatcatattgttgcgtaatgactcgcagcgcattcgcctgtttatgcagccgacttgcttgccatgcaggatagaaggtaaatagcaaccatgctagcattccccaactggccacgttatcactcacattcaggctaatcacgatcacggccagtatcagaccaaccactaacctaatattcatgacatttaacaagtgtccccgttgcgccagtgcaattttcaactgcaacggtgcgtcctgacgatccactcgtgccccctgcaactcagtctgagccgtgcccgtataaatcacctgtacggctggtttcgtcaattgtagccgtgctaacaatttgaacggtgtgtgctggtcgtcgatttcagttgcaacattaccgctcacatattcactaaagacttgataccgcgtcgtcgttttttgaaattgataccagttccccctgatacgccgcagtaattgcccgcgttgtacctgctgattgagccatcgcaattcctgctctgagcctttgactgccatttgataacgccacatatactcacttccccgttaaattaacccattacaatcccgcctgctcacaaatctgattcaataattgcagtcgttttcgttcagccgccaaaaccgattcaccactccccgtgatttcataggtatgcacgtcattttcatcgactcgttccgtcattaaataatccttagtcatggcatgcaaattcgtaaataaggttcccaatcctagctgtagttgattattggtcatttcagcgatctttgccggaatcgcttcactggtaattggctggcgaacactgactaacactaagaacgctgcttccgtcattggttcatacttatcaattaatcgttgataaaagttagctggcatattttcatcccccttaatcagattattgaagcgctttctttttcaatcaatttaattatgggccaccgttttcttgaatgcaactccccagaataatttccacaaaaaatcggtagccactgattaacgcggttaccgattgctttaatgaatttgaacatccgctacgaccgtacttgtctcgtatgggaaatgtgattcggagacttcaaagggttgaccatcatccatgtaactaatctgattaatgaccaacacgggatcattcagagtcgcgcccattgcggcaacgtcatcagccgtcactcgggctgccgagataatacggtgtgaacccgcgattttcttgccactatgttgctctaagtaaccgtagaccgagccttcgaggacttgcttcgtcaacgtcacgatactcgttggcataatcgtatgctcatacgcccacaccttaccatcaacgtagcgggtccgccgaataacgtacaccggatccatctcatcgattaacaactgttccgcttcccgcttagtaggcaagcgagcttgtaattccaacaccttactcgtcacctttttaccggcattcgtttgcgttgttcccaggggcttgtctaccagcgtttcttggcgccgttcagtcaaaccaaagtccttgcgaacaaaggtccccgcgccacgcttggagtaaaccatcccttcaataatcagtaattgaatggccttgtgaatcgtaattcgtgtcgtatcaaaagtttcagctaatttattctggtcgggcatcaattcgcccggcgtatatttaccggattttatgtcttgtcgcagactatccgcaatcgtttcatacttataagccaaactactcacatccccttcatcatttggtcttgtcaactagtttaccccttttagtagctaattgaaatcatttgtatatacttttattggctttgtttaattaacgaccaatccaactaatcatcagcatccgtcactgaccgtatagccgaatgaatcagcgcatttgaccaccatttaatcagctgttcccgattttcccgttcaatctcgatgtaaccggctacatccgttcggttttacttgcacccccacagactttggcgtatgctttaatagttaaattcagattagaaaaagctgtgacaagatgagtaagctaattctcgtgcttagagagtcgtatttttggtgcaaaacgatgacgtggttagttgaagatggtcttgaagaagctactggggccatctcagtcggagcgatccgttacgatcatgataagtccctgtgggaaaatctcggtggtaacacgcaaacgcgtcctagaaagcattcgcttttaggcgcgtttttttatgaccataactgatctgaaattaacgcctgttcgcttttattaatggttattagaacttattcattctcaatacttaaggagtgttacactatgcaaaacaagcaatccaattcaattcgtaccgtcgtggctaccgggatcggcgccgccgttatttttgttctcatgaaatttgtcgccattccaacgggtgtgccgaatacccaggttaacgtcgcgatggggtttttagccttactaggagccatctttggtcccgttgcagctggtttagccgtgttcatcggtcacgccttaaacgacttcgtaacttatggttcgccttggtggacctgggtcatcgttgatggtctgattggggttgccttcggactagctaaaaatcggctcaagattgaaaatggcgtactaggaacggcaaaattagtctggtttaacatttaccaaatcatcgtcaactttattggttgggtgcttttagcaccaactggtgatattattatttatcatgaaccggccaacaaagtttaccttcaaggtgtcattacttggatcgccgattccatctcagttgccatcattgggaccatcctactagtcttgtacgcccggacgcggacccaacgtgggagcttaacaaaggaacgttaataacatgagcgcacccatcattagctttaaaaatttctcttttcaatataatagccaaacggaaccaactttacgtgatattaatctggatatttaccccggtgaaaaagtgttgattgctggaccttctggctccggtaaatctacattaggccggtgtttgaacggcttgattccgcagtcctatccaggaacagtgacgggccaagcaaggattgctggtcaaaccattactgagagctccatttttgcattatcccaagacgtcggtacggtactgcaagatcctgatagtcagttcgtcggtttgactgtcatcgaagatatggctttctcattggaaaatgatcagcagacccaaccggccatgcgacaagcaactgaacagtgggcccaaactttaaacctccaggacttattgactcaccgcccgcaggaattatctggtgggcaaaagcaacgggtcgccatggctggtgttctgatcgacaatagtaaaatcctattatttgatgaaccgctagcgagtcttgatccggcatcgggtaaagcctcgatggcactcattgatcagctgactcatacgcaggacctgactgtcatcattattgagcaccgcatcgaggacgtgttacagcaaccaatcgaccggctgattgtcatgcaagacggcgcgatcgtcgctaacgaccggccggaaacgattttgcggcaatcactcatgactcaactcgggctacgcgaaccattatacctttcagcgctcaaactagccggtgttgatctagcaacttgccaacacttggataacctccaagccttacaagtacccgacctcaccgcgacgttgcaaaactggaccgccggcgtacaactacagtcgcccaccgttcatgaccaaccgttactcgcaattgagcatctgacattcgggtacgatcccgccaaaccaatcatcaacgatatcaccgtcacacttcatcagggtgaaatgattagtctagtgggtcaaaacgggactggtaagtcaacattaagcaatctgattactgggtttttgatgccacagtccggcaaaatgcgatttaacggtcattccctagctgaccaatcagtcaaagaacgtgccgaccaaattggttatatccttcaggaccccaatcaaatgatctctaaaacgatgatttttgatgaagttgctgccggtttggtcctccgaggtgtcgctgacgatgaagtaaagcgccgtgtccaggccgttctgaaggtctgtggtctctatgagtttcgccactggcctatttctgcgctcagtttcggtcaaaagaaacgggtcacgattgcggccatcctcgtattagaaccggccatgctaattcttgatgagcctactgcgggccaagacttgcaacactatactgaaatgatgaccttcttaactaagatcaatcaggaacaacacatgacgattatgttgatcacgcatgatatgcacctaatgctagaatacacggatcgcacgattgtgttgggccacggcaacattttgatggatgctcgcccagccgatgtgttgaccaacgcatccattattcagcaagcttccttagccaagacaagtttatacaccctggcagaagcgcaccatttaaacccgacagaattcgtcgcaaaatttgttcaggctgaacgggaggcgcgctaagatgcaacatgaattattgatcgggtacaacgaccgtcatacttttttaaaccgacttagcggtagcactaaactactctgctttgttggcttatcagttatcgggatgatgacttacgacacgcgttacttaatcggggtgatgattttttcactgattctattccgcttttcaaaaattcattaccgcgatatcgcgttcgtgcttaacgttattattggtttttccgttttaaacttagtgatggtgtacgtctttgcgcctcattacggcgtctcgatttatggtaccgaacacttactactgggatctgctgatcactactttaacttgacagccgaacaacttttttatgaatttaatttgttattaaagtacacgtttgccgtgccactcgccctgatttttctcatgacgactaatcccagcgaatttgctgcgagtctcaataagattggaatttcttatcgtatcagctattccgtagcgattgcactacgttacattccagacgttcaagctgattaccgtactatcagtctggcacaacaggctcgggggtttgaaatgtcgaaaaaagcgcattttatgacccgtattcgtggcggcatccaaattctgcttccattgattttttcaagcttagatcgaatcgaaaccattagtcaggcgatggaattgcggcgcttcggtaagggaaaacatcgcacatggtacatggcccaacgctttaaacgtaacgactatctggcgttaacgttagttgctctgctgatcatcctcggcatcgccctctttaaggtcaacggtggccgtttctggaatccgtttaaggcataacgttgcatcataattttccaaaaaacttcgtcgaccatgcttatcgatgaagttttttgtttgcatctacctatcaagcctcacctgacttaacaacagcaacaatccccttattccacacgcaccatcctgttatgccaagattaactaaaaccagcgactttaaaattgaaaaaacaaatttcaaccgctaaactgaaactagatcttacaaaaagtaagcaaaactagcttgaaaggatgttttattgtgactagttttaacgaaccactcaaattcaaatctggcgttacactacgcaaccgcctaatgatgtcgcccatgacgacgactcaaagcttttacaatggtagtatcacccatgacgaaatcgactactacacacaacgagctactggcttaggtgccgtgattacgggtgctgccaacgtcgaagatctcggtaagggttggcatggcgagcttagtatcgcgcatgacacgatgctgcccggtctaagtgcacttgctcatggcattcaaagtcaaggtgccaaagctatcgttcaaatcttccacgccggtcgaatgacgcatcgagccgtcttaaatggcgaacagattgtctctgccagtgccgttgcggcccttcgtgacgatgcggaaacaccgcgagcaatgtcgattgacgagatccacgcaacaatttcagcattcggtgaagcaactcggcgcgcgattcaagccggctttgatgggattgaattacacggtgccaatacctatttgatccaacagttcttctcaccacatagtaatcgccgcaccgatgaatacggtggtcgcacgccgcaagaacggttccgctttattgatgaattattaaaggccgtctttgcagctgttgaccaatatgcggaccggcccttcatcgttggctatcgtttctcaccagaagaattcgaagaaccaggtattcggcttgaagataccctttggttactctcacaactacgggaaagtcgattagattacgttcatgtctcactcaacaactatgaccgtgtttcacgagacccgcagtatcaagataaatccatcatgacctacgtgcacgaagcgttacaaggtaaattgccactagttggtgttggttgcgtccggacccgcgacgatgtcaagactgtgttacaaactgccgaactagtcgcagtgggccaacaattactttatgatccaacttgggccgtcaaactcgctaaaaacgctgacaacaccatggttacggcaccatttgaagaagccgttgaggtcacaccacttagccggccgctgtatgaatttgcagcctcgcgctatcacagcgtcattaatagttaacctgtcagccgaattaaaaacgtccactgaaaaaatcagtgggcgtttttatgtttcacgtgaaacatttagactttcaataaccaattcagttgttgtaacgcacgctgatggtcaccttgatattgacgcgcaatatagtaataggctaacgtttcatgggccgttgcttgccggtcgacgggcaattgatactgttggtcaaagacctgttcaaatgcttctaatgtcggcgcagctggctgttcacgcaaacaaaactgtcgtaattccgatctagtcatccggtcacgggcaatcggttggcggtcttcatgcgcagccaaacgttgctgtagtgctgcttgcataccggcatccgcattgtccgcaagccactgttgagtttgtggcattgtcgtttgcatggctaattgttcaaaccaagccagcgacaatgattggccccaccgggtcgtcaataagtgctcccaatccgcacgttgggtcgcctgctgatgatactgccagccccaacaactattgaagacatcgtcataaaaacgcgtcgtttgttgttcatctagctgttgagtcacctgattaagtgcggcaacgaactgatgatcaagcatggctaggcgccgaacttgaatcttcccagtctgtcgatattcagtcaccatttgcccgaattgataagagttcaccaaagggcgttcggtcgctggtggcgtgattttttcaaactgttgcttcgccatcggtcgttccggacgcatcacaataatggccgccagctgctgtaaataacattgataggcgtgactctggcgcaaggtttgctcggccttcacagcactttgctgcgcttgtgcctggcgttgttgttgattagtcacaattgcttgacgggccgcccgctcagccgcttcaatcaccgtttgttcatcatggactaaccgctgataggtttgttcagcgggctttagttcctgtaatggtagctgcttggtacgacgttttaggtacgtcgtgacggtttgcgtcgttgtttgtcgcaacttgcgcgcttggggcgcttgctcagccggtaattgtggtagccacggctgagcaaacatgatcgttggcactgttggtacagcggtagtcagcgtctgatactgggccaccgcataaaagttatcttctgttgtaatcaccatcaagtaacgcgtttcggcgttcatgaactttttgacgcattcagaaccgacaatcaactcacgatgattatgcttgttttgaacatggtactcataacgaaccggcttatgacacaattcgcaatgatgccatgcttgtcggctttcattcgggttaacaacgtacggcagactcgccaaaagttgccactcatgactacagtcggtcaaccactgtgcatgatcttgtaaaatcaagttacgaacagtcgttttcaagaaatcactgtcagcctttaccgttacgtgtgcgcgtaataacgcactaatttgttggagcgtggtccgccgtcgagctcgttcacttaacagaaagaaacgattttcagcgggggttattaaagttgttgctgccggcaatgccgcccacccctttcagtaaaaataccgttctagcataccataactttcccattcagtgcgaacgttagttctaaaatctcggtcactctcattaacccaacggttactcccatcgcggttcgtttgttatcaagcctttattgattgcattcaaattcacccactttttgataattttattgatattacgattgttacaaagcagtcaaggtgctaaactatcttcgaatcaaaaaagattcactttaagggggattttgaaatgaaaaaattaacatcagtcgttgcaacacttgctttggcattaccattggctgccagcccgtttgctatgactaccacggctaatgccgccacggtaaccccaaaagccactacccatgcacttactaaagcgacccactttcccgccatcacaatgcacgcgaaggccgccacgactttgaatacaattcactttgccgccgatcgggcaatcgcctttgttagcccggccaaagcaaaactcagcactaaaaagacttacacggtaactaagacgattactttagcaaccggcaagcatacgtcggccacatattatctcattagtgaacacggtaaggccctcggctgggctaaagccaccacgatgattaaagggaacgccccgaccgctaaattaaaagcgaccaagaaaaccccgaagactaagttgacgattgctaagaagaccaccaaagtaaaatcaacgaagctaacgatcaagcaccctaaggcaagtatcaaaccaactaaaaaggtaacgactctcgccactaaaaaaacgttagcccaaccaacgaaaactaagaaaatggcaccaaaattaatcaaaaagaccgccaagcaaaacgctaaaaaggcgcccaaacttgcaaccaaaaagcatctcacggtcaaaaccactactaaacacacaccgtctaaattaacacctaaagcagctgctaaaatttgatcaaccactaaattgcttagcaacctgatcctgttaatgacggcgtctcaacgagccgttactactgatcgtgatgcacactaaaacgctccctatgaaagtcatctttcatggggagcgtttttaaatcatgccatcatcagtattaaccactgacaggccagcatttaattaatcaaacatcttcttagttgccttgagcaaggtctttggatccttatcgtaccgtggtgtcttgaccaagttatccattgggaccccagcaaagtgataagcggcaatctcaccagagcggaccgcactctgttccgtgaagatcatctggtatggttgttccgcaaattcacccgtaaaggctaggttcgttgagtgctttggtaagacttctggccgatcagacttagcccggttattaaagagtgcggaagcatatggcatgtataccggaatattgttcacaatactgtccaaaatttccttttccttgtccttaatattgcctggacccggatctactttggaaagttgaccaattaattcttgagccatttccttacccgtcatcttgatatacggcttgttaacaaactcaccttgacgccgtggatacaagaagtagccccacagaactgtttcgtttggttgctgtgtcgtaaagtgtggttggtggtgcaccacgatcgacatattaacatccttttggttcaacggcgtaattggcgtagttgataagaaggagttcaacgcattcccgggttcctgggtggtgatccgaacgatttcatttaagaataaatgattcttagtcgtcaacgtgaagctgacccattcgctagcattccgatcgttgaagaacttatctggcgtccctaagttatagaaccgctcagtagccttcttccacaaactagcactaacaccataatccatattttcaggagcaggcgtgttgtaatcacccatcgttgcagaatcggtaattgaaccgttagtgaagatcaccgctgtgtcctcatcaacttcaacttcttccgtttcgccagtctgcgcatcctcaatgactaagccagtcaccgtaatttcgtcttgcattggcgtgtctttaaattgccaatccttaacaatcttattatcaatgaaagtcacaccttgcccttgcaagtacttaattaatggcaaaatcatgctttcgaattgattgtaacgcgtccggttgacaccaactaagtgttcaatttgtgtaaattcataaatcatttgatgcatgtaacgccgcagttcttgagcagagctttgcgttctaaaggcaaaggttgtttcccacatataccagaaattcgtttggaacatatgcggatcatccttgaagtactcagcaatcgaaacgttgtcgagcttcgtttcttcactatctggcatcataatcaacttagtcagcaaagtccgatccttattattgaatcctaacttaccagcattaataatgcctttaccaccctgcatcaagcgggcaatatcatacgtccgatgtttcgcatcaaaatcacgcgtatcttcggccgccgtcatccccggttcagttaccgatggaatccggtccaataaatccattaagtcaacgtacgtccggtaattcagcatccgaccaccccgggcaacatacccagtcgtgttagccatcggatgattcttattccaatactcattggtaaaatcagtcgtggcaccaccatcattggcaccgtgcatatcaacaccatagaatgtgatgtccttaccatcccaatgaccctcttgaatcaagtagaccgccgcagccatatttgatagcccggcaccaatcataattgctttacttttaaccataaataacgcccccaaaataggtaattaggttctgataacgcttacaagtacattatacaacttggatagtgattgtctagtttgaactgaacttttttgttttcttgccgctttcttaatatttgcgctagtcaaccaatttctgcccatagcgtaacaccatttgatgacttttctccaattaaacacattgcctttaacaaatattacattttttcaagcggctcattcccaccacaagttctgccatttatgtatgcaaaaagcgagccttaacaaatgcagacggctcactttttattttgactaaccgttcaaattaacgaatagttcctgtatattgaaaatcatcggcagtgggatcttgtagaaaagccttcaaatcagtcatgttctcaataaccgctttgccggacttagccagcatcacattaaacgtgccatcagctaacgtttcactatagtaagcaacggggatatctaaaccatatgctgttccagtttcccaaatagttcccgtgtcaaagccatcaaccacggcgacaactaacttggcccgttttaaatggtccacattgtccgtaaataccgcgtttcgatcagcttcggtcgcatccggcgtcaaatcgatgccgtctagccgtggactgtaataagtcaattctaactcgtccattaatttttcgatcttagctagccgttctggttggccctcagtaaaccaaggtcctgctaaataaattgttggctcatcactcatcaaacgcgtactcatttgctcaatcctctttctcattcaatgtttattcattttaaccgtcaaccccatgaatttcaagcgtcgtttagctcgttttaggcaaacaaaaaggtcgggaattcccgacctaaatactcatttaacacttaattgacttaatccattaaaatcggccgttgttaaatcaacgttggcggctgccacattgtcccgtaaatgctcaatagaacttgttcctggaatcggtatgatattatcagaccgcttcaatagccaagccaaggcaatttgcgctgggctcacctgatacttttgggccatcgtgctgaggacactcccagcctgagccagttcacccgttgctaatgggaaccatggcagaaaagccatcttttgtgaggccgcgtagtcaacaacgtcatcatcaccgtgattggcgacattatagagattttcaatggcatcaatcttagcgacttgctgcgcctccttgatttgatcaacagttacttgactcagaccgatatgcttgattttaccttcatcctgaagctttttgagttcaccgacttgatccgcaatcgagtaatgagggtcaattcgatgtaagaatactaggtcttcatggtcaatccccagtgtcatcattgaaacttctacttgctgacgcagataccgtggctcaccaagtggcgtccacacattcggtccttgccgcgtttgaccgaccttatcagaaatgaagatctgatcacgattagcggcatccttcaagcccgccgctaagtaccggtcagcaaaccatggaccgtatgaatcagccgtatcaaagaaattaacgccatattccagtgctttcttaactaccttgaccccattttcaggatcagcgtatggtccccatgtcccaggacccgttaactgcatgacgccataacccatccggttaactttgaattgatcatcaaacgcgtaagtacccgcgttagctgcattaatcgttgtcatcaaatcgctccttatcgtttattaattatgttcagtttactcctatcgacccaagtgcggtcaaacattttgttcgttaaccttgggttgggttgtgcatgtatgaaccagccgcatctggcaagtcgtttaaggcttgcatatcggccacactaattgcgaagtccaattgcgtattcgcctcaatatgggctggattaacagccttgggcaatggcaagaccccattttgtaaaacgaagcgtaacgctaactgcgccacactgacgccgtatttatcagcataggcctgtacttgcggattatcgaggaccccgcccgtcgctaacggcgagtatgcttctacaagcatggcatgttcctcagaaaacttggtgatcttaggttccgtgaagcccaagtaatattgaatttgattgaccattggtggtatcgtcgcctggttaagaatattcttcaaatcccgaacagcaaagttagagacaccaatcgctttcgcccggccactttgataaatagcttccattgcctgccaaacatcgaggttagcttcatcgtaaactcgaccgacttgcccccatggccaaggtgcgtgtaccaaatagagatccacgtagtctaagcccaaatttttcagtgagcgatcgaaatcatttagtgcaccttgatatgacttcgtttcggccggtaatttagtcgtcacaaagatttgctcacgcggaatgccagaatcacgaatcgcctggccaacgcttgcttcattttgataggccagtgcagtatcaatatgccgatatcccgctgctaaggccgcacgaacggcttgatacgttgcctcaccaccaggtatctgccaagttccgaatgcgactttgggaatgttgacaccatttgctagttgatacatcgttgttaacactgtcatcttatttttgctcctttactggttttgactgtcgttgctgagtgggatcacctacaaggcttgccccgatgatcgccacgccgacgaccgttagaatttgaataaccgccatattactgtggcctccttaattgaatagagattagtgtaatcccttagagtaactctaaggcaaagataaagtttcaaaaaaagaacgaaattgacttgggccaatctcgttctgcattattgtgatattaattactcataaatcgttgcatgctggaaaatgatgctgccggataatgctagtaacgcggaaagaatgatagctaaccagagtactggtccccagcctaattgaccgcctaaccagccgaatagtacgggccccactgcagctaacaaatagcccgcggattgggccataccagataagtcagccgtttcaaacccattggtcgttttttgcgtaaagaagacgactgccaaactgaaggctgctccagagcctaatcctagtaagacgcaggacagtgctgccacccaaaaattcgttccggaaagtaagataccaccaattcccgcaataaaaccgacacctaccaccataatcattgcccaaacgccgcgccgatgaccagaagtcgctggcactaaatatgacatcggtaggccgctcaattgcatgaccgtaactaaattgccagccacaatcaaggagaagccgtgggcaacaaataccgttggtaaccaagtcagtaatgaatagtagactagtgcttgcaagccgaaaaaggccgtaacgacccacgctaacggccgccgccaaacactcccgtgagttgccgttgactgcccatcactcgcggtcatcgcaactgttggtgcgcgatgattgtatttcaagtttggcaaccagacaaccaaattaattagtccaatcaccgatagcaccgccatcgttagtggtaacgaccagtgtgccgccaacactcccgaaagtcccgttcccagtgaaccgactaatagcattgagagcgtgtattgactagttgcgactggaatcttcgtcggaaaattatctttaataatcgctggaatcaagacattgccaccgtccgcgccaatcccgactagtaacgtcccaatgaaaagggcagcaatcgttgggatgacccgcagataactcccaacggctagaaagatcaacatgacataaattgtcagttcgttgccaaatcgccgcccccaatgtgcaatcaatggggacataatggcaaacgtcaataatgggatcgtggtcagtaatcccgccatcgagctcggcaaacccagtgtccgtttcaaagaactgattaatcccggcatcattgtaattggtaaacgcatattcgttgccgctaacatcattccaagtgttaaatagcggctatgttgatgtgttgtggtcataagtagttgacatcttctttccaagattttagttcgataattgtcgaactaaaaagcaaaaaaactaaagcgttgctaagaaccccggtaaaaaccggtcaaaggtcgctaattgtaaggatagatacttcgtctgtgcctttcgtcgcgtattggtgagacccactaaccgcaaggtcttaaagtgataagagacggttgacttgctgatatttaattgcgcccccacttcgctgcaagtcatttcccgttgtgcttgatagagcacccggataatccgtaatcggttagcatcggccagtgctttgaaaatcgccactcgttgctgatcagcctgatcttgtttgcttatttcgatattcatgaaactaacaatacactgaattaacatcatgttcaaggacaagtaacaaaaaaggcagctagccaatttaatagactaactaccaaacacctaggaaactgcccgtttgccgttcttccaaatatcaggaactaaccacaaaattaaacctaggttaattaacaaaagtaacgccgtcataatgaataccgcgttgtaattgaaccaaccagccaccaaacccccgagcaaggcgccgaacatattgccaatagcttgaaaagattgattatagctaaaaatcgttgaggtaagatgtactggcgtattcttagtcaaaaccgtttgaatctctggatatagtgcgccatcggaaatcccaatggcaaaccgcaaaataccgagggccacgacgctcgtaacaatgccttgtgggaaatacataatcaccgcaaaaatatagccaaataacaataccttaccagaaccgtgctgatcaccataacgtccaaggcgcggtgctgaaaagatgtttgaaatacccggtaaagctgcgataattccggccacaaccgtaatcgggccacggtaatgcatcaattcacgaacgtataaactaatgattggtgcaatcgaggcgtttccaaattggacgatggccgtcgaacataacatcacaataatcaagcgcggattttgaaacgctgctaaaggattgcgactgtcacctggttcacgatgatgtgcgactggtttgaagtgttcctgtacaaagaacagactcaacaaaaacgccaccattaataatccggccgtaataaaaaacgtgtttcgaatcgaaaacaattgggctagcaagcccccaatcactgggccaaacaattgaccactaacggcaccagtgatcaaagtgctcaacgcccgtccactatatttacgtggcgtttgggacgcgactaaggcttgggcattagaaataaagcccgcaaacacaccttgtagcgcgcgcaaggcaactagttgccagacattcgttacaaaacccattaaccccatcgcaactgccatccctagggacgcgcgcaatagcatgatcttacgaccttttttatcagcaatgatgccccacagtggtgccgaaattgctgaaatcgcgtaatcagctgcaaaagctaacccgctataaaatgtaatctgggccttcgtgaaatcacccaactgactaacaaataatgaaagaaatggcataatttcgctaaatgccattcccgcaacgaacgtacaaaaccataaaacaatcaaattacgatgccatggtccgcgttcacgttctgcgtcatccacgctcgtcatctccatatctaactgacactaattttcagtaagtattataccgttaattagcttatcatatttagcgaccaccagtgacaattatttcccgggaaattttttgtcatatttcctgaccagttagcccgtttagttgaccaagtagcaataagcactagtgtcaagccgcatttttcactacaataagcttatcaaaatcgctatttaaggggggaatcagcgatgcacgtacagttaaccatctctgaaacgattcatcaatgtttttcaagatcgctcgctcattaagctgccacttcaatcggtgtcacgtttttacactgccaataaacgactttattgtgaaacaaccaccggtgcttacctcgttcacagccacttacacactttaatggaccaactgccaccccaccaatttctacgtatttctagtagtgaaattgtgcgaatcgcctgtgttaaaaattttaccttaaccaaatggggtagctttcaagtcaacctaacaaccggcacaacaacatacgcatcacgacgctatacccaacaaattagaaaggcggcacaattatgaaaagactttggcacacccttttgattggcgccatcggaggcatcgttatcggctacttaatggccttggggttctcaaccttctttaataccacctatttatttccttctaatcccacttttgtcagccactggtcctcgcccttagccgccacccagctttcgacattattgtggattctgattggtgaagtttgggcattcagtagctggctattcgaaattgaaacgtggtcgattacgaaacaaaccattgctcattgtctgtgttcttacctagggatgaccccacttgcgattctctgtggctggtttccattaaacgttcgctggtttggcttctataccttggtttacaccggagcctatatcggtctatggttaattgaaatggcactcgcccgcatcaaagtcatccagctaaaccaacagcttaccaaccaccggtcataattcataccgattgttgatgtcaaaaacggcccaccgatttgattatcggtgggccgctcacttgttactgatgatttaatgatttaattattgaatttcgatttgaccgtcattcgcgctcggctgggtcttaggtaacgtaatcgttaagacaccgtcagcttgggatgccgtaattttatccgccgcaacgtttggtaacatatactgccgttgcaaggtgccagtatgacgctcattcatcacaatgttttggtcttgatcttcatgatccacaaagctatctttttgaaccttgatagacaacacattgtcacgataatccaacttcacatcttgcttatcaataccagggacatcaaccttcacttgatactgatcatcagtttcgttaatgtcggtcttcaatacttgatccatgttttctaatggtgcccagaaggagcgtgccatccgttcaaacggatccaacatgccgaaatcgttccgattcattaaagtattagccatactaacaatcccctttcaaaatttcacttggctattaatactggtcagtaattcaaatccttgtttgacctttcctgaccttcgatatatatactaacaccattttgtgggaatgcaacaatttagcactcatttaaccggagtgctaaattttaatttcacgaatccgtcgcattaggctaacaaagcgtctcagttccgcgtcagaatagtcatcagcaatggcttgtgctttagcagcaatggccgcgtccagttgcgtgtgtaaatcagcgactgcttcgcccagcgtcgtcaatcgcacgagaatttctttgttattggtcaaatcccgatatttcgtggccaatttcaatcgggataatttagtcaaaccgcgagaaatcgtcgcctgtgaaagttccgttggtgccggtagcgacttagctcgactggcaccacgccgtcccagatacgcaataattttaatatccgtcgtcgatagttgttttaatgccgcttgtagttgcggatcagtcgtttgttgcatggcccagcgtttttcttgatcatcaacgctatcctgcgtcaaaaattgatttaattccgtcatcaactgactaactaatggtgttgtcatttaaatatctcctttttaattcaagtgaataaatacttgcataccaatattattaagtctatactatcattttgtattcattagaatcaataaaaatatctggaggtcccactatgtttaaaattgcaatcatcttagggagtacccggtcacaggctaacggccgcgctttatttaaccatctaaaattaatcattgaccaattaccgactcattctacgattcactaccaatttttagatttggccaactatcagcttccccttttcgatgaacccgagccaccgatggcgaacccgcaccgcgagctacctgctaaccagcagcaatggctcaccgatatggctagtgcggacggttacattatcctgacacccgaatacaatcacgcgatgccagctggattgaaaaacgccttcgattttttggcattcgaaggcgcccgtaaaccggctaagattatctcatattctgacaatatgcgcggcggtcaatttggggcggccgcactagttccagttctccaacgattaggaatggtcgtcctccctaaaccaacgcccattggtaacgtaccacaaacccttcaaagtaacggtcactttatcgataacgcgcccctgagcaaacgctacgatcatgcacttcaccaagctttgaccgaaatcacctactataccacggttcttaccactacgccgtttccaaccgattaaattagtagcgttattgaatcaaacctgctacattatagttagcattattaagggggaattaacttatgaagatcgatattcatcgttccgcaacggaccgggtgattgccggtgtcattggtggaattgccgaacattttaactggaatactaacgttacccggctattatttgttgttttagcaattacacccatgttccctggtatcatcgcttacctgattctctggttattaatgaaggaccccatcaaggattaaccactattaacgaacagtcatcgactgctcgttttttattcgctaatatgcggccaaactttccgtagctagttcaatggcaacaagaacaccgcccgcaccccaatgtcgcggatcatagtgctctagttgtgctaaggtgtctgccgtatatagtaattgtccaaaggaaacttgccgaaacgccgaacaggcagctaaggccgaacattccatttctacgacttgacaaccctgctgacgagcagctttgactttagacacagtctcacggaagaaagcatccgttgtccacgttttgaccatctgccatggcaggcaagccttcgtcaatgttgtcccgagtacctgtataacctttggatcgagtggcacccaatcagctgctgctaaataatgaaaggacgtcccttcatcacgcaaagccaccgttgggattaataattgttcctctggtagtgctgttaatgcgccacaactaccaacggctatgacggtacgagcaccaaaatcaatcaacatctctaaatacattgtcgcagctggggaaccaaggggcgcttgcgctactgccaatttttgaccacgataaccgatttgataaacccagctaactttagtaatggtattaaattggcctaaacggtgaccatgataccgagtgacgaattgttgaaaataatcatcaccagaaaatatgtagagtagcttagctggaacagtaaagcggccatccacgtctggccctaccatagccgttggatttggatcatattgcaataacgttaacttatctgtcatcttaagttctccctatttaatttacccaacaattcgaggaaaaccagtcattttcagcgacaaactagccaaaatctgatatattattgcaactaacgcaataatttgtcatgaatttgtcaaatattttaatggcgttcacctagattgttcgtatataatattatttataataacgctaattaagaaaggatgtggcgaaattggcctatttaacacgcaataaacgtcgtgattttacagaacctcaccggtaataactttatttttaaggagcgaattgaatgataaaagatgacaatcagtcgttaacctctaatgaagagcaaaacgacacccagaaccctcccgatgcggataacttatggcagcttgatgaatcagccttagccgcaaagtacgccaccgatcctgagaatggattgagcactgctgaagctgccgaacgtttacaacataacggtcgcaacgaactggagaccaagcgtacgtctcggttcgttcaattcatcaagcagtttaataacagtattatctacattttagccgcagcagcggtcttaacgttcttcatgcaccactattccgattctatcgttattggactggttattattgccaatgccatcattggttatgtccaagaacgccaagctggcaacgcgctagaacggattcgtgaaatgctgatttccaaggatttcgtcatccgtgatggaaaaaaactggaaattgacgcccgcgaattagtcgttggtgacttagtcaacttagaagccggtgacgcggttcctgccgatatgcgcttgatttcagcggataactttaacgtccaagaatccgtgctgacaggggagactaatcccgtggagaaacaagaagaaccgattactgagaccacgccagctttggctgaccgtaagaatatggtttacgcgtcaaccgcggtgactagcggttcggccgtcggaatcgtaacggctaccgccgaagataccgaaatcggtcatatccagcagtctgttagcgacgtcaaacaaaccactaccccactgatgcgtaatctgaactcactgggggttggcttatccatcgccatcgtggtggcagccgtcctattattcctattaggaatggtcatggatacctatagtttgccaactttactaattgcggttattacgatggtcgttggttctatgccagaaggactgcccgctagtacctcggtggtcttagccatgggaacccggcagatgacgaagaaaaacgtcattgtcaagtcactacccgccgtggaaactttaggtgccgtagatatcgttaacaccgataagactgggacgttgacgaaaaatgaaatgacggtcactaaggtcgtgacgcctgagcatacgtttgatgtgacgggggtcggttatgatgataatggtggcgttaacttcgatggccatctcaagctcaatggcaacaaagtcgactggcaccaagataacgcgatggaatggctcgttaagattgccggccaaacgaccgacgccgagctacacttcgaaaacaatcgctgggaactgaccggtgaaccaaccgatggtgccttgacgacgctgtatcgtaaaatgactggtcatgatcctgaggttgaagaagttgactcgctaccattcgattccgccttccgtttttctgctcgcctggccgacttagatggtcaacgcttactaatggtcaagggctcacccgcgactgtcctgcgtttaactgaccaagctaaccaaacggcatactgggatgacgccatggacgacttaaccgccgatggtttgcgcgtggtggcgctggcttaccaagaagtcgatgatgacgtgactaccattgatgcacaagccattggtgggctgcatttagctggcttagtcggaatcattgacccgcctcgtgaagaagcggctaccgcgatcgccgaattacggcaagcgggcgtgcaagttaaaatgattacgggggaccaccctgatacggcgatggcaattgccaacaagttgaacttggccgccaatgtcaaagcgattactggtcctgaaatcgacgcgatggacgatcagcagttacaagcacacatcgatgattataacgtcttcgcacgggcaacaccgaataacaaattacggattgttcgtgcccaacaggccaataatcacgtcgtttcgatgactggtgatggggtcaacgacgccccggccctcaagcaagccgatattggggttgctatgggaatcaaggggaccgaagttgctaaggaatccgccgatatggtcctggccgatgatgactttgctgatatcgtcgccgccgttcgtgaagggcgccacgtcttcgataacattcgtaagacgattcgcttcttactcccaactagtttcgcggaaggcctcgttgtcatcattagtattttaatgggccacgaacttccgctgtacccgacgcaattactgtggatcaatatggtatccgcgctgaccatccagtttgcgttcatctttgagccacccgaggccggcatcatggcccggggtccccggaatgttaagtctgggttgttgtcaaaattagattactttgaaatcggctatgtctccttcctaatttctggattggggatcttcgcctatgactacttgaccgcgcttgggttaccaaacgtcgtcggtagtaccatgtcactgaacatcatcatctttggtaagattttctacctcttcaacttgcgaaatgaccaccccgtcatttccaagtacttcttccaaaataagatggcgttctacatcattggtatcctgattctcttacaactgggaatcatttacctaccattcatgcaatccgtcttccatacgactagcatcaacttctggtatggttggggcatcccgattatctgtgggatcgtcgtcttgattgtgaccgaggtcgggaagtctattcggttccgatggatgggaaaagatggcgtgattgattagtaattagttaataaatagaaatggctcaccaacctgttttagttggtgagccattttttagtatcgtgaaactgtttttgatgtggccgctattcaagacaaacgttctatgcttcgtttcctcagcatcgttctaaacctgtttgatatgactactattcaagaccgtaaataggttgtaaacgttcaggtctgagttctaaacctgtttgatatgactactattcaagactaatacgatccattgactccgctagtgacagttctaaacctgtttgatatgactactattcaagaccagctacttcatgctggctaaaagtatctggttctaaacctgtttgatatgactactattcaagacgattgactttatcgattacttcctgcaattgttctaaacctgtttgatatgactactattcaagactattctcgtttatcgcttttagacgtgttagttctaaacctgtttgatatgactactattcaagaccgttggagtttgtgccttaacttcttcaaggttctaaacctgtttgatatgactactattcaagacgtttggactggtttatcaagcaacaagttggttctaaacctgtttgatatgactactattcaagacataccaattggagcattaacataaatcatagttctaaacctgtttgatatgactactattcaagacttgaaaatcgcatgaatacccgaacctgaagttctaaacctgtttgatatgactactattcaagacagttactttaccgttcctagcacgagaatagttctaaacctgtttgatatgactactattcaagaccagcattttaacatcatttactcattaattcatatcacgccagtctactaaatcctcgtcaacataataataacaactatttttgaacttttccattcgatttatttctgagtattcgataacaatgacagttgcgcccaaatcatgcactagttgctcaaagctcgcccattgtttttgatttaagtaatggctgacattagtcaacaccagcttctgtttcaaacctagttcaacatgcgtttgcacaagtgcctccagtattgcccttgggtcattcataagcgccgttggaaagtgaataccggtaaacttcaatatttgttctaggctaggcgattcgtcaacatctagcggtaagtctagtaagaagctggcttccattacttgcgaaactactttacgattttcatctaagaccgctacttgccgatcatcagccattaacttgataatttgggtctgcactttctttagaaaaaggcggttcaaatcgactgataacatcaagtcaccataccagttgcattggctactgatcgtctgtaattcaaggtcgtcattgcttatacgtacgctgtcgattcgatctcgaaagccttggcacacttcggcatacatgttactatttcccaaatcgagaacgttgaccttaccagcatcgatcttgaatggtggaaatggataatatgttatattcatataacaatcgtcctttcagctgaattcaaaatatcattgctaggtgtaccttgaatatagtgcattgcctgatactgcttctcagtcactgtcatcgtttgcacttttccgcctttgggtgccagtggcgcaatccgcttttccacgaattcggccgctttcttatttacacaaacccggacgtaagttgagtattgcatcatcaaaaagccctcacgcactaaagctttgtgaaagtgccgatatgcacggcgttcttccgacgtatccatgggaacatcaaacatgactattaatcgcatcactcgatacctcatttggtaatttcacctcaatctttaattcttccgtttcaccgctaagatagtgtaagcacgcggcaacatactctgtaatcgcgtggctcacaattgtttggtgcccattaaacccaatctctaggtctaataacgacactagtccaatcttaatatccggtgtgaagtccttaaaccgttgttgactgacccattgatcaacaatcggccgaaaaggctccattaaatctgagccgaggttaaattcgttttcattgttctcatgatgaataccaatgcaggtcagatagccatttaaaacaatctctcgattcaccatggataacagcacggcgtatccgtagttgagtgcagcgttaattgggctaaaatctcgacggtagaactggtcaccaaataacaatgaaaaatatttattagccacaactgcctcccgattagtcacatcattcagttctaacttatccaactcatcaacaagtgtctgggtatcgccaccgacaaagtcaatgacttgaatctggttcaaaatcttactaccaacatttttcgtccatagcgttgcaattcgtgcttcgggccaagtcacctgttgtcgtaccaaatcagctgttcgccgtgtcggataataatcgttggtctcactgattggttccccctgatgatctgtaaaaataactttgacatgagcttccgtcagcgcacaaagcgctgcgctagtaatcacagcctgagttgttccgactaacagcaattgaatatcactgattggaaccgcatatttatcagaactcgtctgaactaatatccgattcattgaataagaaactttagcatgttgagtaataatcacgtttcgccatcccataataacagctccttgattaattatatttttcgtgctactattcacttgtatcaagttctaaaccttcttgatatgactactagcgtcaagatcaaacaaggcatttattgccaagtttcaccttttgagtccgtattcggaccactacatatgtaccaagatgtcatccttatcgggatggcatcttttttcgctataaatcttttaatgcaatttttcgctcgaacaaaccagttggtgattgatatataatttcagcgtcacccgttaacttaatgccaccaggaacctgtaacttaccaaaatctgttttcacacctagcacctttaaatcaccatacgaggcattcgcatgtaagccaataaacatattggtcaaaattccttgcttccctaaaaccagcttattcttaacaaattgatttttcgcttccagcagctcaatctgatcacgagcagaattaagtatcttcttgaacttgttcatctcgtaaagtggaaagtatcggttaacctgggcaagcgttgcgtcaaaaacagtcagtaaattctgatttaattgcacttcagactcattctgcttacctaaaaatgcgcgctgtaaagttaatggtaaatacagctcttgaatgttgtgataatacgtatcagtaccaagtgcgaagcggtgcgtttgacctttaattctatctcgaaccacctgttcaaaccgtaccttcggcaataacacttcatacgtcagcatcttcttgttgttggcatcaatgagcggttcaattactttcgtcaccgcttgcttgtttgtcattccttgttgttccaactgctcaatttgtgtcaccatagttgtaggtacacctacaacttggtactggacatcctttttagtcgatactttcacgatagccatgtaagccagcgtttttcccgtataaccaccataaatagctgtatcgaaggattgttttttccgaattaatcgcttgccattatcacttgccttcaagagagtttgatcaaacattgccccatagttttcggatacctcacgcgtcaccaataatcgcttgtaatcataaagcgtctcaaaatatttaatatcggttaacttatcccacaaaacttcaccagtatcgatatccgtaattggggtatcagtcttagctagttttcggataacattgaaacgtgttaggttaaccggctgtttagcgaacttaccgtagacgaagaatcgttccagcttcggatatcgcttcaacaaataggtgccaatgaaagcagttaaggctgcgtcaaatgcatgatggtagtcattgacctcacgaatcttcggaaaatcaaacgtttgtcgaaattgatgtgtcaagttcgctttaaccgacacaatagcggtggatggatattctgcattaatcagctcttcaactagtttgataacctgacgtgtctcaaccaactgccgattaataaaaccagtcgcgtacttgctgatttcatcaggacgcatcagtaagtggtcaagcttccgtttggtcatcagccccattcggtgcatctctttccacttagcacccatctttttcccaaacttttcactagcaaacgtatcatttttctcacgattgatgcgtgcatttgtcagtactcgattatctaatgagtcatctttcaccagagattgtggcaagatgtggtcgatatcatattctgacaatcgatcgatattaatcgcatcaccggtatacaaatcgcggccattttgtaggaaataaagtacgagccgcgtattgaaattagctttgttcttgattttctcttttaattcacgttggacttgatccctgacaatggcctgagctgttccctgataggctgcaacaatttgttttgaccgtgattgtgtccgccgaccagcaacgccaccaccacgagccgcttccacaaatatccagttaggtgtttgaccatgcatcgcatctttaatgtcagctaacaccaccatcacttcgcgaatagccttcttattttgcggtgacgtatataattcattgatggtatcttgaagatccgccgttgttaggttggcctggtttgccgatttaatttgattctcaatggcaggttggcttcgtaattgcatgaaattagcgtttgtctcccacaagccgtccatgattgaacgattattatcatctttgagacctgttaataattttcgtgataattgtccccagccacgatatcgtaattgacctagttgcttaagttgggccgctgtcagccaggaaatctctgtcagtttttgcttaaaaatcgtactatcttcaaaaatagttgaccataaaatgattttttcaatatcagcttgcttacgcacgtctgacatagcttcaggcaacacctgtttcaaatcatgatacgtggataacgaactattgaatactttcggatccgcaagccccgtaattcgtggcgcagtgggaaactctcccgctgcaactaaattgtcttgaatattcttagctgttactcgtttgtgttttttaaacacttggttatatagtcgttgtttttgccggggtgttaattgcccatcatcaactcgaatattattcagctcattgagcaccataaagcattggtaaatcaagctgcgtgcgggtagcacttcctcaccgatcaaatacgtatccgtcgtctgcatccgctgaatgaaagcggtcgccgaggccacccgatcgaccttatcatcaaaattccatggcgtgattggcccatcagccttacgtaccatccatgcaaaacctgcattggcagttgctgcctgcatttctttagtaatcagcggtccaacataataaggcacccggaaaccgacaagctcatcaagtttgtatggaaacttaccgcgtcgcttgatgaccggattttcttcacccaaccacgggtagtattccttctgattactaataatttgatctagctcattttgttgaacctgataaggaatagctccattctgctttgtccgcaatttaggcatgaattgttcagagtcaatagcttgcttaatttgagctgcccaactattcaaatctacatcggcgtcaacaaattttcccaaggccttttgaaacgcttcttgcgtcacctgtttacttttcacaccatcaatatattgatcgtaggttgcccgaatagcccgtccgcgcttggcgtctgactgagagcgaatatacgctttcaataacttcaaatcttcgccatggcgtttatacttctcaaccatactctgtgagaaccgtttaccttctggaataagctgtgcaaggttgacgctggcgtataaccgaattacctcatcaataatttgttggcccacttcgctaaaacggtcttcaatgccaggaagtttgtcttgattttcctctaaactaaaggcccaatcctttgcttcagtagcgtcgatgtccgttagagtcagcacatcaatcttggttttatttccaacgagggctttcgcaaattctgttaccactgccttttggcgcttcttttccgcagtagtcgcgccagttaaaactgctaatagtggcataattaatttttggcggtcactacgcgagatatcagttcgtaccaatgtttgtttgatgctgtcaagcaacgctacatcggttgtcaggttcaagttcagctccagatcagcctgactaaacaaatgattcaaagtttcaaagtgctgctgtaaatcaagtgtcccacttcgatacgctgtcgctgcatcattacgcaaaaaattgccgcgatatttgacaatatggtgaatcgctaggtaaatttcacgcacatcaaacttgcggtgctgagtcatcagcgcctcacgtaaatgataaatcgttggataatcatgatagaaatcctgatcactccgatcattaaacaacgttttttcaagaccgttataattaggatcacgaggtgaaatatccgaatatttgcgccgcgcaaagaaattgatatccaccttgctgattggttggtcaaagaattcgcgtagtaatcgtaaccgccatttcacccgtttcaaccgacgacgcgttgttcgaaatccccgccggtctgctgcggctgccccttctttaaataaccgtacaccaatcccagtctgccccttaatttttctgacatgaccacttgcatccacaaccgtccagccaaccgagttcgtaccaatatccaagcctacaccgtatggttctttcatttatacatcctccgataaattttagattatgcactcattatcgcgcagttggataatcatttgcaacaagcaaaagttaatcctagcaacgattgtaagcgcagtcttaattattttctttaatattaatgtattaaatatataatctttgtcgtgtcgccaaaattagcgacctattactatagacaaaaatacggtgatgacacaaagaatgttatcaccaccgtactttgaaataactataattttaaaaataataatgcatcaaggaaactcactgaccacgacctagcacgtcgccaaaaattccaacaacgccttattaaatgctgccgactgttccgccatcacgatatgaccagcttccggaatgaccacactctgtcctcgtagtgccatttgagcagtcactgccgcaaagtcgggattgaagaacggtgacttggcgcccgcaatgatcaagaacggtacggtcaattggcggatcacatcccgccaatcctgaaccgcgtggttaaccaacaatggaaacattaatttcgcatcgaacggtgcctgcgcttctactgccttgacgcgcgcatacgtcgcatcatcgatgtgcttaaacgtcgagtgtcccagcggcattctaaaatagtccggaatatcctgccattgaacctgtttgaacccatattgccagtgcggtgtattgatcatccgcggcgtttgatccacgtcgatcagggccttaattcctgtatcaccatacaatgacacgtacgcaaaccaagtcgcggcccccatcgaattaccgagtaaaattggttgttcgagttgtaatttttcaatcaattcatgcgcatccaccgcgcgacgactcatacgtaagcctttcgccgtgtgctcggataaaccttggcaccgcccatctaaattaatgacccggtagcccgcctgaatcagtaccgggatttgagcgcgccaaatatccttagcgccaccaaatcccgtcaaaataacgattggctgcccctggccttcatccgtataatctaactgaacgtgatctgacgtgataaaacgcatttcaccatcctcctttttgactattcattcaacatggtcattaaaatcttgtggcgttagcttctttaatttttctagccattggcgcgttttgtcatccagcccagcttcggaaagtgtattctgggcaatcactgtcgaatcaagcaactgagcaaccttttcccaatcaatccccgtcgctgtttgaatactggtttgtagctgtcgtacttgctcagtcgttatttggcccaattgtcgtgaatcaccagttaatgctaatagggcattgattgctaattgctctgataggcaggcctgccacgtcgctggggacagtgcctcagttaacgtaatccgctcacttaacggcacagctggcacttccttgttcagaaaagccgtccagcgcgccatttcctggtcaactaaggcatacccctgccacggtaactgccgattaaaggtctgtaacgtttgcttcgtcaatgccactactgaccacgttgtctgaccattgtcgctcaattctgcttgccctgcggctaaccactgtgccataaaacgttgcatcatctgtcgcatcaccggccgctgttttgccgcttgcgtcaggtggtaacgcacttgcaaaaattcgctaaccatttctggcataatcgcccgcttctcctgggcctgacgtcgttgctttaattgtcgtaaccgtttctgtttactgacttttgcataatgtccttgcttgaccatcgtgccaccacttttcctgataattatattgatacctaattttaacgcaataaaagcccaaaataaaagcacttaccatttactggcaagtactcttgattacaacgtttcttccttgttaccggcgtatttacggaaataaatcaatgtcatgatgaccagaaatacaacaccgactaaaattgagtagcgcgtttccggattaataaacatgaagaccagtgttaacgcgaggaaggccaacgttaaataatttgaatagggtgataatggcattttaaaaggatggttcgccatcttggctgcgttttgcttacggaacgcaatttgactcactagaataacaaaccacggtaccataccgggcaagacactcgaactgtaaaccatcacgaaaatctcgctagcatccttgaaaaacattggtaacacaacattcaagacgactccaattagaatcccggtcgcaatcgcaataacggaataaaatggtactccatgacgatttaataaagtcatcttccttggtaactggtgactttccgccaacgtgtaagtcattcgactcgcactataaattccagaatttgttcccgataaggaagccgtaataaccacgaagttgataatcgaagccgcagcggtaatcccaattttggcaaatgtctgtacaaacggtgaaccgatctggcttaacttatcccaggggtaaatgctgacaattacgaagatggcacccacgtaaaagattaaaatccgggcaaccgttgaacgaatcgctttaacgatcgtgctttgtggattttcagcttcaccagctgtgactccaatcaattcaatcccttgatacgacgccaacacaattgctagtgcgaagacaaagcccttcaccccaccagtgaagaaaccaccatgggtccacaggttactgattccaattggatgaccgccgttaccaataccaaaaataatcagacctaaaccggcaataatcatcagaataatcgtcaccactttaataagtgagaaccaggtttccagcgtcccaaacattttaaccgagataaggttggccgcacataagaatacaatggcaattaggcccggaatccaatctggcaagttcggccaccaataccggcagtagccgcctagtgcaatcatttcactcatcccaacaacgacgaactgaaaaatgttgctccaagccgtcaagtatccaaaaacggggtgaatatattcagaagcaaacttggcaaacgaaccggtattcggatcgacatacagcatctcacctagtgcccgcataatcaggtatagaaaggcccctgatacgatgtacgcaattagcactgacggcccggtccacttgatcgttgagctggatcccataaataggcccactccgatcgtgccgcccagtgcaatcatttgcatctggcccgtacttaattttctctgcataaattactctcttttcataaaatcaaagaactcacactatcacggctgacagtatatagcttttatcttagctaaaaaagtgcaccgacgcaaacggatttagtaacacatagtcagtatgtacttgctctaacgcggttcgagcatgcttcgtataaatttatcaacaaacagctttcagtcagaattatcggtataataagggtaattaaactagaaacgaggtttcgtcatggcaaattacattaaagaaattcgggctttggttggtcacaaaccaatcattttgaatacggccgctggtattttagtcaacgatcagcaacaaatcttgctgaaccttcgtaccgatacgcataactggagtttacccggtggctatctagaatacggtgagacgtatgccacggcctgcgtgcgggaatataaggaagatagtggcattgatgtcgaagttgttgatcgcatcggcatctttgataaaggcgagacggcctatcctaacggcgatgtagctcaaacaatcagtgcactctttcttgtaaaacccattggcggccacgttctgacccaagccactgatgaaacactcaaactcgactactttgacttcgacaacttgccgccattgttaaatcaacaaaatgcagatatgattcacgccgcccaggaatatttacagacccattcggcaaccaaataacctaaccaaaaatcgtcattccacccatgtaagaatatgcgtaaccaatccggactttccgtctccggtgttgtttggggatgctccggatcggcaataatcgcgatacgagcaattgccgtcagcggcacctgttggatttcaaacgtttcgtaattgtaaagcgctaagcaacccactaattgtgcatcatcctcatccttagtcgtggtgctaaataattgaatcggataaataacctggtcgaccatccctacagtcggctggtaatagtgcatggtcgtcaactcatgatacgtgactgcatgaatcaacgcctgtaacaaggtctcgttgacaccttccgtactacccgcaactagctgaacatgacgctgataattcgccagcgcatgatacgtctgatcacctaacgtctgccgcaatttttctaccgttatcgttgtcacacttggttctaggcgttgaccaccctgataatttggtaatgcggagactaacaaggctgccaactcttgctgcgtaaacgtcgcgttggtgcgactaggtgttactggatggtaaggaactagcggttgtgaggagaagtgcaatgctaatttcagtgctggttgcacgcgtggatcaccaaacggcgcccagctgaccatgaagccggcctgcatatgtgcactaacctggccaactcggtaaataaccgcgggttgcacagcatcatcgaccaagttatcattcagccccgtcttggtttgagcactgataccaactacataaaagctactagcgttcgttaagaccgctgctgaaatgtgttcattttgccaccgctgaaccacgtcggccttcgccgtcacttgacaagtaatgaggctgtccggcggtacttgtgaccaatcaggcgttaatagataacgtttggtaacgtgtaattcatcagcgggcgtcaaccatggcgataacggaacctgctgatacttaatcgggtgaccattgcacatcatgacaattgttcctaacggtgtctgtaacgaatgcgttggcactgcccctaaatttgtcctcgatttagccaatcgttggcggatttgcaacgcctcaatcggactcgggactgcagtagtccgccatagcatcaattcaagatgctgtttttgctgatctaataccgtcacgatgccgtacaatcgttgtccctgatccatcagtgccgcgtacggctgattctgataccgggcaatgtagcctaacttagcatgttgcaacgtccacactgagatggcattatcatcgtattgattgccactttctcgctggagcaacaccgccatacccactctgagcgtcgttaacgttgccacaatatcatcgacataccgttcgccaacgaccgtgactgtatccaatgcgacggctgcatcgcctgttgaattttgttcagttacttgaacaactgtggtcactggaattatttcaatgtcagctgtttctggttcgtgggcgcgaactaacagttcttgcccctgattaatcacagcgataacccgataggtctgcttcttcaacgtcattacgctcatgccagcttcaattcgttccatagcggtcacccccttaacaataactttattccattatacgaaagcgttgccagtattaacagctttacgaattgttttacacgtcagcttacaatatcttggattagttatctagttgccaacaccatttcagatgtttcacgtgaaacattcattagttttgcggctgcacattaaaaacgtggttatcctacaattcagaataaccacgcccgattttatcaatttgctagtcaatgctatctacgccacacaagcccgcataaacgccgcaaacaaccgcgcctgcacggagtttacttgttgcatcatttctggatgccactggacacccaactgtagaccaccagctgtcgcctcaattgcttcaacaacctgatccgcactttgggccaccacctgaaagcccgttgccacctgtttcacggcctgatgatgaaatgaattgaccgtgattgcgtcactagtggtgcctaaatattcagctaaggtcgtacctggtacgaccttcacgtgatgcatgccgtaagcggccaattgtccttgcatatgttttaaggtaccctgaccagctggtagttcactcatatcctgataaagattgccaccatagcacacgtttaagatttgtaagccccgacagataccgagcaccggtttaccaacggcgtgggtggcacgaatcagcgcaatttcatactgatcccgttccggatctaccccacccaatttaggctggggttcctccccatacgtcaatggggccacatctgcaccaccacaaagtagtagaccatcgatcattccaacgtatcgttcaatcgtcgttgcgtcggtcgttaccggtaataccaatggcacaccgccattatccgttactgatttcaaataatcacgattcacataatcacggacccgccccgggaacatctggctgttcactgtcacaacgcctggtgcgattccaattatcggtttaaccattctgtcgccctctctcaaaaaaatcccacggtaacatgcgtattaccaatgggattatcatttactttttacatctaattgtcaatgactaagctcacgatattcgagctcggttggtttgacgataattcccgtcaaccagacggcgatgctcagcccaaccaatactaatagcgtcgtgccaccaatgaaatcaatggcctgtaactgataataggcgacaatccccacaacccaccagcaaaagttcaaccagtatggtaacgtagcgtgccgcacaaagtacgtgacgaagataatagcatatagcggtgtgaagaccgaaccaatcaaatacaggaagttctgataatacgtcatggcaaccgtcagcgcaatcaatagcccaactaccgtcacaccaacggctaatcgattaacatggcggctaccggtcagattagccaaactcgtggcggccgaataagtatctaaaaatgtcgtcgtcaccgttgagaaaacgataatcagcaatgcaaccaatcctaaaccggaccgcgtcagcaatgccgtgatatcagtttgccctgtccgtaacacaactaatagccccgtcacaaacatcactaaactgcctaacatatagccacctgcgctgactagtgcgactggtaaaggacgatcaacacgctgggtataatcaccaattagtggcaaccatgagagtgccatcgtaacgttcaattccactgcttgcccaaacgtcatactagtcgttgataccgactgactagttgtcggtgccataaataccattacgagcattaacaccgtcccgagcaccaacaagcccacaacggcattgttgattttgaacagtaactgactacccatgagcaaccacgcaataatcaaaatcgccacgatggttgccattaatagcggacttcgaaagccaaatagctttccactaatactgttcatggctaactgagcattgacgatcatcaccgccgtccagccaacgagttgcaaggcgttgagtcctgacgctagtaacactccgccgcgaccaaaagccagttgggctgacgctaacgcggactggtgtaatttagcccccaaatagccggctggaaccaagaacaggccacagccgatcatgtgccccaatacaatcgcagccaatccgcgtgtcagccccagtggtgccatcagcgtacctgttaagatttcggcaattgagatagccgcaccgagccacagtaaaaattggctccgaaaaatcccgtcatgtttcatcagtgcacctccgtagccgttagcatcgccttgaccgtggcggccatatcgggactacgcgttaacattgagatcaccgcagcgccagccgcaccagtagccgcaatagctggcaattgcgcgacagtaattccgccaatggcgacaacgggacaggttgcagtcacgactaattgtcgcaaccccgtcagaccgactactggatccgcatcggccttagatgtcgttggaaagatgggaccactaccaagataagcaatgccttccaattggttagcaatctgcacttcagctaaggttgaacaagacaaaccgacaaacatttgattagcgacccgttgaataacttgtgtcacccggtcatccttttgaccaacgtgaaccccatctgcttgcagtgcgagtgccagctcgacatcatcatcgacgataaagggaacgtgcgcttgcgcacaacgtgcccgcagctgttgccccaatgcaaaacgctcagccgtagtcaactggctattacctttatctcggtattggaatgccgtgatgcccgcatccaaggccgtttggacgaccacatttagatcctgtcccggcacgtcttgtgtcccgcacacaaaataagcacgtaattgtgtgggttcaaatttaagcgtcatgaacgatcacctgctcacttggggttgcccaatgattcagcgggccatgaccatgcccgacctggataccatcctgaatcgtcccagcaacgtacgccttagccgttttaatggccgcagccattgaccgtccttttgctaattcggcggtaatacatgccgatagggtatctcccgtgccgtgggttcgcaccgtatcaatccgtggggccgaaagccaaaaggcggtcccgtcagccaacagtacgaagtcattagctaaatcggaattatcaccatgcccacctttaataatgacattgtcagcacctaacccctgtagcgcatgtccagctgtaaccatcgcttgattactagtgattgcctgaccaattaattgttctgcttccggtaaattcggcgtcacaacagtcgctaacgggagcagttcgtcgcgaaccgttttaatcgcatccgcggctaataacgccgccccgcctttcgcaatcatgactggatcaactgtcagcggcccaaaatcaactcgtttcaagttctcaacgacggcatggacgtgtttcagcatccgcaagcatccccgttttacaagcgcgaatgtctaagtcagctgctaacgaagcaaattgttcgtcaatgatcttcgtcggcattgccataaaatcttggacccccaatgtattttgagctgtcacggcaacgactaccgcggtaccaaaaacgtgacgtgcctgcatcgtttttaaatcggccatgacaccggcaccgccaccactgtccgtaccagcaatcgttgccacttgtggaaattcattcatcaaatctcgcgacccttcattatatttaatcaactttagcaattgtttgaatttctgacactgtcactaagctcagccggtcaatcaaatcaatggcaaatgtggcgggacgatcggccgtcagctgactggcgacaagttcccccgctcccgctaagactaagcaagccacttgcgccgcctggtaaacgtcggttggactaacggctgtaaaagccgcgacgatactagaaagtaaatcgcccgagcccacgtgacgttggaagagcggggtaccattagcgactttaactacgcgctgaccatccgtaataacatcagtaggtcccgacaatatgacacagcattggaattgctgtgcacaagcttgagcaatttcaaccaggtcgccctgaccgctccccgcatcaatgcccttcgcttgccaatccatgccagccaatgccgcaatttcaccagcattgccccgaataacatcgacttgaaaatcagatagtaatgctagcgcgacttcttttcgataagggaccgccccgacggccaccggatcaagaacgactggcttatgatactgattagcaagcttaccaaccacccgcatttgatcaatctgggtggtggtcagggttcctaaattaatgcaaacagccccggcaatttggaccatcgtctccgcttcttggacttcagctgacataattggcgaggcccctaacgcgtttagcccattggcaacgtcttgaaccgtaacaaaattggcaatgttaaaaacaatcggattgtgatcccgtaaagtattcaataattgtaattccatagcaattctcctcctcattgaccgtcacaccaatcaaaaacgaccaccaatcaacatgcattgatccagtggccgctaacattagctgtgacactttcctacgcaagtttgagcttacaggttcagagggatcggcacttacagcaccatctcagcccatttttggacacccctagtgtttaaaaatattcaattactaaccttagtctaacgattgtaaccgctaacgtcaatctttccgttaaccgaatcaccctcattgctacttaattaattaggcattaaagtttaaattcaccgccgcgaccggttataataaaaagcaaatatgcctttaagaaaagagtgattgaagatgcaagcacttgttgtgccagatccatccgctcaaactatggaacagcttcaatggcaagaacggcccatgcccaacctcgggccaactgaggtgttgatcaagacccaagcagtcgggctcaatccggtagattttaaattagttgcggcgggtaacgccgcctggcaatatccacacacactaggactagacacagctggaatcgtggaggcggttggcgctgaggtcactaattttcggcctggcgaacgagtttgtgggcacgctaatctcgccaataatgggacgtttgccgaatacgtgagtttaccagcagccgtgctagctaagattccaacgactgtgagctttgaagcagccgccgctagtctctgcgctggattgacggcttatcaggccctcctgcgcaaagccaatttaaatgccgcgcaaactgtgctgatccatgcaggtgcgggcggtgtaggcagtatggctattcaactcgctaaggctgctggcaagaccgtcttcacgaccgtttcaaaggccaagcaagccttcgtggcaccgctgcatcccgatgcccaaatcgattaccatcatgaagatgtgaccacacgcattcaagacctaacgcagcagcacggtgttgatctgatcattaataccattggtcatgctgatgcggacttaccgcgcttagcttacaatggccagcttgtctgtgtattagcaactccggaccactttccaagtaatcaagttgtaactatcagtaaattggacctcggtggtgcccaccgtagcggtaacccagcgcaagttgccgatcttgggaaaatgaccgccgccttattagctttggtccaagctggcaaggtcgacccactaattactcaggtcttgcaccgtgaccaacttgtaactggtttgcaacaactccaagctggtcaagtcgttggtaaactcgtcgtgacttttgacgcctgttgatctaaaaatgaagatacgaaaaacgcagctcaagggcggccttgaactgcgctttttggggtgtcaggcgataatcgcaacatgtgcgtatcggctggggttacgattatcatcgggtgggcgaatgaaccatgatcaccgccgttcagccgcccatctccgattaatcccgacaccactatcattaatttgattaggcctaggcgaaagtggccaattgtgccttggtcaacgtatcattcatccgaccactacggaaaccacctaaatcaagggtaacgtagcggaatccaagtgattgtaattgacggttaacgcggtcgttaaagactaagaaatcaccaattcgtgcttctggtaattcgatccgcgcaatatcattgtggaaacgaacccggaccgttggaaaacctaaactacgcaaatatttttcggcggccattacttgagcaatattgtcatgtgtcaacgtcgtcccgtatgggaaccgtgaagatacagagcatgacgccactttattccagttcgtcaaaccgagttcttgtgccaaggcccgaacgtcagtcttgaagaaatcagcttcttgtaacaagctccgggcccccgcttcactacgggccttcaaaccaggacgataatcattttcatcattcttgatcataccgtctaagacagcggcactaccgttattagccgcaatgtcattcaaccggctgtagaacatcttcttcgcatagtaccagctatcaggcgtgttgttcttgatgtggtcatcgctcaagtagtctagcgtggttccttgaacgttagcacctagttcttcggctaaactcatcgctttatcgaattcttcatccgtaaataattcagagttcgcaaccacagcggtcacattgtcacggcctaaaacatcgaaggccaacttcaaaactaaggtactgtcgatcccaccagaaaaggccacggtgacccgttgtaaatcctttaatgctgctactaacgttgctttttttgttgctaatgttgccataataaaacccttcttctatttaatttaattaattccaaaaaatccatgcataaaccaagcggcaattgctgccccgacaaagggcgcaattcctggcacaatgataccgtattgccaatcactatcggctttattggcaattggtaagatggcgtgggcaatccggggtcccatatctcgagctaagttcattgcgaacccggttggaccaccaagtcccatcccaatggcccatacaagtaggccaacgccaattggcacgattcccggcgttttaatctcagaaatcgctaaaatacccgaaataaaaataaatgtatcaaataattccacaaagaaattccgcggtaagttacgaacggctggtgccgtacagaataagttccgaattgtaatgggtgaaatctcatctgttgaggctttaaaatgatcagcatacatgatccaaacgatcactgagcccacgaccccaccaagcacttccgcaacggaatacggaataaataaagaccatgcgatatttcctaatagacactgcgccaaaaccattgccgggttaatgcaaacattgccaaaaatgaataaggcaacgctaatcccaaaaccccaagttgtaatggcaaaaatatgaccggaaccccgatacttggttccctttaatacggaactacaatgaacacccaccccaaaaataatcattagggctgtgcccataaattcagcaatcaactgatgtaccaaaaaattacgcctcctcatctaattgatctaccgccactaaggctgcctggtagaccgttctaaacggaatatgaaattgctgcgccagctgggcacaatccgcatattccggcatcttcttctcaatatcttgatatgtcgccactttaacttgaacgtcaccgtacggcgttgcgaccgtcaggaagtgccgttgcataacagtacgttgccacgtctggtaacgtacaccaatcgtcgtcgtttcttgtaaaatcaacttagtcagtaagtccttatcgttaacgtttcccaaaaccgttaactttgtcgccggccgatctttcttcatctgaatgggcgtgaaaaacacatcgtatgcgcccgccgttaataactggttcatcacgtaccccagtccttcacccgtctgatcatccagattagcttcaatcattaagacagcatcagccgtccggttaacgatttgctgacttagttttttttttcgaataatacggctcgcagtgcattgaaaccacccgtgtcccgtttaccaaacccataaccaactctagttggcacggcattttccggtaacggtccgaattcacgtacgagcgtcttgaccaagcccatcccagtgggggtaatcaattcagtatgcacatccaaccgttgttgaatcggaatggcactaccaactcgcatctgcatcacggctggtacgggaactggcatctgaccatgggcaacgttaataaaaccactaccatcacttaacggtgaagccatgatggtatcaatctgcatcaattccaacccaatacagcagcccacaatatcaacaatcgaatccaacgcgcccacttcatggaaatgaacttcagctagtggcatgtgatgaaccgctgcttccgcttgcgcaatttccataaagatcgctttcgcgtggtgtttcacggtatctgataagtcactgccgtcaattaacgcctcaatatcagctaaatgacgcgcttcatgatcatgatgatgcccagcttcatgctgatgatggtgatgttccacaaaaccatggtccttaccacccgcaacctgaacatcaaagctcgtgccatagatgctactctgggcttcccgttgctgcgttaattcataaccgtgcacgtgtaacttagccaattcggtttttaattgctcaaaatcaagtcctaaatcgagtaacgcgcccagaaacatatcaccgctaatccccgaaaaagcgtctaaataaagtgtttgcatttatcttctccttgttcagttaactgaatcttacatttgattgatcatactagctgagtaagcggcaccaaagccgttatcaatgttgacaacggtaatccccgacgcacagctattgagcatggtcaatagcgcggtcataccttgaaaactagtaccataaccaacgctggtcggcactgcaatcacgggcttatcaactagtccaccaacgacactggccagcgcaccttccatgcccgcaatcacaatgaccacccgggcaccacgaatcacatccaacttggcaaacagtcggtggattcccgcaacacccacgtcatagactcgttcaacacgattgccaaaagtttccgcggttactgctgcttcttcagcaaccggttgatcggaggtccccgccgtcaccacagcaatgtaccctggtgttttcggtgcgggttgttccccgaccgtcatacactgcgcagtggcatgatagacagccgttggtaacgctggttggagtgccgcgaatttttctgcggataaccgggtcgttaaaatcggcaacgtctgttgggacaaggcttgcacgatacccacaatttgggttgccgtcttaccagcaccgtagatgacctcaggaaagccattgcggcgttgacgatctaaatcgacattggcaaaacctaatgccgctgttttgcccgcttctaactgttgggcagccgccgtcggacttaattgccctgccgccacttgttgtaatatttctgctgtggttgccatactacttcacaataacgcctaaaccatcaggaataaccgtcactttagcggcttgaccctcgcgtgcgtaggccttttccatggcttcatctaacgtcttggctagttccatatgcatattcgtaatcaaatcaggatcaacgaggtctgacacaaaaatcacgtgatgatgaactaagattcgagcaaagatttgggccgtccattggtcaggaatagttttaagccgtggcgtgttgattgcttggtccaggaattccttaggatcatcaacgtcagctaagttgtgataaaacccttcaccaccgtgaccatcacgagcaccggcaaccataataatcgtgccgccttctttgtttgttgcttcagcagcggtcattcctttaacggcctgataaatattttgatcaagcggataaccaccattcgtcgaaatcgcaatgtcacaatcaatggctggtacactagaaagttctttgacaaagtcacagcccactttatgggcggcttccatgtcaccggcaaatgacccaatgatttttttatcttcgtctaaaacaacattgataataaaggcaagtttagcggtccgagcagcgtacaccatatccttatgaatcggattatgcattaaattaccggtccgggccttcggtgagttaataaattcgccggaatggttcgccataatcgtcttgtatgaagcaatcccaggtaaaacggacttccgaccacctgaaaaaccagcaaagaaatgtgattcgataaagccttcggagattagcaaatccgcttcagcagcgaccttattaataatgcaatcgccgccagatggtaattggccaatcttgaccatactactgtcatcggttgagacatgcatcacgatttcttcgttattgacgatgtcttcaccatacttattcaccaattcttcgtgggttgatggccgatggaaaccagtagctacgagaatccgaatccgtgcatcgggcgccactgaccgtaaccgccgcaataggatcggggtgataatatgtgaaggaactggccgcgtgtgatcggaactaataatcacaatattgtgcttcccacgagcaagttcctccagcttatcggagccgattggattatccagcgacttctcgaccgtttcctgttctgataatttgttatgatatgttgcagcttgcgacactaacttaccggcgtaattttcatcatcaatctgagccgtaattgtgcgcttgtcatatggtaaatcaattgcaaccatgacttttagccatcctctttctctaaaaactaatttttacatgcacgttttgttatactagaagacggataacttgtccgttacattttaagttttcaaaaatagttaacaaatgtatactttaaatgcgattgtcacaatcatgaaaaccgctatgcttaagtagcgttatcgtcgtgattactgttgagaatcgctatttttactgacctcaaccttaaaaattattcacgaaagaactgaaaaactaagatggtattaactgatattgaatatttactaagttatttggaagcccatcacgtgccgacaatcaaaaaaaagcggcatacttacctgacctatcatggtttagccgaacactatacgtacgtcttaaaggacggcatcatcaaaaacagcattattttacaagacggtcgcgaatataatttatcttatattgccaagcccgacgtgatctccctgctgcgtgatgaagtttctcgttctacggatcaaccgtttaacgtccgtattgagtccgaatatgccactttttaccaggtcaaccgggtcgctttttggaagtacgtcaacagcacgcctgaactgcaaaactacgttaaaaattattaccgtaaaaagttgtccgaaaacattcttcgactgcaacggatggtcatgaacggtaaaaaaggagccatttgtgcctttatctatagtcttgttgatttgttcggacgaaaagttaacgaagggattctgattgactttgtggtcaccaatgacgacatcgccggtttctgtggtattagctcccggagcagtgtcaaccggatgctcaaggaattacgaacagacggcgtcattacggtcaaaaatcacaaatttattattcaagatgttagttacctcttagatcaaattgcaaattagtgaggtgctcatccgtgcatattccggataattatttaagtcccgcaacttgcggaacgttggtcaccgcgatggctcccgtctggaccgtcgccgttttaaaagttaaagttcaaatcaaaaaacatcatgaaaccctgccaatgctcggcatcgccgcttcattggcttttttaattatgatgttcaacttgccgattccaggtgggaccacggctcacgctgtcgggggaaccctgttagctgtcttgattggcccatgggcggcgtgtcttgcgctgaccgtgacgctactactacaagccttattattcggtgatggcggtatcctagcctttggcgctaacgcgttgaatatggcggtcattatgccgtttgtcggctacgcctgctatcgcctaggtcaaaaatggcaccatgaaaagttggggctcgcaattggtgcttacttaggcattaatatggcggcgctagttgctggtatcgagctcgggttacaacccatactggctcatacggcaagtggtgcgccgctctactgcccatacggcctcaacattacgatacccgcaatgttgacggctcacttattagtcgccggctgggtcgaagtcgtcttcacactgcttgtctttcaatttgtaaaacgagtcgcaccgactaacctctatcagacacccactcggcgcaatcagcggccgtggatcgcactgctactcggattagcggtgttatcaccattaggcttgttggctagcaatacggcttggggcgaatggagcccccaagaattacagcaacggctagcgcaacaacatatcagtactcacgcgcctcaaggaatggtccacgggttccattttcaggccctgttcagtgattacgccatcgcgggcttaccggtcagtgtgggttatattttatcggccattaccgctgttttgattttcttacttttgattcgaggtcttcaacatgaaaccgacacgtcccaacactgatattccagcttggctgcaaactacgaccaccacgccaacacctgctattaaagcgaaattttggcaacgtaatcagcgtcacctacgccaattactcagtcgactagcacagccagcgccagtcacggcaacgtctcattggcgcgttgcaccgcaattcaaattaattcagctcctgttgctcgtcattttaattgctttaagtaataatctcattctgttatggggcctagcactattagttgggtgccaattattatggttacctccacgccaactgcgccgttttatgggaagctggctaatcagtgttgggatggccatgctgttcgtattaccgagctactggttagccggtcccaccacgctattattctttggccttaaaaccagtctaatgctggcaaacgctcaatattaccgtctaaccacgccgtttcaagatttattggctggcttgaaggcactccattgccctgatctattaattatgactttggccattgccatcacgtacttacgaatgctcggccaacatctattgctgacgatggaagcactagaattgcggacggtcgccccaacggctcatccataccgtttaatcggcgcattatttggtaatttatatcttaaaagttacacttatgcgctagaactatacgctgccatggaagcacgcgggttcaatggtcattacgcgcgctcaaccgggcgtcgtacccattggcgcgattatcttgccctgagcccagcgattattgtctggatattatttattttttggaggcattaacgtggtattgattaaattggtgaatatttgctatgattatcctgatacgtgtggcttgaaggacctcagcttaacggtcaactcaggcgactttgtctgtctaatggggcccaatggatctggtaaatcgacccttttacgactattgagtggattagctagtccaactagtggcacttatcagtttcacgatcagccgattacgaccacttatctcgctgatgcccaaaatcgacaacaacttcatcagcggatcggcatggtctttcaaaatactgatgttcaactattcaacacgtcggtcactgaggaagtcgctttcggtccccgacaactcggtttatcagcagccatggttgcgcaacgcgtcgccgactgcttacaattaacggactgtgctaacttagcagaccgggtcccttaccaactttcaggtggtgaaaagaagcgcgtggcactagccagcgttctcgccttgaaccctgaaattttattgttagatgaaccgctgaacggcttaacaattgccgctcagcagcaaatgctaaccctactgcaacggctacaagctgccggcaaaactatcatcatggcaagccataactaccagcaagtccaagccgttggtgaacgtttcattatttttaacagtacccaccaagtcgacgctgacctaacgcgcgctgatcttgatcagcaacccgctcggcaagcgcaattgatgactttataattaagaggagttgagaagagatgcttaatccaaatactgagatccatcgtggttggaaccggcgcgttgtgaccggtaaaactttagctgaatgtgatgaacgtttagtgaagtatttaaacgaccaagattatggttctggtgaattcgttgttttacacgaaaatgacggtagcaacgaaaacactggctatgatttacctgatggcgataactgctacattagtttcttgatttataacagccgactttaagttggtggtgacaaaaatgcttactggtggatgatcgccagtaagcattttttgttaaactcacaaactattctgattttaagcccaactcggctaacatgattcgtgcaaacgccactaagtttggacgtgaccatcgtataacctgttcgtcctgttgaccagcataggctgctaacgcctgcctgatcaacggatgccactgtgttggcagctgttgtaacccacattcacccccggcctgcttagaaataattaactgatcttgctggtaagcgcgaactcgacaaaggtttaataccgtatacattggtaactgaacgatcgccgtttcagcattcgcgatatcagacttgatactgtcccaataggccgtcgcaggaacggggccaaagaccgttgtaatagctggcccaagtaagacttgtcccgctgcttggagaatcgttaagtgggcagcaagatcaggatccgtgccgtgcatcgcttttaggtaggctagcggtgtccgttgataatcctcataatggtattttgaaaaatgaaaatcgaatgggcaaggatgcacaaaatgctgggttgcactcagtaacagcacatgaaactctaatcccttgtgtggcgctaatggccacaattgcgttatggtagctgtcattaactgccgtttttcagctaatgttaacgaacgccgaacaacgatcagatagtctaaatcgctcacctgttcgttatatgagcctaaaacataggatccatgcaggtaaataccaacaaggtttgtttttaaaattgcggtggtcgtttgttgaatggcttgtaataaccgtggtgttgatgtcatcatcaaaccactcccctctaagtcttgagcttagcgatagccacgaagatgcttaatcaaccacgcttcgtcgaaaagcttttcccaatcacgttcgatagaaatattgccagtttgtttgataaatgagcgatgctgataagtttctaataacatattttctcccgtgaagatgtgttacggttcgtgcgtatcatatcatacaacgcactaaagaaaataacggactgccaagtgccagttgtttcacgtgaaacatcctacttcaaataaacacgagtcagcgcttcgcacaatttttcattacactcttgagcgttatgaatggtctgcaaaacttgctgctcgtcaccttgtggctgtgttaacaccacccacacgtcaacgttcgcttgatgaacatcatcactcaaatgtgtcggcaaagccgttgaactttgcggtgtgggtagattaatttgttgtaacgttaaaccaagttgatcaattgccttaattagcgccgccactggtgcttgcattggttctgccaacgtctcacttaactgtcgaaagccaccgctatctcctagtgtccagttgccactaaagccaaccgcgtcaatagggtcatccgtccgacgataagtcacatatcgaactggcatcggtccctgagccaagagtccgggcatcgtttccaagttcgcattgatctcagctaaaggtaattttcggaaatcatggccgactagttcgtaacgaccaccaaccaattgataatcaactagtcccatcgccttaatcaggccagcttgcactttgaaaccatcgtaaccaacttttaacgcatcgaacacatcaatcgcttgcgcgtcggttcgaaaaccaaagtttggccccgccccttctggataaacgagattacattgatactgaaacgacatgccgattacacctaagtcttgattggcccgcttcgcttcatcactaaattcaccgaaataaccggctacaactctaaagctcatgtttagccctccttaatcttgtcaccgcaatattgaatccgtttacattattgatgtcattataatttttattcgcgcataatgaaagtaattaatgcttgcagccgttattaaaagccacgcaatcaatgccacgcgacactatattaatcctcggtttatttacgaacatcgttttctgtttgactaaatttatagttgaacaatatttttccagctcttgacaactgattttcaaaagcggtatactcacttcaacaaaatatcgtccttataaaccaatgaggtggagatcaagattatcgtgcccgcacagagagtcatcgttgctgagagtatggccgaacgcaggtaattaaatggaccaccgagggctttgccgaaattaacgtcagttgagagtacggaaagacgtgcgacatacgtcagttgtcagggaaatgttagtttcctatggagtaggagtgtacgcgtgatttaatcactaaattggcgaacactcaattaaggtggcaccgcggttatcaaaccgtccttaacacagcattggctggataaggacggtttttttgacgataaaaacggggtgaaataaatggtcacgaaacgatggcaaaactcatggatcaaactaaccaaatacaattatatttttggaggatttaattatgagtttatccggaacacacaaattaattttaacaatcggcagcgtggctattattggcggcatcgggtttaccgtcaacgcccactcgcacccagctacgactaaacaatcacaagttatcaatctatcagctggctcagaaattatgagcttagatcccgctaaaatgacggacagcgtttctaatagccaagtcacccaagttgacgaggggctctatcggctgaacagtcagagccaacccgtcaacgctttggctactaagacaactgtcaccaatggtggtcatacctataccattcaattacgccacgatgcgcgctggagtaacggtaacaaggtgaccgctcacgattttgtctattcatggagacgaactcttgatccaaaaaataaatctgaattcacctatgtcttcacaaacattaaaaataccgacgccattgcagccggcaagaaaaagccatcaacccttggtgtcaaagctaatggtgactatcaattaacaatcacgttaagcaaacccgtcgcctactttaaaaagattttagctgtttcgaccttttatccggtcaatcaaaatgctgttaacaaatacgggaagaagtacgggacttcagccgcgacgaccgtctacaacgggccatttacgcttactggctggaccgggactaataatacgtggaccttaaagaaaaatccagcttattacgatcacaaactggtgaaactgcaccaaatcaattatcaggttattaagtccaatacgactgcctataatttatatcaatctaataagttagatagtgtgacacttaatggcgagcagagtgtccagaataaaaataatcaagaactcaaaacacttgcgggtggtcaaatcagctttattcaatacaatcaccatgaccatgtagcagccaaccgtgaactccgcaccgctttatccttagcaatcaaccggtcgcaactgaccaacaaagttctagaaaatggttcgcttccagccaaaagctttggtgtacgcaatatggctaagaatcctaaaactggtaccgattttgtcaatgatgcgaccgttgatggtactgttaattatcatctcaaccaggctcgagccgcttatcataaagcacaacaacaattgggcaaaaaatcgctaacgttaacgattacttgtggtgatgatgacaactcacatcaggtcgctgaattcatccagggacaattgaccagtcacctccccggactaaaggtaacaatcaaggcaatgccatttaccgcaatgctaggtaaagtttccaagggaaccttccagcttaatttaactagctggagtatggattttgccgacccttcacaatcattaacaattttgactggcgacagcaactccaacatgggccactatcaaagcaaggcttacgaccaggcaatgcaagccgctgatggtccagatgctttgaacgcgaccaagcgctatcaagacttagttcaagccgctaaaacggcgctaactgatcaggccgtgaccccactctacgaaggccgttcccatctgctcgttaagtcgcacttaaagggcgtcatctataataatttcagcggtgccgccaattatcggaccgcatatgtgaagtaacacctcatagttgctcctaaaattacccgaccaaaaagcgtttcaagaccatagcttaacctaagccggccttgaaacgcttttagtataggaatccagtgttaattaaaagtcagtgtttgcttctcgccaccaacacccgcgtcaacaaaaagatcagttagttttaattcaaaaacaacgagtgtcgatccaatagcatcccagacttgttgataattcggaactgtttctaaatattggggtagcaagtcggtcatcgtcttagttgaccgttgtaacttaacgtgttgggctcgtagatatggattgcccgctgttccatcattaggaatcgtaatgaatgcaatatccggattctggtcataaaccttcaaagcgggacttgtcttaactgatgagaagtatagcgtatctggttgtgcttcgtaccagacaaagttaacaattttaacatctgcttcattattgacggccgtgctgagggcaatcttattagttgattgaaccacttgttttaatagtgaaatatccataccgacaaactccttttactcaattagtatcataatttcattataccgcaattgatagttttaggaacgtacgtttgtctaatgtgctatcatatttctatagcttagtttttgctttaaatgctatcaacattatttataaactgaacgcttcgaaagtagtgaccttatgaaaatcatcattgcacctgcgaaaaaaatgattatcgaccaagatgcctttccagccctaactgaaccaatctatcttgatcagacgcaacaattactggctcaactgcaacacctcacctatcctgaggccaagaccttatggcattgcagtgacaaactagcccaacctaattatgattggcttcaaaaaattgacctgacccgcaatctgactcccgctattctcagttacagcggtattcagtaccgttacatggccccggacgtctttacccagccagcccttgactatattcaggcaaacttacgaatcttgtcaggcttttacggcattctccgaccgtttgatggtatcgttccttatcggttagaaatgcaagcacggttggctgttggtcaagccaagaacctctatgcgttttggggcgaccgcctctatcaggcactgactccgcggccagaaccaattatcaatcttgcttctcaagaatatgctaagaccattgcaccttatctggctccgcatcaatcaatgattgatattgtctttgcaagctttatcgacggcaaactcaagactaaagccacattagctaagatggcacgtggggccatggtccgttttttggctgaacatcaaatcgatgatgtgacggccattcgcacatttgaccatcccgattatcaatttgacgagaagcgctcgacggctaatcgattcgtctttatctatcaacattaaacatcatcacagcaatcaccaaagcgcccgcagaaggctaacttccacaggcgcttttgtctactttaaaccttttaataaccattatagtgacagccaaacaaaatcagatcacaccgataaacttctcaatctagctattcagcaaattatttcccgggaaatgattacgctcatttctctaatcatgggctgctagccagtgacgcaatcgcgtcatataggccgtggtttcatcgataaacgccatgtgacggctacggggaaataacgtccaagtcgcatgaggtaactggtcgaccatggtcttagcgactaatggcgtacacaaatcatccgttccactggtgactaaagttggcatctgcaaatactgtaatcggtcggtatactcataatccgctaacgtaccagtcggattatattcattgggaccccacgctacattataagccgtggtccccacccgttttgatcgccgtagaaattcaggatcatcagcagtaatcgggcccgacgcatgttgcgtcataaaatgttgattagcagtcaggtaggcagcacctgtgaaatcctgtaaccgttctgctgtcgcaatagccgactgatccgctggggacattaaccgaatcatccgatgctgttcctgagcccacagtcgggctgaagacaaggtactggctaaaatcaaacttttaatcccctgtggtcgatagtcacaaccataaataatagctagcataccaccccaggactgccctagtaagtgaatctcgggtaagtctaaatacgtacgtaacgcctgtaactctgccacccacgttgcggcttgccataattgatcgtcatcaggtatcgatgaacgcccacagcctaattgatcatacatgacgattggtcgtcccgtttgaacggccaggtcatcaaatccttcaaagtaattatgcgttgatcctggaccaccatgtagcaaaactaacggtgtcttatttgattgccgatcccctacgattcgataatacgtctgataaccattaaatggcatgtatccttcttgcacgtccaaaatatcactcactttcgttactaattttttacttgttacgcgttatgcgttatgctagccgctatttagcattagccttgattaaaacgtgccaaacagatggattcctgttcgtcagcaatgcgtgtccgattccggcctccggggctgggtgacaattgctggaacgtaagccgacgtcgattagagcccgtgcacaaaccgcccggtctcaaatacgagtcttattctaagccggaagcaacccacttccgactaagaataatttggctactgagcattgtcacccagctcctccagtcggtaagccgctcgaatggctgatgaacagccactgaactcagtacaatttgtcgttggctattttaatactgaaccctttaagttaaatatcagagtgccttctccactttttcgaaatattcaattattactacggtaattcagaaatagtgagttatcacaagaccttttcaatctgacagttgattgataaaattaacgtttatgaaaaacaacgacaaattcagcaaaagttgggtatatccttgtcagccattcgaacgctatcccgactggaaggcgtttctgacaatgcccagtggtgaaatttcacttagcaagcgtcctgtgcttggttagtgaaaggccagtatttgagacgtggttttttcggctcagatctgtgcccaccacgttccggcaattggcagaaatgcctggaggtcggtgtaggacgcgcaccctaagcaagtttacgctaactcgaactgttcccagcgaacctaagctggctgcttttgaatttaaaaaatggcacgttttaatcataatcgatgacaaattaactcgcacaatgcgtacttattccatcccaatactaatgtccacctgaaaaagtgaaaaacttaattccattctaatacaactcaaatgacaatggtgatgtaagcgctacaatagaagtgcagaaataatcagaaacgggtgaataatgatggtattaagtattattacagtattaggaatgggattaattgcagccactggtgtgcactttatcaatggcgcacaagcgatgcacgcaggaacggtcggccatcatgttggtcagatgccagctaaccttcaccaaatcgacttacgttaatctcttaaaaattcacgttaatttttagtattgccgctgaaacactgggcaatgctttttttgtcgttcctttagctgaccgtccttatcagtttggtgccttgagcagcttgacagtcaagcgtatcattaacttatattatctttctgttcgtctagtcacgcttcgaccgaccgttcagagaaggagtgacttatttttatgaatgatttatttgagaaggccccgattcccaaagcgtatttccatttagcctttcctgtggttcttggcatggttgccagcatgatttataacttagcagatacattttttgttgctcaaactggtaatgctgatttagttgctggtattgccctcggcagtccgctattttcgtttatgttagcagttggtgatatttttggcctcggtgggagtgccgttatttcaagagtccttggccgtcatgattatcaccaaagtgcacgtatcagtagcttttgtttttacattgcgatcgcgcttagcttagtactgacagccttattattactattcgaacaaccaattttaggcttgctaggtgctactgcagctacccgtccctacattgcggacttctatcgtatattggtattaggatcaacctttatcatcgtttcactggttcccggtaacattatccgaacggagggtctggcacaactttccatgattgcgaccatcagtgggacggttctgaccattattctcgatcccttattcttatttggctttcactggggtgcttcgggcgttgcttttgccaacgttttggggtacgcggtcaacaccagtctgttagtcttttttatgcgccgagccaaaacgctctccttagcaccaaagttagcccatatctcgcgaccaacccttaaagccgtcgtcgcggttgggattccagcctcactgactaacctaacccagagttttggcatgatgatcttaaacagctacttagccgcatacggcgcccaagccgtggcggccatgggaattgttcaaaaagtttacatggtcgttatgatggtcatggtcggctttgcttttggggcccagcctttagttggttacacgtacggtgctaaaaattggcaaagactacgggcaacgttgcgcttcgatttaaaagtcgaaggtggctacgcaaccatttgtgcgattattctaatgatttttgcgcctcaacttattaaactatttatgaatcaaccagtcattgtcactatgggtacacaaatgttgcgagcaatgttgattacgacaccattagtgggcttcatcctcgtgttcacgaccgtctttcaatcagtcggtgcgggtttgagtgccctagccatggcgctttcgcggcaagcaatcttactaggtatcgccatcgttattctggcacagttctttggactaactggtattatttgggctcaagcggtcgctgatgtcttaacgtgcttacttggctggttactttatcggcacaccttcaaagatattcaagtaccatcctcaaattaataataacgatatcatgtcgttagctcactgataatcattaaatggcgccatccatttcaagtactggtgattcagtgcgctgaaatgcataagtgaactaaaagctggtacttttggaatgagaggcgtcattccaaaagtaccagcttttttcactctgattcatttttttattcgtctacagactgagtatgggctaaatcggcttctaatgacgcagtgagtgccttcaatagttttagagtcgccgtcatgttagcgcggtaataacgttcagtacctgttttgctaaccgctaaaatgccggcatccagcatcaacttcaaatggtgcgatacggccggccgtgataaggcgatttgcgctgtaatttggttaaccgtcatctgatcagtccggcacagcatcaccaaaattcgttgccgattttcgtcttgaagaattgtaaaaatcggaacacccttcttaaatattgccatcgttcgttctgccaaaaaatcacacctttccaattacggttcgtattcttaaaccatttaacgcttgctaaaattgaaagtcaagaattaatcgttgactttttgtaagtaagcgactagaatcaacagcatggtttgttcaagatgttaaacatttaaaccaatatgttaggagtccactatgaaagctgccattattactaaatacaagcaaataacccccatggtgacagaagtccctgttccgacaatagctcccaccgatgttctcgtcaaaatcgttgccgccagtgtcaacccaatcgatttgaaaaccaaagatggcgatctaagattgttactacaatacaccatgccactaattatgggcagtgactttgccggtgtaattactgccgttggcgaccaagtaccgggctttaaagttggtgatgctgtttacggtcgcgcacccaaagatcgaattggaacctttgctgaatttatcgccattgatcatcaagccatcgcactgaaaccagccaatctcaattttgaagaagccgctgcaattccattagtaggtttaaccagttaccaagcactacacgatataatgaacatccagccgggacagaaggttttcattcccggcggttcgggtggtattgggattattgccattcaactggccaaatatctcggcgcttacgtcgcaaccactaccagtgcgaaacattttgacctcgttcaatcactaggtgctgataaaatcattgactatcatcagcaagactttactgatgtattatcccattacgatgccgtattagatactcgtggcgggcaatccctcgaggccgcttttcagattatcaaaccaggcggtcagattgtcagcattgccggactgccaaacgcgcgttttggtaaggattacggactgccaatatggaaacaatggttattgggtctagcaacgcggaaactgagtcaactggaacaacaagcccaagctacctattcgtttctgttcatgcaacctagtggccagcaacttgtacgcctgcgacaactaattgaacaggacgttattaagccagttattgatcggattatccccctcaccgacatcaacgacgcgttagaatactcgcattccggtcatgctaccggtaaaatcattatcagtattcaacctaattagctaacttcaaatcaatctttttaaggagtcatgatcaatgaaaaaagttttaattgtcgaaaccaatatcactcgttaccaaggaactaatgagccgactggtctttggttaggtgaagccgctgagttcgtcgatgaaatgcagcaagcccaaattgccgttgactatgttagtcctaatggtggcttcgtgccccttgacccgcgtagtatgaaatataccgatgccgccacaatggccgtgtatgaagattctgacttcattaatcgggcccttaagaacacgctcaagcctagtcaggtcgatcccgatgattacactgctatttactataccgggggccacggtgtgatgtgggactttccggacaaccctgagttacaagccatcgcactggccatttatcaacatggtggatatgtgacctccgtttgtcacggaattgctggcctcctaaacatcaaagaccaaacgggccaatacttgattgctggcaaaaccattacgggctttaccgcaactgaagagctgattgccggcaaaaaacggatcgtcccgttccttaaccgtgaacgagctactgctcacggtgctatctttagtcagcatcgattttatcgcgaatatgcaattactgacggccaattgatcactggtcaaaatccgttctcagcacgcgcggtcgcacgccaattgattgctaaactataaaaaaacgagcacaaggctcgtttttttgcgttaatcttcaaaaatccgctcatgcaaaacaccaaacggcgcatgatcgacataaatctgaccagtgtcgtgaaatccattacgttgataaaaacgctgggccacagcattatttgccagaacaagtagataattctgtggatagaccgcctttaagcgacggtgggcctggattattaattgctgaccaatgccatgatgatgatagttcgggtgaacatatagcgaatacagttcgccccacccctcatagttcgcatgtctggccggaccaaatgtgcaaacacccacaacttcaccatcagccgtcattgccagcaacatattttgccaccgccgttccggccgccaagttgctggcgtcaattgctgtaaataacttacaggcatcaaatcacgatatgctgattgccaggtctcataatataactgtcgaatttttccaaaatcactgtctgcttcagcgcggacgatccgataggttagtgccatcagcctgaccacctttcaattcaagttgtccctaagtgaggcacattttatcatttatataaataaggtacccaccaactattcataaagagcatcaattagatgaatgtttcacgtgaaacaaaaaacacagtacaaaaatgaatccagtacaacatgttcattttgagtttggtattgacctgaactatggccgaactcgtcgcatatttaacacgtttggcagaattacggccgtaataataatgaccacgccaaccatttgcacccaatcaatagtttcatcaagcagtacaaatgcaacaacaatcgaggctggtaattctaaagaagaaaggattgggccaatgccaagctctaagtacggcataaacaatgaatacataaccagtgggaaaaccattgagaatagtgcaatcagtactccccagccgactgttgctggcgtggtgggtgccgtaactaattgcggtgaccacacgatagcaatgagtatgaaagcgcccaaacacagtaaccatgttttcgataacgggtctaagttattgcctaagctagccgtaaactgcatcgtgcaagcatacgagcatgccgctaaaaaacttaatatcaagccccacggcgagagcgcctgcgtaattggaaacagaccagcagctaaaatcgtgcctatcaataccaaaataatgctaaccacttgcagtcgggagggacgccgatgatgaatcactgctcctagtaatgttgataaccagaccgcctgcatcaacattaccgcggccacagcaactgggataagctttaacgcctgtatgtaaaaggtgttagtaaatcccgaagccgttccagccgaaattaccagtccgatttgcttccaattcgtttgctgattacgcaaacgtgcacggcgtaaaatttgaatcacacctaaaatcacaaccgcactcagaaaggaccagaatagcaatgggccattgacaaccccctgccgacgcgcaattttaaatagtgacgccggaattccaaaactaatggcccctaagccaacgaacaggggcgcaattttcttcacattaatcatcctctcgttgacaagatatgttggagccgggcacgataccaccagtctggcaagcccagtgagtagcgcatcagcatctcaccaataatttgcacaattgggcgtcccggttgtatttggcgttctaacaagctgtcataaaagtccgctggggcactgactaagtgcccgttaagattgacccgtaacggcgcattttctaccacgagcgcttgccattcataactatgagcacgctgttcgtcctcagaaacgtcttgtgccaactgtaagtaatgcgcaatatccgctggcaatacttccgataaatccgacaaagtctgtaaagctagacctggccgagttatcacttgacttagcggtaccatcacttgtctcaattgcgcgtctgtgtctgctaactgctgacacaaccagtcgaatcatcgggcatggtagaccaccatactcgtagcacgcccccctgctcaacttgagactttaatattaccaacgcttgcttgacaaccgtggcatcggtactgtgtgacatgatagcaagctgtgctggatcatcagttgtcaatcgagttaaatcaccgatttgtaacgacaatggcaaactcaatactggctggtgcaactcatgttgcaaggttaccgcgaacgtcgaattaaacgtcacatccatcatctgactttcctcaatttctattttgatggcgccttaaaatgtgctaattccgcatccgaataaacgtacgggacgtgcgccatctctggcacttgattccaagctaccggataacccgcaccatgtgcgcaaaagaccgagtccggtgtattttctaaatctgctgtggggacatattcggtcttatcgacaacagccatctcgttatgacacggccgatagccatccacgatacattccaattgcccctgcccatgcgtgtaagctcgaaccgtctgtgaatagtcctgcatcgctgctactggcgccgttcccgtaattgtcgtcaagtcagtcccgtccgtggctacgcttgtattagcgaccggtgcgtcaaactgaccattcatccgctgaatatcagtcatcgcccggccaacttgttcctgaccaatttctagacggaaccgataccacggctccaacaactgacaatcaccacgttgttttaacatcatcaagccttgacgcaacgcgcgccacgtcgcttcacgaaagtcaccaccaaccgaatgaacattgctagcccgaccactaaccagtgttaccttaacatccgttagtggtgcgccaatcaggacacccacttgtgttttggcttgtaggtttgacacgacttggtgttgccaatttcggccaagcacttccaatgaacaatcggtcgtaaattgaagcccacttccccgcggtgcgggcgtcagcaacaaatgtacttccgcgtagtgtcgtaacggttcaaaatgcccaacaccttcaacagcttgggtaatcgtctcttgatacaagatactccccgttccaaactttacagtcagttgaaaacgatcctgcaagatttgttgcaaaacttccagttgaatcgttcccatgacctgtactcgcaattcctgaagtggttctgaccaagtcacgtgtaattgtggatcctcatcttcaagttgacgcaaggctgctaagcaggtgtgtaactcctcacgctgaggatcaagtgcgtaagtcagtacgggctgcatgacgggttgtagactagttgctgcctgtcccaatccttgccccggccgcgttcccgttagaccggtaatggcaccaacggatcctgccgtcagcgcggacgtggtcgcatacttagtcccgttgtaaacccgtaactgattgactttttggtcatcatacacgatatctttaggtcgtaaggtgccaccggtcatccgaatccaagtaagccgttcaccttgatcatcgtgcgtaatcttgaacacccgcgcgccaaattcaggacgcgttaattgtggcgtcgtccaataatcaagaccagccattagcgcatcaaccccgtccagcttaagtgccgcgccaaaataacacggaaaaacttcccgccgttgaatcatctgccgaatcgtggcatcacttaacgtccctgtttctaagtaatccgttaacacttcgtcattttgcatcgcaatatcttcaactgccgcagtcggtatgactggccgatcttccaacgtgtccccggctcccggcgtgttaaacgccacacaaccaggcgataatgtctgttgaatttgttgtatcaattggtcgctatccgtccccggcgcatccatcttatttacaaacagaatggtaggaacgtcataacgggctaataatcgccataacgtccgcgtgtacccctgcacaccatcagtcgctgaaacgactaaaattgcgacgtccaaaaccgacagtacttgttcagtctgggtcgcaaaatcgacgtggcccggggtatccaagagtgttaaattaatgtctttatattgtaaattagcttggtgtgaaaaaatcgtaataccacgctgtttttcaagcacatccgtatctaaaaaagcatcgccattatcgacgcgccctaattgccgtagcgcgccagaccggtatagtaatgcttctgacagcgtcgttttaccggcatcgacgtgggcaataattcccgctacaatccgtttcatattgggctcccttcacgattagtgaatcactgcttccagtataccggttctcagcactgaacggctagtaaaggtctgccactaacgttaaatatgcatgaattttggcgtgttttagtccaatgttaatcaccaaaatcaggctagttactttccatagttgcgatcactttaaagtagtggtgacccatttcccgtgcagtatcgcaaaaaaggtatccgtagcctacaactaccgataccttaaaatcattttcagacttaatcataaaaacgctcaaaagctgccttcaggtccattttggcttgctttaatgcctgtgataccgccaccccgttcgtttgcagtccttgtgcacggacaatctcaaaccggtcaaaccccataatttcagtaaacatcttgtcaagatacagccgagaaaattccatgggtgtataacggtcattacgagtatagattgacccactggcctgcagtaacatgacacgataattatcggtcatcaaacccactgatccattttcggtataacgaaaagtctccctggcaactaagatattatcgatatagtcctttaaccgtgccggcacgttgaaattatgcaacggcatcgcaatcacaatccgatgatgagctttaaactgttgtaggagttgctgattgattgcaaacaggcgttgttcctcaatcgataaatttacatgttgcgcttgcttttcccagattcccagcaattcaggtaccgttgcttggggaatcaccgtatcatacaaattgatcacatccacagtatcattaggaaagcgagtctgaaaaagttgcaaaaaagcttgttctagttgaactgagtagtgcgccgcattacgaaaatcgggatgtgcattaacaatcaaagtcttagtcatttaaatatctccttaattaataatctatttattggttgtttttgacaacagttatatactacagtcgaaaggtgccaatccatgtcaccattaaaatcatttttaggagttatttatatgaaccgctctgaacgtcttaatcaagaattgatctttctcagttaccgacaagaattccacatcaaagaactcatgcaagaattcaatatctccaaacggaccgccttgcgcgacgttaactcgttagaacaacttggtttgtccatttacgttgaaccgggacgttacggtggctaccaaatcatgcaacaacaactatgggtacccatcttattaaacagccaggaaattaatgcgctcttttttgcgctcaaagcactcagtttattgtcggcgaccccctttgaaaagtcctaccatacaatttacaaaaaactcatggcaacactatctttaagcaaccagcgccaggtcgccaaattgcaacgtgtggttaactactactcaattcctaacttggatgccccaacccatttaagtgatttattaacggctatccttgatgaaaatgttgtccagttaacgatgactactgtgacagctgggtttcagatttttgatttattatatcggcatggcatttggtttttcagtggcgtcaatctcgataacaatgcttggggcatctatcgctgtgatacgatcaaagcatttcaaaccagtgagcaaccagctcggtatacttggaaacagctcgcgcaacggcaacggtcctacgatcaccatcatcacaatatacgttataaatgtgcactaacacctctaggccgtgaacatgtacaaaagaataattatcctaatatgcacttaacacatcagaacgaccaagattatctcattggtggttataatcaagatgaattagcctatatggtcgactatttactgggacttggccgcaacgttagaattatttatccggaagcgttaaaaactgcctatctgcaagaactgcagcaaattcaagatttctattaacgtttggttttctgaacaaaatgtcggtagccccgtcaagggctaccgacatttttactaacctgattattctcttcttaactgctttattcagccgtaatataattcaaaattgcattcagaacttgttgattctctcgtggtaccggcgtttgtaaaatttctgctgctgtttggtttaggaccgaccccgcaacataccgataatcattaacgaccatctcacgaacattgtccgcagccagctcaaagtgaaattgtaaccccactacccgatgcttccatacgaagccctgattggtcacacgatcactagagaacaacagcgttgcttctgctggaacagtgaacatctcctcgtgccaatgcaagaccgacagttttgctggaatccccggaatcacgggactctgtcggtaaatcggtgcccaacctacttccttagctggcgccttagtgactgggtatcctaaggtcttcgcaatttgttgcgcgccgtaacacgcaccaaacattgggatatcgcggtccaataattgttgaatcaagtctcgttcctgcttgatccatggcagcgtatcgttgggactcatcggtccgccgaggataacaagcatctccgtctcatccgccgttgggagaacaccgaattgatacgggtgatagacatacatggtatgaccatgggcatgcgcccaatcagcaatcattccagggccctcattgggggtatgttgcaacacattaattcgcatgattagtcctttccacaacggcaatgtttggtctgggtatcgcctgcaattacccaagatagagtcattataccacgctaattacttgagccatgggcgcttatgttaaacttaaaaccgatcataatttagaggtgataataatggacgtccaatcttttttcgaacaagctaaaacgacgctcaaattgacacaaagtaccccattacaaagtgcttatcagtttggcagcgatcctgataaacttgcacagctcgtactaactggcacaaaagcggctaccaccagcgcttatgacctatacgaaactgatgaaccactgccaaaagtgggcgcttatgacgtcatcttagatgctcataatcagcctgtctgtgtgacccggaccgatcaagtcatgattacgccttacttggacatcgatgcaacccacgcttacttagaaggtgaaggcgatcgtacttatgcctattggcgccgtgttcatgatgccttcttcaagcaggagtaccaaagcgagcatcagcgctttgatccccatactgcacaaatggttctggaacgcttccacgtcgtttatcccgttcactaaaaatagcgttccaatcggcactggtgaattcgcttccattagtggtatattggaatagaactttcattagggggaacgacacatgcatactatcgaacaactcaatgacgggcgcgcggtctatctaaatggtcaccgcgtcaatgtcgccgatgtgcccatttttcgtaaaactttagcactcaataatcagtactatgacctgcaacacaaccatcccgaagtacatacttatcaggaaaatggtcaccgctacgatattgctttcaaagtgccacgcaccgtcgctgatttacaacaaaagcaccgtgcttatcaagaaattgcgcaaagtaacagcggcatgttaggccgcacaccggattttcttaatactgggatggccgtcttagcagaacgcgctgccttcctcgggcaaaatcaatatactgattttgcagctaatgcccgcaattacgctaaggaggtcaaagctaacgatatcttcattagccatgcgcttcaaaacccacaactcaaccgtcaaaaagccatcaatgccattccgtctggatacgcgggtgttcataccattgaacgtaatcaagatggaatcttcgtttctggtgccaaaatggtcaatacgatggccccaattgctgatgacctcctgatttttaatccgccggaactgttgttagaaaacggcgatagtagttatgctgtcgcctttgctacgccactcaataatccgggcgtcaagatcatttgtcgcaaattattagatcatcccaccgcttccattacggattacccactcagcaacgcccttgatgagattgacgcctacattgtctttgatcacgcctttattccgtggtcaaaagtatttgttgaaaataatgttgaaatgagtaatcgtttcttcatcgattcaggcatgtttagccacacttcccatcaagatgaggttcgaggtattactaagcttgagttagcaaccagtttagcgcttcggattgctcatatcttaggattagatggtttcttaggtgtccaagaaaaactcggtcggttaaccgctaatctggaactcatcaagggtaccatcacccgttcagaagacaacggtcatctggacgaattcggtatctatacgcccagtctccaagctttgcaagcggttcgctcgacccttcccgaatactatgacgaggccttgcgcgtgactcaacacttagcggccggttccatagttggcgtgccaagttttgcggaatttgacggcgataatgcgacaatcctcaaccaggcactcacgacggaccgagccaccgctaaaacccgcacgcgcttgttgaacttagccttcgatttaacaagttctggctttggtcagcgccaattgatgtacgaatactatcatggtggtgatccaatgcgtattcgtgcccaacattatcaacgcgccgatttacaggctggcaatcagatgattgaccgactattgtcagcggacaacgcaaacacccatgaataagtaatcacaccaatacccaggttagtccttaagtgagtattggtgtgattttttgcgcctttatattattgactatttagtcaaatataattcgcgtaactgttgacattccgctgaggtcagccctagacccgtctgcaagtaatttgaaaatgtgtcgtaccgggctttgataacttcaaagtaatggctcaggtaatcagcgtctactaataatgcctggttcacggcccgttgttgctcatcagataattgcgacgccatcgtcgccaagatttgttgattagcagctgcacgtgcttgatttgtgagcagatagtcagccatgatttgctcgtcactaatacccaaaatttttagaaataaggcggccccgacgccggtgcgatccttaccggcaaaacaatggaacagtagtggctgatctggaaccagtagtagctgtataaattgacaataactttgacgggcagtaggatctaacgctagctgttcatataactgaaccatgcggtcatggaccgcccccgtactactaatcatcgattgtaaacttgcgtcgttcgtcatgacttgtgctagcacatccagcacgtgatactggacgtgtggccatgtcgcatctggaaattgatgacgctcatcagcactacgcatgtccacgattcgcgtaatgccaagcgtggttgctagatactgcgtctgtgccggtgttaattgatccaattgtcctgaccggtaaattaaaccatctttgattacttgctgatttttattgcgataaccacctagtgaccgtaaattagtaatcccttccatgaccaagccccctgctagattgataacttaattgtaaactgtcaccgttaaattttcagtcaaaggccatttaaaaagtcatttagtcaccagacctaactgagctggtgactaaatgactttttaaccgctaacttgatagactcaattaatcaaagtgtcgccattcgtgatccaacaacgcacgcgctacaaatagcccgagcggtaaaaacatgatgattaacacggccttcgtcagccatagtgaaccgacaccaatttgattattgccaatactataaattgcacgataaatatataatcccggaaccataattacgattgaaggtaccgtcaatgaaatccggggatagccgttataacgattaaccaccgatgcgatcaagccggcaacgagcgccccacaaaaggcggccgcggccggtggcattgctgtcaagtcaactagttcaaggcgcaatgtattcgcaatggccccaataaatcccgcggtaatggccatcttttgcgaactattaaacattattgagaacccgtaaacgccgcaaaaactagctggtaatcgtaataaaagtaccgctaacggtgaaagtcctagcggtaagaaatcagctggcttgaagctcaccagtgtcgcgactagccatccgacgagagttgcaatcagggtaaccataatcgcgtaagctaagcgctccagtcctgagcgcatatccaacttagagatatccaacatactcgtaatgaacggaaaacccggaatcacgaataacatggcaccaatataccccgcctcatgctgggcaagaatttggaaattatattcaaaaatcttaaaactaaccatataagccaaacacgccaccgcaacgctgaccgcaatcccggcaaccgtcgtcatcgaccgtttacccatcagcgcccgaacatagttaccaagacccgcgcccaaaaaggaacaaatcatctcgggaatacccccaccaagtaagaagataaatccactacaggctaagccagctgccaacccaagaaccagtggcgaatactgtttaggacgcgtctgaacttcatcaattgctgcatgcacttgtgccaccgttaaccgtgcatatttcgcatcaaagtctttgacaaactgttcaagaatatttagtttatccgtatttacaccagtatttggtatcgataatacttgcgtataactacgttcatgatgaaaacacgtgtactgaatcgaaatcaacccgatatctgccgagcacgttaaattcaggctgcgagcaatcttattcatcgcatcacgaacccgccacgctcccgtcccacacgacaacattaaaatgccaactcgaccaacaattgatgttcgctcttgtaagctagcatgcttagcgggaacatcttcattacggataaagtccttccatggaattgtcatatgatgtcgttgtgatagtggcatcaccgacttacgctctttattcatttcttcctccgtcttagatcgttcattatgttagtagctttcccccttattttaggctactaacatcatttatgatagcgattttgtcattttaaaagcataatgtttcacgtgaaacattagcctcatgatgagtttccccagcttgttaattgaactaccccctcaaaagtaaacttgattaccattcgttaatttaagcgtcacaattttcgccgctatccgcaatcatatgataagttaccgatatcatctaataaaggagcgatttgtatgtgcactagtctaacttatacaaatagtcatggaggccacttcttagctcgtacaatggattttaacgttgactttgagacccgtattatgttcatgcctcgacattaccgcgtgacgggtgaccttggtgatttcaccacgacttatggctttattggcgcgggtcgccaactgaaccatgaaattttcacggacggcgttaacgaatgtggtgtcagcatcgcagcactctactttccgaatcatgcaatttaccagcctcacagtaaccaagacaaaatcgatctcgcaccccacgatttcgtcgcctgggtactcggaaaaatcactagtgttgctgacttacgtgagcgcgtcaaagacgttcaattgattagtagcacggcagaattaattaacgaaattccaccacttcactttatcattagtgaccaaaccggtgaaaccgccgtcttggaaccaactagtggcgagcttcgcctgattaataacccagtcggcgtcctgaccaattcaccgaacctcaaatggcagctacaaaacttaagtaagtatggcaccctgactaacaccgagcggccactaaataaattcattaactaccaacctggttcacagggacctggtacgggcgcattaggtctacctggtgactatacttcgatgtctcgctttgcacggaccgtcttcttgaaacactatgcgcaagtgccagcgacaacaacagatacagtcaacttacttcaacacatcttgaatgctgtgactattcccaagggcgccaaagtagccgccaacggccaagcaacctatactgagtaccgtagctacatggacttgaatcatcaaacgtacgcactagaactgtacgaaaatccgggagtgattcagcaagttaacttaactgatcatttattagaaaaacagaccgttccgttagaatacgcccttagtcgcaccccgcacgtccaattactacctcccgatattgccaccttgccagtggcccattaagactttcagaaaagcagtaactcaaaaaagcttgcatcacaaatctagttgattttgtgacgtaagcttttcgtattatttaaacttaggctaacgcggcttttagattagctaaggttaattcgctcgttgaagtgaagttaacatccgcacccgtcaaaatggcaggatcaccaatcccaatcgacgtttcaccagcaccattaattgactgaataccgaccttagcatcttcaacgcccgcacattcttcaggcttcaagccaagcacttccgcgccacgttcgaagatctctggatctggcttaccgtgtttcaaggttgcgggatccacccgggcttcaaagtaatgcgccaagcctaactgttccagaaccaatggtgaattcttagaagctgaggccaaagataaacgatacccatgcttggcgagatcggctaagaagtcttcgataccaggtaaaattgcagttttatccattcccttcaacaggttcagataattagtatttttcttggctgcgtaagccactttttcagcttccgtatagtcgttttccttaccacccgtttttaagatcaagttcaacgagtccattcgactaacaccctttaaattatcggcaagttcttcactccaggcaacgcccaactcgtcagctaattgatgccaagcttgtgagtgataaacggacgtatccgcaatcacgccatctaaatcaaatacaaaccctttaatatctgcaaatttactcattaatggttcctcctcgttaattaccagcacaattgattgctgggtaccggacaactgcgcaatcatcaatagatgcgccaagagtgacggttacccgtcttgttttgaagcacaccgttaatgttcacttaacattataaaacgctttcagtttcaatgcaaccggttgcatagcgattttaatgacgattgttgccaatcacacgcctgcccgccgatcaaatcgcaatggcggccccattactgccgtccatcctgaatttacggatttactaataatgactgttccaaccatttttccacaaacggttgcacgcttttatgccccgcttaatcttgggtcggaattggaatatccggtcgatactggtactgatgctgggttaaaaattgccgtaatttaaaactagcagccaatttaaagcacgtttccgcatcccgtaaatcgcatccggtcagtgttgtgatatggtgcagtcgattacgcagtgtatttggatgaacgtataattgcttagccgtgcgggtcaaattacaagtcgcccgtaagtagacatctaatgttggtaccagttctgtatggttttgctgatcataggctaacaacaaacgtagggctggattaataaagaacggtaagatctcaagatgattaactcgtgccaacgcaagattatagaattggtcttcacaaaaaatcacccgaccacggccagtcttcagttgcgccgttcgttcacaaactgtatacgcggcaaaggtatcttccggattaacgtagtgctgagacacgatcaagcggcaatccgcttgcttcgtaatttgctgcaacgttagtttaaattgattctgattatatgcgaccagactaattgggatcagtgccacacattgttgctgataagtcgaaaccaacacttgtttgaatcgtggcatcatcaagtactgtagtcgctgctgtaaaatcatcggtgcttgatcagctagtggttcgcagcggattaacaccatggctgtcggtaattgcacgtgttgttcagcaaactgatcagcaaacgttcccccttgatgttccgtcaataataagtttaataaccggtcccgttgcgattcagctgttggcataatctgatttttaactaacgagccagcgataacctgaccaatcgaattgatcagtagtgcttgtcgatcattcagtggtttattgagtgctggcatcaccaaataaccgatcggctcggtgccatttgctaacggcgtaattagcatgggccccgccgacaactgatcttccgccacatagacttgcgttaaaaaatccggcgtatccggtgcaaatccgtggtctaacagccagcgtccgactcgattcgtctcaactgcagcgtgaatactagtcccattgagttgcgtcgtatgcgaccgtgtcagaatctccccgttcagatcaataatcgccagcggattctctaataagtgtactgcttgggccagtgtggtatcaaaatccgccgtgattgcttggatagcgagctgattgatggctgcttgaatttgaacatcgtggtgtaagcactgaccaagcgtcattaataatttcaataactgattttgtgccgcaatgatcgtagtcagaccggttcccagatttactagtccgaccgactgacgatggccgtgccaactataagcaagttgaactagctgacccgagtcgggggacaaatataaccggtggcttgctaacacttccgtcggatcaacaaattggacgtgagtaacttcgggattatgtgtaaatgttggatcgacagtcacctcaaacgttgtggctaactgccgcaataacggctttaattgcatactcaagtaacctccttattcacgcttgtcgccttcatcataaataatgtaagcgcttttgtaaagaggcctactgacaacccaccaccccactcgaaaggccctcagctttcttaggcccgtattcggacaaaaaagagcgggaatcccgctcttttcataaacctattaggctaagaaatcagtctgtgttttggcatcgtaccgagtcgtatggagcggttcttgcgctgctttcccgattgcgatccccattactggcacgtatcgtttaggatcaagacccagcgtcggaatcatcttttcaaagtcaattccggagaacgcattggcatcatacccatgagcccgtgccactagcagcaactgcatcccgacaacggaacaatcaatcgtcgcatcgaatttcaagaaatctggtgtggcattttcatataatggtaagaaggttcccagaatctgatccaagcgttccttcgtaatattcccatcctcataaactttgttccagacatcgcgataaacataatgcgactgggtgtcaccggcaataaagacgatggccgatgcactgtcgacctgtgggtagttgaatttcatcacggcttgtttgaacttagcctttgcctcgggggtatccacgacgacaaagtgccatgactgtaaattacatgccgatggcgcggtggctgcttccgcaatcatcttttgtaactcatcacgtccaattttaacgttcgggtcaaactgccgaactgaatggcggttaaacatcacgtctgctaaatcattgttcaccaaattttttactgcttctgacatcagctattcctcgctttcgtaatcggcctaaataatgtaagtcgctgccttgggattgaagaaactccggtcataccgacccgttaagagctttggcattgttgtcgcagcatcaacttcgtccaacttcagtgtgttaaacataactgacgtgtcgaagtgaaaccaagcggcaccgagtggcttcaagaccttcaattcgccaaatggatcatcatcggttgactccaactgaatacttaggttcccaggttcaacttgatcagctaaggaccgtaattgagtcgcaactaattggacattactgaaatggttcgtcccatcttcatgttgatcaatgtcatatttatagaagaaactattcatttcggcttccttacctaacgcgagctgccccgcaaattgtttcataattgacggatcattcagttcaccggccgtccacgaaacgttcagtaatgtcttgccatggcgttcgaccgtggctgtcgcactgttgtcattccggcgcaattcgatgtcatccgctaatttcttaggaatcccagcaccttcccgacctgcaatcacaccactctccgccccgggaccgtggagtaagaggttaatcgggtaagcgcccatcattttatccttgtagctaactaacgcaaataggctttcttcaaggtatggggcactaaaagtcggttttcccatatgaacgacataaccgcaaaccaccggtgccattaattttaatggtgctggaattaaagccttaagcaccgcttcgtcagtggcataagcaaacccaataccttcctggtcattcatgcttggtgctgtcaaaaagttcttaacatcctgatcacttgcaataaaacttgccatggtaaaacactcctttgtttgcgtgattagcttacatgataccgtccatgatgtgcacgtctggtgcgccatccgtcacgatccgtttaactcggtcttcaatcagtggattatattctggatgggtcaaaatgtagaaacggttatcctctaaggctttaaagacggtatcggcaatcgtatcaattggtttcccgttggtaatgacatacttcgcaaattgttgtccctttaagtacgcttcactttgataatacgggtccgttgggtcgctgtattgcgctggccggtgattttcagtgtgatagagatccgtctgaacaaagccagggcacatcacgtgcatgtcgatatcaatattagcccgttgtaagtcataggcggtcgcttcagtcatcccaacagaagcgaacttgctagcatgataagaaggcattccgggcgtatcaactaagccggcaatcgaagccacgttaagaatatccgcatgggtcttctgttgaatcataattgggataacgcgcttcatcgcataaacttgactcattaagttgatatgcatgatccattcccaatcacgagtcggcaattcccaaattcggccaggtagcgcgatcccggcattattaatcagtaggtcgatccgcccaaacttttccatggcctgctcaaccgcatcgtcgacactagcttcctttgtaacgtcagcggtaaccatcaacacctcggcacccttgtcgagaatatgttggtacgttttcttcaaagctggttcgtcgatatcaacaatcgtgagcttcataccccgatccgcggcgccttcagcaataacttgaccaaatccgtgggccgcacccgtgataaacataactttatctttaaaatctttcatgatgttttgcgtcctcctcgatgaaattgtgattttattaacttatcagtaaatattaacctgatgaccggtcatttatcttgactacgctttcatattaacccactaaatttgtttgagtaatggataaaagtactagtcttacgacgattaaactgtagcttttatacatgtgtgttggttcacaattataactaactaaagtgtggttccaactttaattagctcataaaaacgcatgccagcccttcttagcttacatgcgcatcattataattggatttattttcttaatactgcaaccgttcattgtgcacggctacgttgccgaaacattcaaggtccgtgccagatcaatcactcgtgctttgatctgatctcggacctgtcgaaatactagcaattggtcactaacactgccagtcgtgcgagccggatcaggcaatggccagtgtagcctggtcaccgttgccggagtgacggggcagcgatcccgtgcatcaccacacaacgtcaccacgactgcacactgattaagataggtcaggtcgattaatttagaaacctggtcactgatatcaatacccacctcgctcattacttgaacagctagtgggttcaggccatgtgtctccaccccagcactagcaacttgccagtttggtcccaataattgctgtgcaaagccttctgccatctgactgcgacaggcattgcccgtacataaaaaatatatttttggcatttcgccgtcctcctaaattactgacgataacgacactaatcgcgtatcatcaccaatattatgcccgcaagaatcccgcttgctccgctaataaccattaagatacaacatcgtcatgcgcgtaaccgcgatagattgctgtgactattccagcaatcgaataagctagccttaaccctcaagaatgcgctcactatatttttgtaatcgatttcaaaacgatttatactagaattgatattacaatattattctaaacttataaccagtccccctgagcagttactcatcgcgagaacggtcttatttcaactaatttatcggaggtcttttccatgacagtagcaattcgttatcaaactcgcaatggcaatacacaagcatttgccgaacaaatcgctagcgtggcaggtgttccagcacaatccatcgatacacctgtcgaacaagctgacacactcttttttggcggcggtacttattttatgaaacccgacaaaaccgcatctgcttttatgaagaaccttgatccgactaagatcaaacaaatcgtcctattcacaacttctggcggaccagaaatggtttcagacaaagccctgacaaagattgccaccgaaaagggcattcccgtcatcggccacttccaccaagtcatgggtggcaaaggaatgaaaatcatcggcagtactggcggcaagctcaaagatgagcagattgaactcgttaaggaattcgctcaaaaaatgttagctcaataatgatttgacggcgctcgcgttgactgaaaaagtcaatgcgagcgctatttttggattagtgctgaagacctaattagcccgtctaatttgacgtaggacgtcaatgcaccgctgctgattagcgttaggcaaaaaggacttccgcaccgccagttgcatgtaacagtgtaattgctcttgggcagctagtggaatccctacaacctgatcacttagcactacggaatccgcaatgaccaccccaacaccaacgttttgagcaactagaccttcgactaacgcgttggtagctgcctcgtagacgattttaggctgtatgtggccgcgctgacaatattgttctaatgctaaccgtggtaatgcgtgtttaggacgagcgatgataggcactccttgtaagtcagttgctcgaatcgtttttaagtgacttaatggactattgacattggctaagacctgcatctgatgttcctctaagatgctcacccgtaaatccgtggcacgttctgggaccaaagttgaaaaaaccgctgcgtctaacttgccttgccgcaagtcaactaacaattgttctgaatcagcaacggtcgttgtgacctggtctaataaatcaactgagataaatttttttatcacccggggaagccaaataccacccgcaacattggaaaatccgagccgaacttgctgctcattagcgtgatgaacttccagtgccatctgcgcaacgtcttttaagagttgcttagacttaatatacaaggtccgccccgctgccgtcgttactagttgggcccgatggttggcctgcgttagtaatactgcttggtattcttcttccaatcgtcgtaaagctgcagaaatagccggttgtgtgacgtgaaacttggtcgccgtggccgtgtaatttcccgtctcaactaatgaacagaagtactttaaatcgcgttcattcacgtcaacgcccccattcaatctatttaatacctaattttaacacgaaagatgcggcaaatcgtggtcaggatcaatcacgacttaccgcatctatattgctcagttagtcttaccaaaagcctaataacttggtccacagcaagcccccacctaaccagatgacgttaaaaataaccccaataattgcactcaatcgccaccactccgcactagtcacatagcctgtacttgacaataatgccgcgggcccggccgagtacggcgtcgttgacaagttgattgaaccagcaaatgccaatagtaacgccgctaaaacatggggaacaccggcaccaatggcgatggataaaaagccagcatataacgccgaaatctgtgttgaaacactcggaaacatgtaatgtaagtaaaaataagctaaaaacaggataatgagcacgctaatccagttcataccattcagtaaatgacctaacgttttggaaaaccatgggaaaaagcctagtgtcattagcttcttagacatcatcatcatgatcgataaccagactaaaatattccaagcaaaatgttcattgagcaaatcgttagtcgttaacacgcccgtaatcagcaaaataacaactgcgataaaacttacttcggtcgcatcgatgccaattttagtcccgatcaaccataaaacaatcgctaaaataaaggtaattgacataattttttcactagctgtcatttttccaagtgcggccaaacgcgtcgttgcccagcggtgcgcgtctggcgtttgtttcacctcagggggatagactttatatagtacccatggaataattagtagcgataaaatacctgggacacaagcagccataaaccattgcatccaagttaccgtgattccctgcatcttagctaaaccaatagccaccatgttgccagctaaaccggtcaaaaacaagcctgatgtaatattattaacttcatattcattaaaaactagaaatgagcctaattttcgctgtgtgccctgtttcggatcagatcccatttcacgagaaagattatcaataatgggatacataatcccgttgacccgcgcattattgctaggaataccaatcgccaatacggcatcaacaaaggataaggcgtatgctaagctcagcgtgcgcttgccaaataaactgacaaacagataggcgatccgcttgccaagtcctgatttaataaaaccagcagccatgaacatgcacatggcaaccatccacgccgtcgaattaccaaaaccagtagcgacttcgtccatcgtaaaaacacccgttaacgtcgcgacaacaatcccaatcagcgtgacggccatcatcggtaatggcttggtaatacaagcaataatcgttgccacaagaattgcaaataagtgccacgccataatactaattgctactggtcgtagtggcgtaactagccataacccaattcccaaaattagcggtaacagaaagcccttccattttatttcactcaacatctgcacttcctcctaatcttcatataattgttaagattttcacatatcttgccattaacggttgtttgccgtttttcaatatcaccataacttaatttataagtctgtcaatttaaatttagttgtagttgcttgaggtgtcgcaataaaacccgttatatacagcctacagggacctgtttgcgattaaaaatacctgaaattatcatagcgactagtgccttttatcggacacttttataaatagaatttataaaaagctaaaataaagtttgccacttgcttaattctcactaaagtttcgacaacccgtcaaattaatcacagcttgttatccttgtcacaatagcattctgttggcttcgttaaaattaacggttgttttttctaggtaactatttatattgaaagcgtaaacaattcgtatacttatccaactaaaaactaataaaggaatgttaattatgaaatatattgccttgattggtacggcggcacaacagtcttacaaccgtgaattattacaatttatgaagcatcattttagtcaacgggctaccattgacgttaatgaaattacagggattcccctttttaatgaaccaactcaaaatcatatcccggcgaccgttcaagccttaaatgataaaattagccaggccgatggggtgatcatcggggtacccgaatacgatcatgccattccggccgcactcaagaacgttattgaatggctttcttaccagctccacccctttgctaataaaccggtcatgttagttggtacttcccttggcgtacaggggacgtgtcgtgctcaaggtgacttacgcaatattctcaatgcgcccggagttgatgctcaggtactccctggcaatgaatacatgttaagctacgctgctaaagcctttgatcagaatggtcaaatgaccgatgtcccttctatcaagttcttggaacggtgcttcgataactttgaaaaatacgttaaggcactcaacggcacgcccgcgctcaatgtgaactggcacggtaactacgacgtcatcgttttaggctttggtggtgccggtgcttcagcggctcgttttgctgctgataatggtgcccacgtactagtagttgatgcggcaccatttggccgtgaaggtggcaacacccgatactccgcccaacacgtcgttacgggtgaaagcttagataaactaaccgcttattatcaagcactgggcgcgccattcagtacccctactaagacactcaacgcctatttaagcggcatgagtaaaattccagcatattttgaaaaatatctggggattaaagccgttagttggaaacatgatattaaacccggtgatgccgttgccatcaagaaaaccatggcggaatacccagaactagccggaagtgatacgattgactttgccctcgttcacaaacgtgataaagacgctgcattatggaaactactccggcaaaaagtccttgaacgagctgacaatattgacgtttggttggactcacgggcacaacatttgatccaagatcctaatactaaagtgatccaaggggtccaaatcaaacggggcgagcgactgcttaatatccatgccaataatggcgtcgttttagctatgggtggttttgaaaacaatcctgagttaaagcaaacctacttgcacagtgatcatctgacaccacttgggacgctctataaccgcggtgatggtatcaaaatggctcaagaagttgatgccaaaatgtggcacatgaccaattatgaatctcacggtatcttacctggaatcaccttcaaagaagacgccaatgaacggggccgtcaaattgaacactggcctttattaaaaaacggtagtattttcgttatcgctgatgacgggacacgctacttccaagaagacgctaagcaccgtcacggacacgtttacacacatggctcttggctaatcccaatgaataatcagcacccctacttaatttttgatcaaacccagtacgatgccttcaaacaagaagaaagtcaggctggtcagttaccgtatccgaaattcatgaccaagctcgtttccgcgccaacgattgcacaattggccgccaaattgggagttcctgctaataatctacaacagacggtaactgactttaatcactacacagaagtgggacgtgattttgaatttggtcgtgatccgcaaacgatgcgtcaactggacgatggcccttactatgccattgctgcggccaatgacgtcctcaacacgcaaggggggccacaacgcaatgaaaatgcccaaattctcaacgtcaatgacgaacctattccacgcttgttcggcgctggtgaattaggcggtatcgttgcaaactgctatcaaggtggtggtaatttagccgaatgtttgatctttggtaagttagccggtgaaaacgctgctcgtccaaaggtagatagtgaatctgtcaccgccaacgaagccaacggaattaatgaccttgttgatggcgaaacagcatctaatgttaaactggccgctgatcaatatctcggcagttccaatgccgggctaggtggcaaagttattgtgcgtgtgacttacaacgaccataaaattcaagcagtcgatgttattcaacaccatgaaagtgaagatgttggtttaaccgctatcgatcaaattccacaagaaattgtggcagccaactccactagcgttgacgccgtttcaggtgcctctgcatctagccgagctattaaagaagcggtccaaaatgcgctgaaacaagtcaaagattcagtcacgaattaagcacaattcaaagcgaatatgtatttgagaacatcacgtaactcacgagttgcgtgatgttttagtgtcccatggcgaaagtttcacgtgaaacattttaggacttacggtatttgatttccaaatataagttatgcaaggtgcctatcaaaacagacaccatctattgccaaaatcagcagtatccgttatactgtttatcgctgtggctataatcggccacaataaggagatgattaatgatgatggcatcattatctgtacgcaaaagtgctgctcgttagcgacacttttcgacagaacctttcagagaagtgtctggtttgaatctgaaaggaattatattatgcaaccgacaattaccacctatcaatacagttatattactcagcaagtcaatcagttaattagcgccgagctcgccgtaaacgatcttcaaattagagccgtcgtacgggcacaagctatcgagcggattacgccactgcttcctagtgacaatccaatcaccgctaatttcttgtcccatttgcaaacggaccggctaacccgtgccaaggcccctcaactacttgaaacgctaattccgctaattattccgtttccatccttgacgacaaagcaactaagcaagttgtttcgcaaggtcaaaaagttgaagcagcctgtatggtcacaattagcattacacgaattgacttacctaggttggaatgatggtggtaaccagaaaaagtatttagtaatcccggatcatgatcgtctcattggtatccagggagatttagcaccacaaacagtcaagggcgtctgtgccatttgccaaacaattggcaacgtcgcactctttatgtcgacaaccaagtcatctggtctcggaccttacacgcgtaacggcaattacatttgtcgtgacagcaatcagtgtaatcgacaattgaccaacccgcaggctttagctgactttttagcagttgtccgtccaaaacgataattaaataaaaatcagggccaccaagaacagctgcaactgccgttcttggtggcccctttcattaatcttattcggtgacactaatacaataagcgcgtgttggcgaatcactaacttcaattcgcagcagttgcgccccgttgtctcgcaatgtcttatcaatcttggtaaataaatactccgtgacattttcaacagttggattaacagttttaaattcaggtaagtcgttcaaaaatttacctgacaattcatccaacgcttgatacaagtttttttcaatatcgtaaaaagcgaccatcgcatcaaccgtgtgcaattcacaaacaatttcccacgtgtgcgtgtgcttttttccggagccagttgcccaccgcaccgcatggctagcgttgacataggacttaattttgtacgttcgttgtttagtcggcattgcccagcctcccctatcaggttcaagttaccctccatcttagatgaaacggtgtcggttggcaatagtgtctgctggtaaacagctggttttctgctgcaaaagtgagtctaaattagttgataatatgcaaaacttgcggcgtagcaactcggtcagttcgaaattgatttaacggtttttcaggcttctcatagcctaaagcaatccccatcgccactactttattcgcaggcatcccgagtgcatttcgtacaatggccggatatttaaccaattcataagatggtactgactgtactccgcgagcagttgcggccaacattaacgtctgcgaaaaagcgcctaaatcatagattgaccaactattagggttagcgtcgagtacgagataggcaatcgccggtgcgcgataaagattagcacgactatcccaataagtggtcgggtctgagtcgatcacgggccgaaaagttccgacccagtgccccatattttggctagcaaacgccgaaaaatcaccccggtgtactttggcgagatcagcgtcttccgcaatcccttgctcagcggcagtagcatagtgttgtttaatattagttagtgcgtgccccgttgcaatatagacttgccatggttgtgaattgccccacgagggggtatccgtaacaatcattgttaataactgtggctcaatagggtcgtctttaaaagcccggactgaatgccgggtgtgaatcgctttaattgtttccatgaatttttagctcctatattttaaatagtgatgaacaaagagaataaatatcattataaaagatagtactatctttttcaagtgagaaagcttggctagctaagcgcatcgtcataaaccagtaaactaaaaacgtggtaataccgagccattcatgctcagtattaccacgtttttaaccaaattaggcccttgaagttacagtcaacaagctatgaacactggccttaacaaggctgtcatagaccttattttaatgcaatctgtacccgtcgttgaagatctggcaccacggtcgcttggaaccatggattcttcttttgccagccataatttaggggcgatggatgcactaatgggaaataatcaggcaagtaatcctgataattttgaaccgttgcagtcaacgtcttttgccgtgaacgtcctaaataagccttaattgcatattggcccacaagtaacgtcagttgaacgttaggcatcattgctagcagcggttcatgccatttatccatgaagcccttgcgcggtggcaagtcaccgcttttgcctttaccaggatagtagaaatctagtggcataactgaaatgcggtcactttgatagaattgctcccgcgtcacgcccatccaatctcgaagtcggtcgccgctcgcatcattgaaatacgtcttggtattttgggcaatacgtcccggcgcctgactaatcactaaaatagtggctgtcggtaacacatgaaataatgggtcccaccccttcgccgtatattcagcgttatcgggatcagccttgatagcttcagtaatttctttgattgttgtgatatagatgcacctgcgattcgtttttagttttagtgacgatacttttcccatgcctgtttgattaagctcagaatatattcaatctgagtatcatcttttataattacttcataatctccatttccccaatggccgatactgctaacatctctcaataaattattgggatcgtttagttctccttttgataagttaatccaaatttttaactggcttttttgcggtaacaaatcaaccacattatgatgtttaatacgtagtccgatgtaaactttggtcggtttaacttcaaattctgaatcccacagcaaaatggcggctttaagctcatcatacaagtcacaaatattagcagtagctttatctaggaacatttcctcagtatagggcttcaaatcacttacctgatcaacatccgctgctttcgagattactttggattgtgacgataacgcactaaccttattggcaaaacgactattttcactattattcataatttgaagcagagtcaaatagccattctcagttttcctagcctcatataactcaattggcaaattggggttatcgatagcatctttttgataattagtataactaccagcgataaaaacaacccgtgtttgtgtccagtcaaagtcagccactcgcgcccgtgcaccaagcttttcattgtaggctaacgtaaaatcggctttatgttgcaaaagtgtgtttaaataggcagtgccctgatcaactacgctatccttagacgttcgtttatattcaatgattacgaaagctcgaacctcactatcatacgccactgtatccaaccgataatgacctactgtaaattcactgacaataaattgaatccctaaaactaattctaaattattttcaatcaaatcttgtaattcacgctcaatattaaaacttgagaccctaaccttatttaaactatttttactttgatttattttgtagagatccatattaactcctaatcaatgttcatacttatactagtattttacatcaattagtcatagacacgaagaaaagtcctaaccatgttattgccctagattaaacacgacttcatagtcccaacattcgcttcagcagcttttcattacgtttattatggatcggcaccattaagcgcgtagtatattttgccaaaacaccttgcttatacacagatttttgattactaaacgtctcaaagcccgtcttaccgcctttatagcgtcccattccagaataacccacaccaccgaaacccattgaatgcgaacccgcatgcaaggataactcattaatatctactccaccagatgatgtctgcgaaataatttgattcaaatgccttgaactcctaccaaataagtacatggctaacggcttttcatgagagttaataaaagcgatggcttcatcaagtgaatcatacgtaaaaatcgataaaataggtccaaaaatttcatttctggcaatctgtaaatctcgatcaggattaatcgccaacgttaatggaattagccgtcttttcacgtccggaaccaattcattatttggattaatcgttatcagcctagttccccgttgccgagcttcagtaagcattctcaaaatccgatcgtaagaacgatcgttgataatggcagaatattcagaattattaatgtaagttggaaatgcttgcgcaagttgtgcagtgattaagcgcacgtattcatccaactggtcagtgggaagtaacacataatcggtgtccaaacaaatctgaccactattaccagaacgactacgcgcaatcttggcagctgtcatttgcttgttagcatctggtaaaacaacggctggatttttaccacccagttctaaaacaaccggtgttaaattaggagccgccgccgataataccttcttaccagtttcagagccacctgtaaaaactagtttgtcccaatccagtgctgaaaactgagccgcaatatcagcttctcctgtcactactgcaaagttcttttcatttaaatactgttgtgacaatttctggaccagtgccgctgtcttaggggtatactcagagatctttaccatcactcgattccccgctgcaatcgcttctaccgctggatctagcgcaagatcgattggtgcattaaacggcgacatgataccaactacacccaatggttcattataaacatactgtttagttccagttaatgccatcaaacccgaccgttgcttagctggtagtatccatttacgaagatgcttcttaatatatgcaatcgtcgctagtggtccggttaaatcagcacttacaatttgtagcggatcacgctgcccaaaatctgcttgaagtgccgtgattaattctgaaatattatcccgaatcaatgcctcaatctgatttaaaacagtcacacgctcttcataggtcattggttgcgcacggtcatactgtgtcttttgcaagttaaaaatttggtgcatctcattaattgtagtcatcatagctctcctttttaatcgaacaatcgtttaattatagacaaaaaaatatcatgttctgatattttattttttcaatagtgcattcatacacatcacaaccacttgatcgatcataattgtcttattatcaatttgacgtgtttttaaggctttaacaaacaaaacaattggtgcataaacaaaacctaaaataactgctggtgaagaaatgacaaattcaggtgtatgtttgactgcttcaaaaagttgctcgaaaccttgataggattcctcctttttgatttttaagctatcaagaatgggcgaattattgaattgttcaataatcattaatgcttcgtaatattgcatgccgaaatcgtataacgcatacataaactgttggacaaacttaactgagttattgggtttggtattgatattttgacttaaaaatgctgccaactgtcgctttttagcaaggtagacctgttttagaagatcctctttatctgaaaaataaacgtaaatagttgacgaagaaataccactcgctttggcaattttggacatcgaaacatccgcaattccctcttttagaataatacgacttacttcatcgataatactcttctctttgtctaaatctttttcccgcatatttggcaccctcttttaatcgattgaacgttcgattaataatataaaactatccctaataaatgtcaattaaaattattagaaattttatggatgtggcacctgtacgcaaaaaatcactagctatatatacctgagaatctacaatcagcatcttggggattgggtatactcaaaaacggcaagcctttttgaggagcacctgccgcttactttgctattatcaatcaattgagtatagtgataaccaggctatttcaatctagccttaatatcagcatctgaaaaatcgttgctaccgtccttttttattttgccattatttaatggtaattgcatatctatatactgcttacactttagtaaggtaactgtaattctttgcagccttatctaaactgttataaatacgaccatcaaaaacagattagaattcctattcacctaataaatccgtaactattgaaaaacaaattttagcatcacttatggtacggacttcccacattaatcataaacgcccgataaacctgctccgacagcactaaccgcattaattggtgaggtaacgtgaaacgcccaaacgaaatctgagtatccgcgcgcttcagcacttccggtgataatcccagcgaaccaccgattacgaaatcaatatcactgtgaccatacgtcgttagtttatcaatttccgccgcaaattcttcactcgagcgttctttgcccaaaattgctagcgcgtatacgtaatcgcgatccttgatcttttctaggatccgttggccctctttggccttcacattttccatctctgcgttacttaatgactctggagccttttcatctggcacttcaacaatctggaattttgcaaatttactcattcttttcgcatattccgcaatcccctgtttgaagtatttctcttttaatttcccgacacagataattttgatgttcataattgaccgcctttacacaagttattaacatagttatccacaggtgcataactcaataatcaatatattgtgttgaacaccagttcgccacaatatttatttagcctcgttttgtcaagacctttccgacttatccacagttttgcacagcaacacttgttcgtggattccggttacaaatcctattatatcaagaaccgaggcctattaaaataactttttaaaattaaatccacaggacagtccggtgcctgtggataacttttaaacaagcttcaaccccatggttccggctgttcataaatttcgactaacgcgactaaaatttatcaccaaagttgtccacacttttgcacaccatcaaattcgacaataaatgctttctgctatttcaaccagtttgttcggcttttgtcgcaaccattgccagctttcgcaaatttagtcgattattgaaaatcgattcttcgttttttcataatttcggctactaacctaaaaaaacgcccccgactgctttatccagtcagggacgtttatgaaattctcatttattagttactttgtttagttaacgttttggtagtttccgtcaacttcatgttggctgtcttgagttttccgttatggtagtatttcaccgtcacggtatcattaaccgaatgggcatacagggcactccgtaacgtggctaagctggtcactttcttgccacctagctccgtaatcacatcgtacttcgttaacccagcagctttagccggtgaacctgagtacgtcttcatgatgacgacacccttcgtcacactggttggtaacttaagaacagacttctgatcactagaagaaatattggataggtcataggttgcaacccctaaagccggccgaacgacttcacccttttgaaccaattcattgatgatcttcacaacttcattacttggaattgcaaagcccatcccttcgacactagtcccagaattatctgaggccaacttcatcgagttgatcccgataacttgtccagcaatgttgaacaacggaccaccagagtttccagagttaattgccgtatctgtttggataaccgtcgcgtaccccgtcgtttgaccagatgtattcgtcgtcgccacggtccgcttcttcgctgaaatgattccttgcgtcaaggtcgttgcgtaattagagcccatcggtgacccaatggctaaggccgtttcaccaaccttgatattatctgagttaccaaagctagccgtcttcgttactttagaagaattgattttcagaacggccaagtcagtcacagaatcggttccgacaattttagctgacaacttagtcccatcactcataatcactcgaatggcacttgaaccactcaccacgtgattattcgttacaatataagccgcgtcaccgctcttcttatagatcaacccagaaccttcactgtactcttccagcttactagagctagaatctgaactggatgaactatcactgccagacgagtcatcgccacccaaaataccactccaactgcttgaagagctcttcttttggagattaatgaccgatacaacggccgccttgttattttcaaacaccttggtcgcctgtgaactgacattgaccttaacgttcgtcgttgacgttgaccccgatttattagaaccagttggtacactggtcgatgacgttgcgatgttattgttttggaaataattaataccgccgtaagcaacaccaccaccgattaaaccagctactagtgcggttactgcgactttgattaatgatttattagccataattgcgcgtcgaaacgcgatccctccctactaatgcttattttaagtttattttagcgaaaaagtgtgatttttttatgactgaagcgttgtgaaacattaaagctaacctataacgtaattaacttagtcgcttgttctggctccgtatcgtacaattgaaaatcatgctcaacgtcaaaatctcgttccgtcatcatggaagcaaccgttaaatgcgccaaggacttcaagttattatcctgactacgatgccctaagtaaatccgcttggtatgccggccaatcacatccatcaaggcgttcgcaccatcttcattcgataaatggccctcatcaccaataattcgctgctttaatggccatggataccgacccatccgcaacatttctaagtcatgattacattcaaataaatagccgtcagcgtctttgattacaccttcaacgtgctctgaaacgtagcccgtatccgtaatgatgacaaacgattttccggcatgatgtagttcataaaattgtggctcggccgcatcatgtgacacactaaatgattccacgtcgagatcacctagtccaagcgtcgtgttcgggtcaaagacatgacataattcggcaggaacgttgccgattttatgcgccattgcgtcccaggtcccctgattagcataaacatccataccatacttccgcgctaaaatccccgcagaatggcagtgatcagtgtgttcatggctaataaataaactatcgacttcattaatatcacgatcgatcgacgccattaaattagcaatttttttgccacttagccccgcatcaaccaatactttgtgctctggcgtttcgatgtatgtcacgttacccgtactacccgatgccagaatgcttactttcatatcatccgttgctaattttaataccattatttaggctcttcctatctctgaaatccattactatcttcatatgatacacgcttttagcggggttgaaaagcaagccacctgcaagtgctcaaacttaacgtccacgactatcgccatcacgcggttagtctagtttactgtcgtgtatgcgcacactagtttaccggccattaaactcacacgaaaccgcgaacatcaacgctgagcaatccacgctacgtcatgccacctcgacattggcgtatcacaactagtcaaaaatctagtcaccaaaaaacgggcctgttaggaaaaacacccttcttcacagcacccgttattcgacaacgacacctagtcgttaaactggttttcactaatcaattgcattccacatcattccgaccgtcgcatctaaactactcgtatcactagccgtactaccgttcttcattgaagaaccagtaaaggcattgatacggtgcagtgtaacgttagaactattcttaccccggaccgcaaagatccacgttgggacgtaaacactactatccttcaatttcaataaccgagaatacccaagctttgcccaaacgatccgggaactacttgccacctgattatattgatacaacgcaaccagggcctttttttcactgatcgtaacagccttttcgcgtaaagttttgacgtgattgacgtacgtctgagtataacttgtcagctgcttgtttttattaacaaataggtggacttgcccagcgccagtcatgatctcgccatccgcaaccttttgaacaaaaacgtaatcgccgttagacgacaaatccgcatcatagacgtactcggttccatggattacattggtccgctgactcataaacgtcgtcaagtccgctttaggattgcgggtatcgatagtggtggttgcccgtagtgtgctcacgagcttaccgccgctttgcacctgggctgtctgttcagttaactgactcaacaattgtttgagaccactctcgttactgcccgcaatatagtaacccgtcccttcgctcgtgtccgggtttttaaagctaatattatctgcgcgcatttcacgaattatcgtggtcgccgtatcaccagtcgtttgtgtcgacttagagctcgtttgcacgaacataaaacccaagaagatatctagaacaacaaatgctagtaggaaaatccactcaattctccgaaaattcatgcggccacctcctaagatccacttaacatcgacgtatatgtccgccaagtgccattatagtagacataatacgtcggcgtcaggtcgatcacgagtttggacgacttgttctgtgaccattcgtagccaagttcaatactgccaattttactgtctttataaccagcggccttcagacgttttaacacacttgtcgaactcggtaaggtcaccgcttgcttctgaccagtagttggtactggcacctgcaaactgtacagtgagaagtagtaacggtctaacccgttagaagtgagctgaatccggacatcgccattttcggtctgattaaagatcgggaacccttcaacatagcttcggtaaatgacactattactcgttgcgtcaaaaccgtagtagcggatattatccattgggacaccgagactagttaacaaattgaagctcttctttagctgattagtcagtgataggttccgcgtggttcctgaatcactataatcttcgaaatacactgttcctagcttagaatccaccgtcatgcgcttgtaactacccgttgtatactcctgtttaccactgcgattatgcactgaaacggtcgaattaccatccgcatctagtaatcggttggcaatctcactcgcagccgctttactcatcaagtagctataatgttgcatcgtaacttgctttggataatcaatatacgttgtattatcctcataggtcatcttgacagcaatccgtttgaccttgtcgactgccaaaacttttttcaacgacgacagagattttttcttcaaccgaacactataaatctcatgatggtcatcattcaaaaagtagatgtgattcgtatcattgactggaatcacgatccgactaaattccgaggagcgaaaattactgagatgttgcttgaagaccgtattaaacatactgacagtaatactgtcaggaaagttcaatacgtacgaatcagttccatttaagagcgcacggtagctttttgccgacgtaatgcgaactttagagatactccgcgcatcccatttgcgtaactgctcactaaattgactgactaagctgacatttttattaatcagcagggattggccaccctgactgttagtgtgaattaattgtgtcggtaaataaatatcatcgattgtccgagttgtcaacgaagagttcgatgacgtcgtactaaccttgctttcatgctcatagcgtgacggattcaaccagatatacatggataaaaccacgctcaataagatcagaatcgtcaataaaatgggtaagataaagcgtctaagcttgtgagtcgtcatcccaaaggtcctcctcctcataaggttcgtatggcagggagatatagaacgtagaccccttaccttcaacactatcaacccaaatacgaccgccgagcatctgaacaacttcttttgaaatcgccaaaccgaggcccgtcccaccttgggcccgtgaccgcgccttgtcgactcggaagaatcggtcaaagacgtgtcctaagtcggcccgtgggatacccaagccctgatcactaatactaatgatcacttggttatgcgtctctaacaggcgacaagtcacgacaccgccatcaggtgaatacttgatcgcattattcataatgttatccaatacttgagtgaatttatcggtatcaatttcaacccacagatcacgcttggtaaactcgcgcttaatagtgtaatacttagctggattatcatccttctttaagatcatatcaaaccgatcaagcacgtaattgaacatctcattaatattgaccaattccatatcgacccgggtggtccctgagtccatccgtgatagacttaagagttcattgatcattcgaatcatacgatcggtttcttcttgagtgaccttcaaaaatcctggggccacttcaggatccttccacgctccatcactcagtgcttcaatataactccgcaaactagtcagtggtgtccgtaattcatgagacacgttcgaaacaaattgtttccggtcattatcaatcttttgttgttccgtgacatcgtggagcacacagactaacccactaataaacccagactcccgttgaattaacgagaagtaggcattcaagattaggtcacgctcgttcgaagaaaaatcaagcatcaattcatcttgattttcaatcaaatcacgcaatgaataatcatcacggattttcaaaatatctaaaatcgagttaccgattgccttttcggccgtaacatccataaagtccgaggctgtttcattgatgatggtaatattaccccggcgatcagtggcaatcacgccatcactcatgtgtgagagcacactatccaaccggcgccgctcagcttctgtcgactcttgcgattcttccactcgaatcgacaagttattaatggctttagccaactggcccaactcatcatcgctataaactcggacttgccccgcataatcaccacgggcaattcgttgcgtctgctgcttcatttcttcgattggacgagttattgcccgggcaataatgattgcaattcccagtcccaagaccatcgcagcaagtgacgcaatcacaaagattcccataatgttgttaatcgtactgtagacagacttcatatttgcccgtacatacagtaccccaactaactgactgctattacccgctgaattggagctatatagcggcacgattgaaacgtagtagcgtccattattctgagtgtcataggtacttttagtgtaagttcgattattatagatcgcattcttgacgtttcgatcggtcgttttttgtccaactactgactgatcattaacatcactcgtcccacgaattgttcctttgctgtcaacaacttggatttcatcaacattcgtattgttgtagttcgacaaaatcgtcttgatttggccgttggccttgcgcgtactgctgacggtcaattgttcggacaacgaattatcaatataagttggaatttgcaccgactgtttaaaatcctggatgttctttgattccaactgtttcacaaagattgcacccacgatttccaacgtaatcaataatagaagggcaaacacgagcgcaattttgaaattaattgttttaaaaaaatttttccgtttaaatctcaacacggtttagcaacctctactcattttcaggattgcggagatagtaacccacgccccgccgcgtcaccagccattttggatgactcgggttatcttcaactttttcacgtaaccgccgcacggtcacatcaactgtccggacatcaccaaagtaatcatagccccagaccgtctgcaacaagtgttcccgcgtcatgacttggccgatatgttgggctaagtaatgtaacagttcaaattcacggtgcgttaattcgatgttttcaccgcgtttggaaaccatataagcttctggatgaatcaccagatcgccaatttcaatgtctgaattttcttcaacttcagctggttgagcacttggtgcaccttgccgccgtagatttgctttgactcgagcaacgagttcccggtttgagaacggtttggtcacatagtcgtccgcgcccagttccaagcccaacaccttgtctaattcagagtcctttgccgttaccatgataattggcatatcatagttcttccgtacttgtcgagcaacttccaagccatccatcttaggcaacatcaaatctaacaaaatcaaatcagggtggacttcatccactttttgtaaggcttcctctccgtcagctgcaacgtgaacttcatagccttctttggtcagattaaatttcatgatatcagagatgggcttttcatcatcaactactaagatttttttcataacgattcttcctccttaggggaaaacaggtttacatttcaatttttagggtaattcgcgatatattacgagaaaacaggtcctttctcgtgtcagggttggttgaaactaaattcaacactggttttagtatatcacaaatgtagttggctttctttgattgctaatccgcgtggccgtagtatttcccgggaaatcatttgccagttcaagcaatcgttttcaccaattaattactcaaaaaaacacttttttcgaaaaaactttcgaaatagtgttgtcagaactcaaaattcatgatattatattttttgttgagttatgggcagttagctcagctggcagagcaacggactcttaatccgtgggtccagggttcgatcccctgactgcccatcatataaccacactaatcagttttcacgccgtgataatccaccgtgaaagctgatttttttattcctacaaaaaagcctcaggaagcacaacgcaaagtgcgtgtgacgtccctggggctttttctaacgatctaatgtttaccatcagcgtagctaagtaactcaattgctagggttattcttgatcaatatggaaataaccttcaggagctgcactcggctgtgcttgatgccaatgttggctactacttccatatttagttggttgtggatccggtcccattgcaacaaagcgccggcccaatgcgtccataaaaataacgacccgctgatattcacgcgcaggtgcaactaacgtacaattctcatgcttaatgccgtaaacatctacaaaatccattccgaccacttagctttcttgtttagctgacaacccgtcacttcaaataaaaaccgaaccagttaatgataatggttcggcccaacagttactattgtggttgaacgttcgttgcttgggggccacgatcgccctgttcttcatcataagttactttttgaccttcatctaaggttttaaagccatcagtttgaatcgctgaaaaatgaacaaagacatcggtaccgtcttcacccgtaataaaaccaaaccctttatccgcattgaaccattttactgtaccattcttcattattagataagtcctctcagaactgactgcagtaacaacatcgttaaccttgggagcgccaatcaatcataacgttccacgcgttaagtggcttaagtatatcacatccctagtttttaatcgctgaaaacggtgtgcataacgtatgactttcccccatgattcctgcatactgaggtgtaaaggggtgactaagtatgcaacacacgactcgtcaggcagccctacatatgatccaaaccgcccccgtcttcacgttagcaactgtttatgcggacggctttccgaccatggtagcgctcagtcccttacctatcaaacggagcctagaagaactttacttctatactagtcgtcaaacttcaacaacgcagaacattcaaaactggcgtcaagcgagtttattctattaccaactgtcagactatgcgtcaattatgcttcggggaaaactctcattagtcggtaccaacgtttttgaacaagattggcgggctgaactaacggactttcagcagcaactaaattacaaagaccccgtcattctcaggtttcagacaagttcaatcaagattcgccagatgatgacgatcgaccatctcgaactcgttgatcagcccactgacggccccgctcacttagattagccgttacaaattgggccttctcagaaagacacaaccgaagcgccacgactagattctacgcaaattctagttgtggcgcttcgttctttggtcacccaacaactagcatggctcgaagcgtgatatcactttcaaaccagttattaatgcaagcacgtccgactattccggacgtgcatcaaagaccaagtatcatcagcacaagccagaacactttgttcattcaccttcgaaaacaacgccactttcaacctcgtcagcccctactttcatcaccaatatttgcgagtcttgtaaaaagagactaggctgtagttatggttaatatttttatatttaggattacttattgcaatttttaatgaccgaactaaggagtgtggacttatgaaacttattagattgcgaattgaaaatgacgcgatggatatcgcttatcatccagtatcggggcaagccgcaacggcccattacctgattgcctataattctgaccaaacaattggtgaaaatctagagaacatcaaggttcgcttagccggacttcaattcgatgctgctattcttgaaaacggactgtcctatccattctcagacacaatcgtcggtgtcaactatgatcgcattgatgtcgggctagctttgactaatttgcttaatatcccagtcgttagccaagctgccgttgatcaacttggactagcagccgcagttaaagctaaaagtgcctatttaaaatggcatttggattactacggccaataccacggtgtccgtaataatggtcaagaagccatgttgaccattggtaacggttattttggtctacggggcgcctttttggaaagtcacgccgacaaggacaattatcctgggacatacgttgccggggtctatgatcaaaccaccacgactgttcatgaccaccaagttaagaatgaagatttagtcaatttaccgaacgctcagttcatgactttcggtattgatcatcagactccctttacactcaacgaacatgatttacaagacgcttatcggagccttgatttgaaaacgggactcttgacgaccactaaattgattcagctcgcttccggacatcaactcagaatccggtcgcagaaagtcgccaacatgcgtgattggcaccgttacagcattcgttaccaagtcaccccactcaactttgcgggtagtctacaaatctataccgaaatcgacggtagcgtcgtgaatagcaacgttagccgctataacgtcttcgatcagcatcatctgaagactatgggtatcgaaacggctgctaataccgtctacctttctggtcagaccaaatcatcacatatcaattacacaattggggccaaactaactagcccagacgttcctgccattgagaactttaatagcacgcaacaacctcagggcgttcagcaaaccgtttcactggcggtagaagctggtaaaacgtataccttcgataagaacgtcgtcattgaaactagtaatgaccatagcgatccccagttgacccacgtccaagccgagctcgaccagtccagttttgacaatacggtaaccactagcaaggactattgggaagcgacttggcgagccacagatattaagatccgtggcgatattacaagccaacgcttactgcgcgtcaatatttaccacagtttcgtttccgctgccgcaattgaaagcggccaattagacgcttccgttggtgctcgggggctccacggagaagcttaccggggacacgtcttttgggacgaaatgttcattttaccattctacacgttgcaccgaccggaactagccaaacaactcttagcttatcgttaccggcgactaccaatggcgcgtaaaaatgccgaagcagaaggctacgcgggagccatgtacccctggcaatcagcatccaagggtgatgaacaatctcaattcactcacttaaatcccattactaaaacctgggatccagataatagccggctccagcgacacgtctcgttagatattgcctacaacgtctggttttactaccacgttactcaggaccgtgatttcttaactcattacggtatggaaatgttgctatcgatcgcagccttttggatcagtaaagcagattatgaccaagctaatggccgttataacattagtggggtcatgggaccagatgaattccatgaaaactatccaaacagcacgaccgctggattgaagaataacgcctataccaatatcatggttgcgtggctctttgacacgattaccacgcttcgggcgcagatgccccaagctgcttttcaagcggcagctcaggccgcacaatttgactcaacggctgagcaagcgttaacgacgatcagtcatcaattaacacttgaaatcaaccgtcggggaatcattgctcaatttgaggggtacttcaacctaccgacgcttgactttcaagcttaccggcaaaagtacggtgacatcgcccggatggaccggatcttgaaagcagagtctaagacacccgatgcttaccaagtggccaaacaagcagacgccttgatggccttttataacttcgatgtcacaactgttcagaagattattgaaaaaatgggatatcaacttcctaaagagtatctgacccataacattcaatactatttagcgcgcacaacgcatggttccactctctcgcggatcgtttacgccgttttgaatcagcttgacgataatgacgatgacgcctggaagcttttctcagaggccctcgcatccgactattacgacattcaaggtgggacgaccgctgaagggattcacctcggcgtcatgtgtgcgaccttaaacctgacgacacggaactttggcggggtcaatccactaggtgcccacttacaggtgagcccacggctacctgaacactggcaaacattgaaattcaagcatctctttcggggtgttcactatgttttcgttatcgatcatcaacgggtaaccgtcactgcggaccaacccagcacgattatgattggaaaacagcattaccaattacaagctaagaaaccactttccgtcacttataccgattaatctaggaggcaatcaacatggttaaatttgcagcaatcaaggggtttgtctttgacctcgatggcgttatcacggacacatctacttttcatagccaagcttggcaccagatcgccgataaagtcggggtcagttggaatgatcaattagctgacgcgctcaaaggtatcagtcggatggattcactcaacctcattctagctcaagggcaccgagaaaatgacttcacaccggcccaaaaacaagcgctagctacggaaaagaacaccaattatttgcagctcgttaaccaaatgaccccagccaacattctaccaggcatcaccgcctttttgactgaattaacaacggctggctacgcattgtcactcgcttcagcatcaaaaaatgctccgcttgtgctacgtaaactcggtcttagtgactactttacgaaggccgtcgaccccgctagtctcaaacacggtaaacctgatcccgagatttttcggcgcggtgctgagattttaggccttaatccagctgactgtattggtgtcgaggacgcggcggctggcgtacaatcgatcaaaggcgctggcgaaactgccatcggtattggtgacccgaccgttttagcggcggcagatatcaattttaccgatacgactcagctcacactcgccaatattaaggcacaactaaactaacgtatttccattaaactcatcacaaaacaaaccggatttggcgaccacgtcatggttaccaaatccggtttgttttgtttaagccagtcgctaatctcaccagttggactgctcactggaagcttataattatcagactagctgtcaattctcaaatcaaatcaaaatgttgcaatccttgggcaatcccgccgtgcatgttgtcagcggtcacgtaccgcgcgagttgtttgacctgcggatgaccattgcccattgcaatcggtgtctggatcattcggaacatctcaatatcatttaattgatcaccaaacgcataggtcggtaccttagttaaatgcgccttggttaagatatcctgaattccaaccgccttggagacgccccattgcatagtgtccagcgcacgcggattattacgaacaaaatgtagtcggcctcgatatcgctgccgatattgcgccgcattcaacggatcaaacgtcagtaagaaattaatatgttgatgttcaaaaaagtgcggtgcgacccgggccgtctgtctgagtgcccgataattactggttgtcaatgcatcacgatggcttaacgcaaaaccggcgttattataataagctagcgcattctgttggcgattggcaaaatgagtaatatcggtcaaaagctccttatccagttcgtgcgcactcaaaaactgcccttgatacgcgacgtaactcccattcgcactgacgattgaatcgatccccgtcgttgtcatcacatcttgaacttcgaatacattgcgacccgtggcaatgacgggtaggacgtggttagctcgtaattgctggattgcccgcacactgctggccgcaaccgtcttatcgtcctgcattaacgttccatccaaatcaaaaaacactactgcttggtacaaccaattaccccctaattaatcagtcactggccaataaccagcgccaccaatacactaattaccttcgtgatgacgtctatttaaaaccatccgaaaaggtgctttagtgtttacctttattataagcacctcgtctgaacaacgcagacattctgcttataagcgcacaaaaatgcgtggccaatcaaggaaagccacgcactaatgtgcctacgtctcattaaggatcgatgagtacttcgtaatacataatcaatagcggggtgctattaaaaagtacaattatactatacggctgaaccgtactaacaatcatcaagttcctgtaaaatttaggtaaagttttcaataaggcgcaactgttcaccacccagcgtctgcgtcacaagggagcgttgaatcgcttgtgctaattttatgggcacaccactcaactttaaatcgtgactcgtcatggttcgcggctcagtagtcacattgacaatcaccatcacggtctgatcagcctgccaataaaggtagccaatgccataatctgccaagtaaaacggcacaaagtgggctgtgtttaaccacgggtgccgttgacgccaattcgcccagtcagcaacaaactgaacttgcgcctgatctgcgtcctgccacggataaaacgcacggttatcagggtctttcccccccatcatcaacgcctcatcaccgtaatacaggcacggtacacctggaagcgtcaagagtagttggacggccaaacgtaggcgttggcgatcttcggctaacatagtcaggattctgggcgtatcatggctaccgatgttattgaagttaaagcgaaacgtcgtagcgggataattttccttgagggtcattagttcacgccaccattcggccggtgttagcgtgccgtttaaaacgtgaataatcaagcggcggagcggataattcatgacagcctgtaagccgccgccctctaagtagtgccggcgcatcccatacgctaatttatgagaggcatcctcccaaacttcaccgatcaaaaccttatccggataacggtcaagggtccgtcgaattccagcaatgaaatcgtctggcaactcatccgcgacatctaggcgccagccatccacaccgcgttgcgtccaatagtcaatgaccgaatcgggtttaccaaagataaaatcgcggtatgttggatcgtctttatcaactgtcggcagatcacggatgccccaccagctatcgtaatcgtggggataatgaatgaatgtgaaccacgggtagtacggactcgtggtcgactgagttgccccaaccgtcgggtaatggcccgcctgattgaaatacttagaatccacaccaacatggttaaaaacaccgtctaagatcagtcgcataccggcccggtgtacggccgcgaccaggttatcaaagtccgtcaaatcgccgacgaccggatcaatcttcagatagtcacccgtatcataccgatgattactgctggcctcaaagatcggcgtcagataaataattgtcacaccgagtcgctgtaaatatggaatcttagcactaataccgcgcaaattaccaccgtaaaaatcccagcgtaaaatcgcccggtgttcatcacgcacgtatagtgggcgatccgttagttgaccataaataaagctatttggcttgggcgcattaacgtggccatccgcgttgccattattgaagcggtcaacaaagatctgataagcaaccccttcacgataccattgtggcaatgtttctactgctttcaagattgtcaattgaacatgctcgcgcaagacgtattgaacgcccgggccaccataaccaccatcaacgcaaccataataagcggtcatggtcgccgtttcaatccgaaaatagtagaagtacaggccaacctgggtcggtataaacgtggccgtatacattgtgggactgattggatgtaacggtaaggcctgttcatcatcccactgaccatcatgagccacgcataaatcaatctgcttaaccggcgttactgtctgaacactgattgtgaattgaacgggtgtctggcgggtcacggcaccaaagggtgtcttatacgtgggtaaaaatgagttatacgttacctgcatccgtcacccttcctttcttaattcagtcgttcgtggggcacttgccaaatatcgtcagcataccgcgccactgctaagtccgcggcaaagtgtcccgaagcggcaatgttggctaacgagcgttgttgccaagtgggttgattttgaaaatcacgactgatctgctgttgttgggtgacataagcccggtaatcggctaagacaaagaattcatcattataccgcagtaatgaatcatagatttcccgaccaaccgttggaattcccggaatcgtgccatcaatcaaactatctaagagccgttttaattcaggatcagcatcgtaaaagtcagcggcgtgatagttgccgcgatggtaatagtcgtacacttcattgaccttaagcccaaacggatattcattttcagcacccgccgcttgcataatgtcgatattcgcgccgtcatacgttgccaatgataatgcaccgttggccatcagtttcatgttactagtccccgacgcttctttggaggccgttgaaatctgctcgctaacgtcggcggcgggaatgatcagttcggcaatggagaccccgtagttcggaataaagacgatctttaaccgatcaccaatcgccgggtcctgattcaccatgtcagcgacgacattaatgagtttgataatcgccttggcatagtgataactaggagccgccttggcaccgaaaatgtgtactcgcggcacgactggctgttgcggatgatccttaatggcaaaatactcgcgcaagatttcaaagacgtgtaggagttgccgcttataagcatgcaaccgtttgatttgaacatcgtaaatcgcgtcggtgcgaatcttgatccccatagtacgctgaacgtacgcggctaaagcttgcttgttagtcagtttaacttgacctaactggtacaaaaagtgatcatcttgttgatacggcagtagcgtctgtaataaatctggttgccgccgccagtccgaaccaatcgtctgatcaatcaattgcgctagtggttggttcgccaattgaacccaccgccgggttgcaatgccattcgtcttattattaaaccgctccggataaacttgatacaggccccgtaacacatccgttttcagtaattccgtatgcagtggcgcgacaccgttcacactgtgactcccaatcacagctaggtaggccatccgtacttgtccgttgcctaaaggcgccgtctgatcaacgagcgctttgccaaaaatcggcgtttgttgttcccggtagcgccggtcgatttccgcaataatctgatagatccggggtagcaggtttttaaacatatcgattggccaagtctcgagggcctcttgtaaaatcgtatggttcgtgtaactcatgacttgcgtcgttaacgtccacgcgacttcccatgaacagtgatgttcatccattaatagccgcatcatctcagggatcaccagcgtcgggtgcgtatcgttaatgtgaatcgcgacctttttgcctaacaatttgatgccatggtgcgtcgcacaaaaatcacgcacgatactttgaacacccgcagaagagaaaaagtattcttggcgtaaacgcagttgttgcccggccgagttagaatcgtcaggatacaagaccttggtaatctcactgattcgatcacgctgatcctgcgaagaataggtcgcactgggtggtaactccgcggaccacaaacgcaaggtgttcgtaatatcgttgtgatacccgacgataccaacgtcgtaaggaaccgctagcacgtcttccgtattttcagattgcggttgtaaactaccatccgcttgcggttgtaaccacacattgccgccgaactggacaatgcagctcttgttatcgcgccgggtctcccacacgttgccatgatggagccaatcatcgggtaattctacttgatagccatccatgaaaacttgtttgaacaagccgtaacgatagcggatgccgttaccgttgccggcaattttcaaactagccatcgcgtccatataacaggctgccaaccgacctaatcctccgttaccaagcgccggatcaggttcagcctgactgattgtctcaaagtctaagcctaattccgttagccctttttttaccgtcgtcaataagttgagattcaacaaattagaagcgagtaagcgtcccggcaagaactcgatggaaaaataatagacttgtttctgatgatgatcgcggtaaaatttagctgttcgtgtccaactctgactgttatagcgccgaactagctgtcccagtgcaataaattgcccaatcgtcgaggtgtcactcagcgatgttgaatacaaggtctcaatttcacttagaaagtcctttttaaattgcgcacacgttaatttcaaattcacacccccatcaaacctaacgcattagcttctgataagtcgcacggtactgctgtgcagaatgttcccagccaaaatcacaagtcattgcttggtgctgcagctgccgccaaaccagtggatgctgccgatataaggtcacggctagaaccataattttacgtagaaccgctggctggtagtcgtcaaagctaaagccggttccctgatcggtatagcgattgtacggaatgaccgtgtcccgcaacccaccgaccgcgtgcacgatcggtaacgtcccgtaatgcatcgccatcatctgcgacaagccacacggttcaaaggcagaaggcataagaaagatatcactggccgcatagatttgctgagctagctgcgtatcaaattgaatcgcggcgaccaccttttgcggatacgccgactgataggtgcgtaacgcgcgttccaatgctgggtcacccgttcccaaaacaatgagttgcacatcttgttgctgcaagaatggattcaatgcatccagcaagaggtcgatacccttttgcttcgttaaccgagaaacgactgccaataccggcacgtttttgacaggcaaccctaatcggcgctgtaaagcacgtttattctgacgcttaggtttcaaattcttagccgaataattcgccgttagtgccaggtcggttgcgggatcgtataattgcatatcaatgccattaagaatcccactcagtttgtaccgattggcccgcagtaccccgtcgagacgttccccaaaagctggtgtttgaatctcttgtgcgtaggtcggtgacaccgtattaacggcatctgcaaagttaataccgcccttcagccagttcacttgatcgtaaaacgccacgccggcttcggtgtaggtctcagttccgattcgaaagagactatccaaaataatcggatcgtagacaccttgaaactgtaagttatgaatcgtcagcaccgttttaatatcacgatacgcttcgatccaatagtacttttcagctagcaagacaggaataaacgctgtatgccaatcattgagttgtaaaatatcagggatataatcgatccgctccatcatttcacaaacggccatttgaaagaaggcaaagcgtgcaccatcatcccaataaccatataatccttcacggccaaaataatctaaattatcaattagataatactgaacgtgcgcgactgtcagagttttaataccgcaatacatcgcatgttcacccacttgaacagtaaaatgcgtcactggcactaactgctgctgatattcggtcggcatctggtgagggtaatacggaatcactacacgcgtctcaattccttccgcttgcaaggcgcgcggtaacgccatactaacatcgcctaagccaccagtcttataaaaaggggccgcttctgccgccgcgaataataccctagtcatgcacagccacctccgcttgttgaaagacgtgctgccctttgctgatgactaacggtgtcgttgaagttcctttaagcactaggttgggcccgattacggcgtctttatcgataatgacgttttctaacttacaaccggcaccgatccgggccccctgcataatgatggcatttttaacttggctatcacgattaatcagtacatcccgaaagatgacggagtggtcaagttgcccttcaatatagcccccagtaccacataaactatcacgacactgtgaaccagtcgcaaagaacgtcgggatttcatttttgaccttggtgtaaatacggcgcgaactgtagaataacgctcggaaattagcttcatccaaaacggccatattggccgcaaagtagctgttgatatcatgaatattcgcctgaaagcccgtatattcaaaagcattagcgttatgttggatgactgcttgccgcatcaattcctctaggctgatcatgtcaccccgttgattggccgactgcaataattcgattaaatcgaccgtactcatcaagtaaatagccatgctcttggcaacttgtttcgtcttcgggctaatcttggccttgctcatcggaacgaccgccgttgcttctcccttagcagtcaattgtaagattgtattttcgggaatcaaactagctggatcaacgcgcttataaaccgccgtcacgggactgttacgttcctcgtgataccgtagtagcgcctttaaatcaatattaccaacattgcgagtactcatcactaccgagtactcactctggctgcatttcagaaactgaatcgaattatcatagtaatggtgcagtaatgcggccttcttttctggcgccactaatttcaagtcattgtatggggacaagaataggccgccgcgaattgtgttcaggctccagtcacgcccgctacgcaaatgatcagccacggaacgccctgaccgcgggaccgtcaccatcacattttgaatccccgcattgatgacactcgataattgaaaatcaaccaaccgataacgaccaccaaagggtaacattccaactggccgaactgcagtcaatggttgtaacgcgtcacttggttccagtaaattaataatggcactcacttgttcacgtctcatggttgttccacccccatcgtttcgtgatacccaacaactgcaatcttatcagtcgtaccaataatctgggcatcatcaccaatcaatgcatcttcgccaatcaatgcgtggtcaatcaccacattttttccaatcgttgcaccgggcataatcatactgtcaaccacgcgactacccatcccaactgacacgcgttgcgataagattgaatgatcaatttcgcccgcaacgtaacaactatcaacgaccatggcattattaacctggctcgtttccgtcaaaaacatcggtggtagcacctctgctttagagtaaatccgccagtaacgatcgccgatatttaaccggttatggggcgataggaattccatattggcttgccacagactcttaatcgttccaacatctcgccagtaacccttaaaagcataagcgtaaacggattcattattggctaagtatgatggaatgacatttttaccaaagtcttcaagtgacttatcggtagcataactcttaactaagtaatcccgcaaagtcggccaattgaagatataaatgcccatcgaggctttatcactcttaggatgttccggtttttcctcaaactcaatgattcgatccgtcgcatccgtattcatcatgccaaagcgtttggcttcttcgttagtcacgtggatcaccccaacggtcaacgaagccttcttctcctgatgatatttcagcatagcgtcataatccatcttataaatatgatcgccagataagacgagcaggtacttggggtcttgttgatcaatatattcgatattttgataaatggcgtgcgccgtcccttgaaagaacttctcaccttcactagacgagtatggttgtaaaaccgtcaccccaccatttaagctatcaaagccccagctcgcaccgctaccaatatgtgcattcagttctaggggttgatattgcgtgataaccccaacggtattcacacccgagttagcacagttgctgagtgtaaaatcaataattcgataacgaccgccgaatggcacggcgggcttagccgtatccttcgtcaacttaccaagccgggtgccctgaccgcccgctaaaataatccctaacatttcatcttgcatgcttaactcctcctatcactttaactggtcgaatcaacaatgcacccatcgccggcaaggtcacggtaaaactagctggttgcccccgatacggcttatcgaccgccgtaaacgttgtttctagctttgtccacgtgccgccaaaagcctgcgcttcagtattgagtaacaactcataacggccacgatacggtacgccgatccggtaatcttgacgttcaacaggaacaaaattgaaagcagcgaccacaaaactgtatttccgtttggcctgccggataaaccccatggtcgaactgtcaggatcatcggtatgtgtataaataatccccgcaggatcatggtcctgttcccacaacggccgattgtgccgatagaccgcgttcagttgcgttgtgaactgttgcatccgatggttgagatcatcctttaagtcgacccattccaacgcactccagtcccgccactctaggaactgcccccactctgagcccataaaattcagttgttttcctgggaaggcagccatataagttagcatcgtccgcaaatttgcaaactgattatagcggtcccccggcattttatgcattaatgatttcttgccgtgcacgacttcatcatgtgaaaacggtagaataaaccgttcatcgaacatgtacacgaatgcaaatgtcagtagattaaagtggtcgtgccgatataacggatccatcatgaagaaatccagggtatcgtgcatccaccccatgttccacttatagttaaatcccaatccgccattggccaccgaacccgtaacctgcggataggcggacgactcttccgcaatcatcaagatatcgggatggtgggttaagaccgtggtgttcaacttttgtaaaaaggcgatgccttctaaattacgattatccccatactgattaacctgcccttcgcgcccttcatcatagtcgcaatacaacatgttagagacagcatccactcgcaagccatctagatgacactggtcgagccaatattcggcgcttgaaatcagaaaactctgaacctgtgttttaccgagatcaaaattccatgccccccaacgacggttattcgcgcgctcaggatcagcgtattcaaatgtcggcgtaccatcatactggtacaacgcatcataattgcgaataaagtgacccggtacccaatcaacgaataccccgatattcgcttggtgacactggtcaacaaagctgagaaaactgtcacgcttgccaaaacgactggttggcgcaaaataccctaattgctgataaccccaagacgcatctaacaaatgttccatcacgggcattaattcaatgtgggtatagccccgttgttttacatagggaatcagttcagcggctaattccgcataagtgtagtagctaccatcaagatgacggcgccacgaacctaagtgcacctcataaatgttaattggccgattggcagcgcgcgacttcttccggcgagctagccacaaactatcgtgccaacgcatcgtcatcggctcaacaactacggccgcatcccccggttttcgttcgaactgttgtgcaaacgggtcaatctttagttgcacttggccagttggtgttgtgatctgaaacttgtataactgacccgcatgaacgttcggaacttgtccttgccaaatccccgtcgcccctaataactttagtgcgcttggttgccagtcattaaaatcgccaacaagcccggcagccttagcatgcggcgcccagacgcgaaataccgcccgaccagatgcgcccaaatgacagcctaagtaatcctgactattaaatcctgcgccggtattaaataagtaacttgcatcattcatttccgtagtttgtttaaccaaagcatcacaccccctatgtgattaactgagcagattataaaattaatcttattataagaaggtgacagggtgtttgcctatccttgataaggtcgccttacttagtgatcaaacagggcacaaacccctaaaagataacgattattatgactagccacccagaccgctgcaaactgattcaggacaactattcacagttaagcccgtggttatccgttttattgcgccgtttgccaaaacatcaaaaaaagcccgaaaaaacgcgttttttcgggctagttgatttattcaattacatttctatcaaattaataatatttatctgactgattacttccagtaggcatagcgataaagggcgtctcgcaacaatgtgaagtgaaccccaccaaccttgttactgatcaagtgagcagcagcagtttgataaatcggtgtgaccccctgttgctgagcgactagcttagccgcttgctgcatcgtctgatatcgggccttagttgactgcttatcggccgtaatcgtcgagattaattgctcatatttcgcattgttaaacttcccaaagttgacagaattagttatcgaagccttattcaagaaatcaactggatcttggaaatcactcgaccacgacaacgtggcaaagtcaaaatcacccttgcttaaagttgaaatctcatttgtcagtggtactgacttgacattgaccgtgacaccactaagatttttctcaattgcagcttgaatatattctgccaccgacttattaatatcattatcgttcgtcaataattgcagtgttaacttttgctttcctaagctcgcctgagccttctgccaatactgtttagcctttgctggactgtatggatacaaatttccggtatccgtattaaaatctttccctgttgtcgggttcttggtattgccagcaggaactaatgacgtcgccgctactgagccgtctttgagaacgttcttaaccaatgactggcgattcaaagcgtaactcacagcacgccgcaagtcagtattctgcaatgctgagcgcttctggttccacaacatgaagtagagttgatttaacttcgtaaccttcatctgactttttagtgacccttgctcagctgccgatacttgggtgcccgtaatctgggtgacttggacctcattgctttggaagaggttctcggccgtactgttatttttgaccgtctgcaccttaatattcttgattcggacctgtttacggtcataataatacgggttcttcacatatttccacgtgtcattcgtcccattccaactcttcaagacatagggaccattagagagcgttcgctgtgccgatgtcccatacttattcccgtatttctcagtaaattgtttgtttaacggatagatctctgtggctagccgataattaaaatacggcacgcgctgttgcaatgtaatttgtaacttatacttacccaacgctttaacgcctaaggtcttcaccgccttcttaccagccgtgattgctgttgcattcttgatttcagcaacgtgtccgacttcctgtgacttggtattcggatcgacctggcgttgcacggaataaacaaagtcagcggccgtgaccttttttccattcgaccacttggcattgtgccgcaaattaaaggtataagtcttcccattattagtcggtttgacgactttcttggcaattgccggcacgactttccccttttgattagttgtatacaagccttccataaactgagcaatagcggcctgactagcgatatcgtcggccttattaggatcagcggtcgcaatcgactgggtcgccgttacgttcaacgtcttctgctgactactctgctggctaccgcagccagttaagactaatcctagggctacaataccaatactgctgatccatattctttttttcatgaatgatgactcctaacttaacgatgatgtcggttactggcaacgatacttcgattggcgccgacaacaacacatcaacggtaagcctccgttatccgtggtaaaccggtaattaccggttttcacgactacaataacgttttgcaatcctgcgttcatcatcatgattcctccccttagattaaaaactaattaagataagattagcttttaagtttacatctgtcaactaaaagtttcgctcaacattctaagtcaccatggtattgtgccttcactattcaggccgaaaccagcttgctgcttttgaaccaaacgtatggtacgcgagcttaaaactagaccggctatgttgggttatcaaatcaagaagtcaaaaatcggataaacacttgtccccccaatcggcaataaaaaaatcgctattagccgatataatgactaataacgatacttgctcatcaatggcgaatctgaccattgccatcaatgacatatttataagatgttaattccgctaatcccatcggaccgcgagcatgtaacttctgcgttgaaatcccgatttcagcgccaaacccaaattcaaagccatccgtaaaccgggtggaagcattgatataaacacacgctgcgttgacccgttgctggaagagcttcccagcttgataattatccgtcacaatagcttcggaatgttgggtattgtaacgattgatgtgcgtaatggctgctgcttctgaatcaacaactttcactgcaataattaaatcattatattccgttccccagtccgcatccgttgctggaaccacatcaggaacaatggcttgagttgcggcatccccgcgtacttctacgccttgttcacgaagtgcctgaatcatgctaggtaaataatcggccgcaacctcacgatgaattagaagcttttcagtggcgttgcaaaccgatggtcgctgaactttcccattgatcacgatatcggttgccatttgcaattgcgcgtctttgtccacatatacgtgacaattaccggctcctgtttcaataacgggtaccgttgctttagccaacaccgtttgaatcaaacgggcgctcccgcgtggaattaagacgtccacgtaatcagtgagctgcatgaacttagccgcagtcgcatgcgacgtatccgtaatcagttgaatcgcattctcatcgaccgcttcggcccgtaatgcaccacgtaagacttggacaagtgcttgattagagtgaagggcttccttaccaccacgtaagattacagcgtttccggttttaaaacacagtgctgatgcatccaccgtcacattggggcgcgcttcaaaaatcatgccgataacacctagtggtacccgttccttggcaatcatcaacccggcctcgttgcgccacgcgcggtccacatttccaattggatctggcaaactcacgacctgtttgagtccggtcgccatatcctggatgcggtctgctgttagccggagccggtcaacaaacttaactggtacttgcgggttctctaaatcctgcgcattagctgccaatatctcatcttgatggctcgttaacgccgttgccattgcggtcaacacttgatttttttgcgccgttgaaagtaaccccagcgtatagctagcttgttgagcctgctgacccaactgttctaaatctaccattttgataacctccccaacttaaccgaatagcgttccgactggttcgcctgctaaaatttgaaaaataattgtgggatccgcaccattggctaaaatcatttgaccattcgcatcgatcatccgttctgccgcttttagcttagtgaccatcccaccagtaccaaaccgactgccactaccgccagctagcttataagtatgttgatcaaccttctcaatgtgccctaataactgggctcgggcatccgcattgggattaccatcataaaagccatcgatgtcggatagcatgattaacaaatccgccccgatattcgtggccacgattgcggatagttgatcgttatcaccgaactttgtttcatgatccaattcatcgaccgcgaccgtatcattttcattaacaattgggaccacgttttgttttaatagcgcctcaaatgtattcaacacattatggtgactcttaggataaacaaagatatcacgtgttaataacaactggccaattttttgttcataaatggcgaaacgttctttgtaaatcgaaatcaattcagtttgcccaatcgccgcaatcgcctgttgttcaggaattgcttttggacgttgcttgagtcccatataattcaagccaacaccaatagcccctgacgaaaccaagacaacttcacgcccacggtgtcgcattgcgctaataacaaaggctaattgatcgattgcccgtaagttgatcgatccatctggataaactagcgtgcttgtcccgactttaatcacgactcgtttagcctttagttttcgtatcactttcactactgccaccaacttctctaattattttgtttcacgtgaaacatcggtctgaacgtccgtcttcatataattaacggccttgcgtaaattaaagtgaacgacaccgatattaactgccaacacgatcaataaaaccacaaatgccaacaaaaacagcaccttataagaccaattatcgataatcacaccaccaaataacggccctagcgagcgccctaacgcacaaaaggcttgtactagtccttggtaacgccccttagcactaactggtgataactgactcactagtgttggcatggctggtgaccaagttgcttcaccaatcgtcaataaaatcatggcaaagataaagtgtgggtaatcatgcgcaatcacaagtgatagaaatgataagcccacgaatagcatgccgaagaaaaattgattatataaatttttaatccgattccccagcaaacttaaaatactctgaataaggactagtaagcccgcgttgattgtccatagaaaactgtaattccgcagcggcatccccaaattcgtcatgtagacggataaattgctgacccactgttcgtatagcaaccagataatgaataaactaataaagaaggtccagacaatgtgaaaattggcccgtggcaagtgcacatcttgtccttggcgcggatcaaccccggtcacgttcgacgaatccacattgtattcaaataatgcaataatcaagaaaatcacgaagaggctcgtggtcatcgagaatagcaaggccatccccatgctatacacgataccaaccagcatcgtgccgaagacaactccgagattggcagcgagatacatcaacgtaaacgttcgccgcactttatcgcgggggacactggcagccaaagcattaaacatcgtatttagccagccactagcaaacccggtcacgactaacaacatcggataccacggccatccatgaaaaaagatcagagcaaagttcgcgaggccattcaacgtgattcccatcagtaacaggtgataaggattacctcgatcaaatatacgcccaccaatcgtacttgccaaaacgttggcaactgaattgagcatcaggacaattccagtctccgtcaacgacttacctaacacattgtgcatgtagatcgtcgttaacggccaaatgaaactcataccaatgttattcataaactgcccggcaattagccacggcgttttaatgagttgcttttgtgccacgccatcaccaccattattaaatctgtctacttttcatcatagcaaagtttatttaaaataacagggacatttatctcactaactcattattatcacggccaaattggtgcatcagcccaaccaattagcggaaaacaagtagcctcggcacgtgataaacaaaaaattcctcttaattagtttaagaggaatttgataacaaatttattgatcgactgcaattaagcttggggatcctgcgcataagagactgaggagaacttattaaatggtttcacaaataatagtttgaccgttccccgcgccccagcacggttcttttcgataatcacttcaacttcaccaacatcctcagaagcatcttcgtcccgcggatcgccgccattaaagtcaccaccgccaccaaaattaccgccatcatcatcgtcgccgccttcgcgatcataataatcttcccggtataggaaggcaacgatgtcagcatcttgttcaattgaacccgattcacgaatatcggaaagcactggccgcttatcttgacgctgttcaacaccacgagatagctgtgataaggcaatgactggaacacctagttccttagccagtttcttcatttgccgcgaaatttcggaaacttcctgttgccgactttctgtgttactaccttcgatcagttgcaaataatcgaccacaatcaagccgaggttaccttgctctttcgctaagcggcgacttttggcccggatttctgacatcttgattccgggggtatcgtcaataaaaatactagctttagacaaactccccatggcaaccaccaagtgttcccactcttcttcgttcagttgccccgtccgtaaatgcccagcgtcaatactaccttctgcacacagcatccggttgactaaggattcggcacccatttccaaactgaaaatggccactgtcgtatccgttttagtcgccacattttgggcaatattcaggacaaaggctgtcttaccaacggctggccgggcagccaaaataatcagattatccggttgtaagccggcggtcattttatccagctccgcaaaaccagtcggtaaaccggtaatgtcatcatcattttgatacaagcggtcaatttcttcaatcgacgcgttcaacacatctgaaatcgacttaaacccactctgattacgctgttcagacacgttcataatgtcgcgttccgcgtcatctaataacgtggtcacgtcatcattttccgtataggccttttgcgtaatctccgtggccgtcttgatcaaccgccgcaccgtcgccttttgcgccacaatcttagcatagtagccagcgttagccgcagtcggtacggacccagctaattcagcaatgtaactcatcccaccaacatcatccaattgattttgggccgttaataaatcactaacggtcaccgcatcaatagcctcgtcacggtcatttaaagtcaccatgctggcaaaaatgatctgatgtgcgcgccgatagaaatcttgcgcttcgacaaactccatcgcttccacgagggcatcactgtttaagaaaatagcccccaagactgccttttcagcttcaatattttgtggtggggtttgatccagcacatcgttgttcatttgtgatccgtccttttacttttcgacaacgtgcacgcgaattttcgccgttacttctggatgtaacttaacaggcacgtttgtgtaacctaatacccgaattggttctggtaattcgatcttacgtttatcaagcttaacttggtattggtcagctaacgccgttgcaatttgtttgctaggaattgacccaaacaaccgaccatcagtaccagctttggccttcaattcaacaaccgtttcatcagcttccaaaactgtcttgacttgcttagcttcggctaattcctcagcggcacgtgctgcttcagacttctgttcagccttcaacgtattgattgccgctttagtggcttccttggccaatccctttttaattaaaaagttctgtgcgtaaccatccgggacattcttgatttggccccgcttgcccttaccacggacatcattcaaaaaaataacttgcatttagactcactcctaattagattctgtggtcggctcatcagttgccgttaacaaatcaatcaacgattgtttgacggcttcaactgactgcccttcaatctgggttgcagcattcgataaatgaccgccaccacccaatttttccatataaacttgtacgttgatctcgccaagtgatcgtgccgaaattccgacccgtccatcttcacgacgtgtaatcacgaatgatgcgtcgacaccagacatagataatagtgaatcagcagcttgagccgccgttactgggtcatagacctgatcatcttcaccaacacataatgccatatcctgattaacaaattcaacggtttcaatcagatgattgcgttgtagataactatcaacgttctccttcataaattgttgaacgagtaacgagtccgcaccggctgatcgtagataactagcagcatcaaacgtccgcgatcctgatcgtaatgaaaatgacttcgtatcgataacgattccggtcaacattgcggtcgcctcaatcttattgattggttcggcatcgtgcgattgatattcaaacatctcggtaatcagctcacaagtcgacgaagcatacggttcaatataaaccaaaactgggttttctggaaattcttcgccccgtcgatgatgatcaataatcataacgcgattttcgagccgctcataaagggcctgtgacattgaaatacttggcttagaatggtcagccataatcaataaactttggtcagtggccttctcaagtgcttcttccggcgagataatcgctgactcgatgttctcatcagacttcaactggtccagtaaacgctgaatgtctgaatgcacattttgctcatccaagacgatccaacactgtttaccattcatttcagcaattcggcgaatcccgagacaggccccaacggcatccatatctggttggcggtgcccctgaacaaagatctggtcagattgattcattaactcttgtaacgtctgactgatcatccgggcccgtacccgcgtccgtttttccatcgggttggttttaccaccgtagaaacgagcaggttcgtcctcagacttcaccacaacttggtcaccaccccgccccaaggcaaggtccatgttactctgcgctaaatcggccaaattgttcatgttccgttcaccataagcaatcccaatactcaatgttagtgggaaattttgcttagaagtcgactcccgaattcgatctaaaatgcgaaacttattctcttcaacacgtcgtaaactactagcatagcccaacaagaagaagtgatcatcatccaagcgcttcaggtacatcccaaacatctgggtccacttagacaattcattggtcacgtaattgttcaggttggaaatatccgtatcagtcatcgactgggtgatttcatcgtaattatccaaaaagatttgtccaatcacgagtttttcatcttcgaattgatccgtcagctcagcatacttggtcacatccatcatatagaccgtattagtgctctgctggacacgtacatcaaactggtagtcttgccaacgaatcgtcgcgggctcgtccagatgagcgttcagcgtcgctgccagtgttggctcaatatcttccaagcggtatcctaagacgtccttatcaccgaaatagcgctgaagataaggattgatccattcgatggtctggtcggaattaaaaatcattactccgataggcatctgaatcagtgcctcttgttcgccgcgcttaatacgatacgacaagtctgagatatattcatttgcactcgaactgagctcaatcaacgtattataagatatcaccacagccatcacaatcaagatgaggacaacggtcccaaaaatccagttcattaaataaccagtgacgagcataattaacgacaagctaaaaataaccaacgctaagagtcgtaactgctgattttgtaggaaaaatggaattttttcacgcgaaaagatctttttcatattaaaaatccctcaagccttctcagtaatgactatattttatcacaaaccaccgtccgcttcagcgtttcgtgtcaatcaccgtaaacgcttcattgaacggccaccaccctatctagtcaagttaagggtaaataaaaaccacagagccgaagtctgtggtttttgaatgactaaaaattagtcttcagatacaaaggctaataagcccatgatccgtgcacgcttgatggcgatagttaaagaacgttggttcttagcactagtccccgttacacgacgtggcaaaatcttcccacgttctgaaataaagcgacgtaataagtcagtatctttataatcgatgtattcgatatggtttgcggcgatgaagtcgactttacgacgacgacggccacctcttctttgttgtgccattgatatttccctcctcgttatctgtctaagcaattagactagaatggtaaatcatcatccgagatatcaatttgatcgccattattagcgaatgggtcagcctgattattgttgttagcactgcttgatggtgccgcactgctagcattaccagtattaccattaccaaatgggttattgttattcgctgatgattgttgaggagccgcattttggccttgattactatacccattattattgttgttgtaattgttattaccactaccaccattggcagactgatgacgttcagactctgcccgtgattctaataatgagaagttttcaacgacaacttctgtaacgtaaacacgtaccccttgttggttttcgtagttccgggtttgaatccggccatcgataccaacaagtgaacctttatgagtaaagttcgcaaaattttcagcagctttacgccaaatgacgcaactaatgaaatctgcttcacgttccccattttgattcgtgaattgacggtttacggcaatagtgaacgtcgcgacggcggcaccaccattcgtgtaacgtaattccggatctcttgtcagtcggccaacaagaattgtacggttaatcatgcagaagcgctcctctcttaaaattaattttgtctattagtcttcgcgtttaacgatcatgtgacgtaaaatgtcatcattgatctttgaaagacggtcgaattcgtttaaagcagcatcgtcagttgctgttaagttaacgatatggtaagtaccttcgttaaagccaccgatttcgtatgcgaaacgacgctttgaccagtcttttgaatcaattactcgcgcaccgttatcagttaagattttgtcgaaacgatcaactaaggctgtcttggcagcatcgtcgatgtcgggacgtacgatgtaagtaatttcatatttctttgattcactcatgaaatttgcacctccttatggacttcaggcccttctttttgaagagcaaggaaagtaatctagctaatgctagatactcacgaatttaaagtatagcatctaaatcagtttgttgcaagggttgaagcggccgactgttacaaaaagatcctgaatccgttacaccaatcaattacgtcaattgagcgatatttcattttatttcccgggaaatatttcttttttctgaaatcctccccttcgcttacatttccccacacccacacagcattaatttaaaccaagtcgacgtcagaataacacgcactgctgtaatcctctcaatcgcacaagccagttttgaccgcgtaaatctaaaattgcttacttcatgttgtcctctcccaatttatcggcatttctgccaatcactggaagatggcaggactaagtgatgagcctccagcagtcaaattattcttcgcaggaagattgtttctaccggttcaaaacaagactttggaggccagaataggaccgatgaccggtaaatcacacacgacccgttgccataataattcttgactcacataaaaaacaagcgtggtcgacaatcttgtcgaccacgcttgttttatcaatttattcgtttgaatcgtttgaatcagttgttggttctgtcgtagtggcatcggcgttgacggtttgatcgtcaactggtgcctcagtcgttgcatccgttgcgacagtctcatcaacttctggctctggatcaaccttggccatcgttgcgacttgaccatcatcgcctaaccgcatgagacgaacacctaaggttgcccgaccagtctgagaaacggttgcgatattgaagcgaatcatgaccccttggttcgtcattaccatgatatcttcttgaccatcaaccgtcgtcaaaccagctaaatgaccattcttctcagtcacgttagcggtcttgattcctttgccaccacgccccttaattgggtaatcggcagctggcgtttgtttcccataacccttttccgtgatgatgaagacgttgctgtcgggcttcaaaacgtcaaagccaatcacaaagtcatcatcgcgtaagcgaatcccgcgaaccccagaagccgtccggcccatggaccgcactgtggtttcgtcgaaactgacggcataaccgtcgtgcgtcccgatgattacattttggtgaccatccgtgattgtaaccccgattaattcatcatcatccttaagcgtaatggccttcaaaccattgctacggatattggcaaattcttgaactggtgtccgtttgacaacccctttaacggttgtaaagaacaggtagttatcagaagcgctcgcatcgcccgtgacattaacgaccgcctgaattttttcaccagaattgactcccagtaaattgatgaccgggattcctttggccgtacgaccgtattcaggaatctcgtaagccttcatccggtaaactttacccgcattagtgaaaaagagtaggacatcatgggtcgacgtcgtcaggagatgttcaataaagtcatcatcatggacgtccatcccttgaatcccacgaccaccacggtgttgcgacttaaattcagtcgttggtaaccgtttgatgtagccattgtgagttaaggtaacagccacttcttcttcttcgatcaagtcttcatcttcaatactgaggacttcaccgaccatcaattcggtccgacgcttatcaccaaacttacgttgaatttccattaattcttcgtaaataatttggttgatacgatccttgctagctaagatttctttgtagtcagcaatggctttcaataagtcctggtattcactctcgatcttttcacgttccaaaccagttaaccggactaaccgcatatcaagaatggcttgtgcctgcttatcagacaagccgtaattatccatcaattggttcttcgcaatttcactcgtttgtgattgacgaataatcgcaatgatttcatcaatgtgatcaagggcaatccgtaagccttcaagaatatgggcccgtgcttgggctttcttcaagtcaaactcagtccgacgccgaatcacgtcttcctggtgttccaggtaatagattaagatttgctttaagcttaagacttttggagcacccttaacgatggctaacatgttaaagccaaagttagtctgcatcaatgtcatcttgtaaaggttattcaagataaccgaggcgctggcatcccgccgaacatcaatgacgatccgcatcccttcacggtcactttcatcattgatatcagtgataccttcaatttccttgtctcgagctaaaccagcaatccgttcgatcaatttagctttattgaccatatatggtaattcggtcacgataattcgttgcttaccattcttttggtcttgaatatcgaccttcgcacgaacaataatgttcccacgaccagtctggtaagccttacgaataccggactttcccattacgatcccgccagttggaaaatctggtccaggtaagacttccatcaagtcagcaactgttgcatcaggattatccatcaacaggtggattgctgaaatgacttccgctaagttatgtggcggaatgtttgttgtcatcccaacagcaatcccagtggcaccgttaacgagtaagttcgggaaacgtgctggtaagactgctggttcccgttctgtatcatcatagtttggttgccaatcaacggtatccttgttaatatcgcggagcatttcaaccgcaatcttactcatccgggcttcggtataccgcatcgcggcagccccgtcaccatcgacagaaccgaagttcccgtgaccatccactaacatgtagcgatagctaaagtcttgggccatccgcaccattgactcataaattgcggagtcaccatggggatgatacttccccataacatccccaacaatccgggccgacttcttatacggcttatccggcgtcacacctaattcactcataccgtaaagaatccgccggtgcactggctttaacccatcacgtacgtccggcagtgcccgtgccacgataacactcatggcatagcttaagaatgacgttcgcatggtcttcgaaaggttcacatccgaaatacgattgttcgataaatctgaatcagccaaaatattcgtcctccttcatccgttttgccgctattaaagcttgattaagctttacatgtctcaagtaaaagtcgccattaagacaaccgtcgtgccattacgaccctaagtctgattaacagcttgcgcctcagttcttaggtcaaaatgactaaactgacacactaaacatccagatcctggacgaacttggcattatcttcaataaattctcgccgtggtttgacttggtcccccatcaacatcgagaagaccccatcggcatccgcagcgtcttcatcacgaacccgtaataggcgccgcttgtctggatccatggtcgtttcccataattgttccgcgtccatttcaccaagccccttgtaccgttgaacaactggtttcggtgatggtgccaattgccccatgacctcactcaattcttcatctgaatcaatatacttcacaaatttaccttgccggacttggtacaacggtggttgagcgatgtacacaaagccagcgtcaactaatggccgcatgtaccggtaaaacaacgtcaataacaaggtccgaatatgggccccatcgacatcggcatcagtcatgataattaatttgtgataattggctttgctcaagtcgaagtcaccaccgaagccagttcccattgccgtaaacaatgaccggatttcttcattggctaaaatcttatcaatgctggccttttcaacgttcaaaattttaccccgaatcggtaaaatcgcttgcgtcaaccgggaacgtccctgcttagccgacccaccggcagaatccccttcgacaatgaacaactcactaatttcagggtctttactactgttgtccgccaacttacctggtaaattactaatttccaagccactcttttttcgcgtaacttcccgcgcacgcttagcagcgacccgggccttggaagcaagtaaccctttatcgaccactttacgggcaacacttgggttttccatcaagtacttgctaaagtgttctgagaataaccggtcaactgctgcccgagcatcggaattaccaagtttcgtcttcgtttgaccttcaaattgaggatccggatgcttgacgctgacaacagccgtcatcccttcacgaacatcttcgccagataggttcgcatcgctttccttcaacaagttattcttacgagcatagtcgttgatgacccgcgtcaaagcacgtttgaaaccttcttcatgcgtcccaccttcgtacgtatgaatattgttggtgaaggtcatcaaattactgtggtagtcgtcagtatattgcaacgcaacttctaccgtaatcccattctgttccccttccacataaatcggttctggaaatagaacggtcttattcttatctagatattcaacatagtgacgaatcccaccttcgtagagaaagtcatcttcagtgggttcatcagggcgattatcccgaatcgtgatccgtaatcccttatttaagaaagcgagttcgcgaatccgagtcgtcaaaatattaatgtcataggtggtcgtttcccggaaaatatcaggatccggaacaaaatgaaccgccgtaccatgagcatcatcaggcgcatcaccaatgatcttcatcggtgttttaacctttccacgttcaaagtccatgtaataaacatgaccattccgagttactttgacgtccagggtcgatgataaggcgttaacaacggaagccccgaccccgtgaagaccaccagagactttataaccgccaccaccgaatttaccaccggcatgtaaaatcgtataaaccgtttcaagcgctggtttacccgttttttcttgaatatcaacaggaatcccacgaccgttatcagtaaccgtaatactattatccttttcaacggtcacgtggatcacgtttgcaaaccctgctagggcttcatcaattccgttatcaacaatttcccaaactaagtggtggagtccttggctactcgtcgtaccgatatacattccgggacgtttccggacagcttctaaaccttccaaaacttgaatttgactagcatcatattcgcgagcctgttcaagtttggtttctttttcgttttcggtcaatgcggttcctcctcatgtaaagtgccatggctaacttcaaatacttttggcgcattaattaatttgcgggccaccccgtcaagacttggcgtggttaaaaaggtctgcactttatcttggatcgctgtcagcagatgagtctgccgtgcagcgtctaattctgataagacatcgtctaataataagaccgggtactcgcccgtctcagctttcatcagatcaatttcagcaagcttaacggacaaagcagttgtacgttgttggccttgggagccaaaagtctgcacatttttgccgttaacaccaaattgtaaatcatcgcgatgaggacctaataaagtcgttccttgaaaaatttctttggcttgttgttgctgatataaggcctgtagcgtttgataaatgtgatcgaccgacgtctggtcggcagttggcacttgagtgacatagtgaaacgttaattgttcctgttcttgcgtaatctcgctgtgaacagcttgcgcccatttctcaagttgctgcaacagttgtagtcgtttatggatgatttccgcaccaaatgcagccaattgatccgacaagacacccaaataaaccttatccttggcctgctgccgatttaattgccgtaagtattgattacgttgttttaaaatcgtgcgatactgacttaggttatagaggtatttagggctcatctgaccaaattccatatccataaaccgacggcgaaccgcgggtgcccctttaacgatggataaatcttcaggtgcaaacacgatcacgttcaaatttccgacgtactgggataatttggcttgctcaagatgattgactttcgctcgcttgccccgccgccccaattcaagttccagggggacagcaccggtacttttatgtaaccggccttgcaacgttgccgtggtggtttgccaccgaattaattccttatcgttagcggtgcggtgactacgcgttaacgccaacacataaatggcttccaacaggttcgtctttccctgcgcattttcacctaatagaacattaacgccctgactaaaattaatggtcaaatccgcgtagttccgaaaatcatgcaagactaagttttctaagtacatctaatcagtcgtttcttgatttgagcgaataaaaaatgacccgttgtcttcaacttcaatcgtatcgcctggataaagtttccgaccccgccgatcatctggttcaccattaactaacacggttgtttcttttaagaaccacttcgcctgaccacccgatccaatgatggccgtttcttttaagagttgccccaacgtcatatatggggttttaatatctattggctgtttcacaatgtcacctgcctatctgattacaagctattaaacgactgtctggcgtgctacacacactcctaacaggttatattatacttgttttttgatgaaaattcaatttataaccgcactcagagccattttaagacgatttaaggctttttaatatcgggatactagcctaggggtaaatttgctgaaattccctaattttgcggattttaataaaatatcttgttttttacctataaaaattggctaaagccagcattcattatctgaaagcgagcgtttgtagcgaacgagtgcaaggactggggttcatcagatggtgggattttagtagggcaacatcgatagttagcgtgacaattcaccagcagctaatataatatgcataagttaaaacttcaaaagttacatcatcgctattgcctattcattgccccatctttagctagttttagccgtcataaaaggcccgcatttcacggtgaaatgcgggccttttatttagaattgtatatttattcagctaattaaaacgttcgaactggtgtaatcaactgaataaagttttcgccttcttcagttggcactaaagtgaatgggcgcaatgccatcgtgaatgagattttgatcatagcttgcccaaacgaacgtaacgcttctttcatgtagtctgggttaaacgaaatttcaagttcgtcacctgacaaatcagtgggctgtagttgttccgttacttccccgacatctggtgagttaccgaaaatcgtaatcgttttgtccgttgggttaacggagaagcgaaccacattattgcgactttcgtgtgataacagggatgcccgttcaattgctgctgaaagtgcgggtgctgaaatttcaacagtcgtattagattctttaggaatcagccgtgacgtgtcgggataatttccttcgagtaagcgagaatagaaggacgtattccccagcacaaataggacttggttttctgataaccgcatctgcacgtcaggattattgtcgccgatcatccgagataattctgtcaaacttttaccaggaatgattacatcataattggcattattggcttctggcaacttgatccggcgttgacttaggcggtgtgaatcggttgcgaccgctaagaactcaccgttagctaagataaaatgaaccccggtcaggattggccgactttcctgattggaaacagcaataacggtctgaccaatcaactctttaagtacatccccagctaacgtgatggtattagtcgtatcaatttcaggtaagtgtgggtagttttcagggtctaagccgttgattgtaaaggaagcggctcctgaagtaatttgtgtttgaaaaccgtcgaccacgttaacagtcatggtgtcttctggtaatttttttacgatttcactaaagaaacgggcaggtaaaacgattgaaccggcatcttcaacgactaacgtattgttgtcatcacttgctggaatggtggtttcaatagaaatatcagcatcactaccagttaaggtaatagcgtcagtattaacgtcaagtttaagaccagtcaaaattggaatggtcgtttttgaagaaatggcccgttggacgttatttaattctttgatgaaggcagatcgattgatcgtgaatttcataagttaatcccctctttattctagcgacgggcactagatatatattaataataaaagttcgtagtaatagtagagcagtgggtactgtggaaaaccgagtaaagactcggcgttatcaagttttccacatgtgtataagttgtggaaaactttttgagttatccttttttatccacactaagatttgagctggcctgtcaaatcacccacggctttttgtaattcagcatcagttttgagtgccttagtgattttatcatgcgcatggatcacagtcgtatggtccttaccaccaaactcgttaccgatgcgcggaagtgaactttcagtcagttcgcgtgataaatacatggcaatttgacgtggaatcacgatttgtttattgcgtttctttcccttaaggtcagccattgttacatggaagtacttggcgactttttcctgaatgacgggaatcgaaacctctgatagtttactgctaaggtgcaaactcttcaatgcatccgccactaaactggtggtaatcggtgaattattcagtcgtgagtatgcctgcactcgtgctaaggcaccttcgagttctcgcacgtttgagtcgatctgaccggcgatataacttaacgtatcgtcagggatttcgatcccttcaagatcggctttattgcgcaaaatagcaatccgcgtctcgagatcaggtggggtaatatcaacggataatccccacttaaacctagaaactaggcgatcttggagttgcggaatttcgttcggtaagcgatcggatgtaagcacgatttgcttatcatcttcatataaagcattaaatgtatggaagaactcttcttgggttgcttccttattggcaaaaaattgaatgtcgtcgactaataacaggtcaacgttccgatattcttcgcggaacgcctcctgttttttagtttgaatggcattaattaattcattcgtaaaagattcgctagtcacatatttaatgttactagtcggatcggtttctaacaatttgttaccgatagcgtgcattaggtgggtttttcccagaccaacgcccccgtagaaaaacaacggattatacatggtgccaggttcttccgacacaactaacgcagcggcatgggccatttgattgcctttaccgatcacgaaagtatcaaaagtgtatttcgggttgagtttcgtttcccgcataaatgtgggggtagttgcggttgttggttgttgtcccgcaacgttaccggtagtcacttgcgagtccttgtctctcgtaagttgctgacgttcttcttccgttatcatgaccggccgaatctgctcgttagtcgcttgcatcgcaatgtccgtgaactttgcggccaagtttttctcccaatagtcacgatgaagttgtgttgggacttcgatcgtcatttgggctttatcgagttggagtggttttgccggttcgacaaacgtttgaaacgtgatcttggacagatcttgttccatagagaacttaatgagattccataagtcattacgttccagcacgtggataccccttttcttaaaaaacgtaattctattttagcatgaacatatagagttttccacaagtggacaagttaaagttaagagaattcacaggctgggatttgaatatacacagcttgtcgaaaactaggaattaattttataaaacagcacttatccacaaaagcgagttcaaaactaaagccgcaataaaagcgtttattggagttatacacacaacaaatacgccctgtggataactaaataacaacccgttaatttgtcgaaaaacttgtgggtaaattgcgaataacggaaagtcactttgctataatccacaaataaattcgcaattaaataattttttgacctcgaattactacggagaaatttaatttactggttttcaaacaaataaaaatatgctatagtagtcaggaaatgcgtttagatgtaaactgcgttttgaaaataacgacttaatcgaattgattcatgtcattatggagaaggaggtgtcatgatgaagagaacttaccaaccaaagaagcgccatcgtcaacgtgtacatggtttccgcaaacggatgagcaccagcaatggccgtaaagtgttagcccgtcgacgccaacgaggcagaaaagtattgtctgcataggccactgataatcagtggctttttctttacagtcctagaccaggtgtttagggctgtaaagttgtgtagcaattcgctcaagagcttgagcgcacacatggagatggattatgcgaaaatcatatcgggtaaaaaaagaaactgagttccaacaagtttttgagacccgcaactcgtatgccaatcgtcaatttgtcatttacgttttggaaaaaccggggcaaccccatttccgcgtcggtatttcggtcggtaagaagatcgggaacgccgttgcgcgtaactgggtcaaacgccggattcggcaatcaatcaccgagctaaagccgcagcttaagcaagatgcagactttctcgtcattgcccgaccaaccgttgctggtaagtcgcaagccgaaaccaaagcttatctaagccatgcgctaaagctagcgcacctgctggacaatgattaaagtgaggacattcgtttgaaaaagtacagaaaaatactggcaatgctggccgtactagcgatcgtactagttttgagtgggtgtagtaataccccaatcacggataagagcaccgggttttgggatggcttaatcatcttgaacttctcacgggcgattatttggttatcaaacttgtttggtcatagttatggtctcgggatcatcgtctttacgttgatcatccggatcattatcttgccattgatgatcttccaaacccgcaacatggtagccatgcaagaagtccaaccgcagatgaaggctttgcaaaagaagtattcgtcacgcgatatggaaactcagcaaaagctccaagcggaaatgaagaagttgtatgccaagcatggtgtgcatccaatggccagcatgttgccattactagttcagttgcctattttgattgcgttgtaccaagcaatctggcggacacaagccttgaagaccggttcgttcttatggttgcaattaggtagcaaggatccgtactacgttttgccaattctagcggcgatctttacgtttgctagttcctggttagcgatgaagtcgcagccagaacaaaacgggatgacaacgtcaatgacgtatttgatgcctgtgattattttgattacggccattaacgtgccatcagcgttgtccttgtactgggtgatttccaacgcgttccaagttggtcaaaccttgttattacaaaacccattcaagattaatcgcgaacgggaagctaagaagcaagctgaacgtgatcgtaagcgaacgcttgaaaaagctagaaagcgcgcgattcgtaatcataaacgttaaatacaagtagacctgccatgtgtggtgggtcttttttgttggctctgtatcatctttaccaatcggtcaatatgatttggactgtgatggcaggatgctaatgtgcgtttatgtaaggcccctggacggtccgtgatgaggaaattgtaatgaacgatcaaatactggtaatagtaatcatccggggatcaaggtgcctataaaaataattgtctgcaccattttatcacatgtttttaatagcgtgccgcggtttgagagagctactttgtcagtcgtaattagaacgggcgattaaaaacgtaatgacccggcgcatgaaaaagttccaaaaaaagatttgacaaattgaaaaatgaccgctaagatgtgaatcacattaaaaaataattagattaagcgaacggcagtcgaggagtcggttatcagtcagttacagcgagtcgcggatgatgaaaagcgatctgaactggtagctaaaagtcgattactagtgagaagttgcgtgaagcaatttccgggtgtacccgataacgtaccaacatatcgtcaataaatttggccgtatgtaagtggtgagtctgactggctcgcaaatgaggtggtaccgcgtgaagacgtccttttaagcataacagcttagtagggcgtctttttgttttgcgggatgccggttgatctgattaaaatcaaaacataatggagggattagagatgcaagcaaagtatacatatagcattataggggtggtgagcgccttattattaaccggctgcttgggggcggtctctaattcttcgaaaacgaccagtacggctgatcaaaataggacgttaggcatcacgattcctggcgaaccgatgacgactgatccaacgacttcgatcgaaaccaacggcggtgccgtaattacacagactggtgaagggatttaccgcaaaaacgcgaataataagattgttgcgggggtagtcgagaagaaggtcaagcctactgaaaacaagacccggtatacgtttacgattcgcaaaaatgcacgctggcaaaatggaaccaagatcacttcacaagatttcgtgacggcgttgcggcggcaagctaatccaacaacgaagtctcaaaacttggatgccattagttacatcaagaactttgatgccgttaataaaggaaaaatggccgttaataaattaggtgtgacggctattaataagcgaacgttttccatcaagttgagcaagccggtgccttatatgaattatgagtttacgagcttttacccactcaatacggcggcagtccagaaatacgggtttaagttagggagtaactcagcgacgacggtagcaaacggtgcctacgttattaagggctggaaaggctctaatgatagttggtattacgttaagaataagtactactggaatgccaagaacgttaagatcaagcgcatcaaagtcacggtcactaaggatgataatacggcgcagaacctcttcaacgccggaacggtccaagtgaccaacatttcggggcagtacgtgaagaataatgccaataatagtcaaatgacggtcactaaaactggccggaataattacatttatttcaatagtaagaagtccgtaactgccaatgagaatttccggcacgcgctaagcctggtcattaatcaaaaaacactagcaaaagatgtcttgcaagacggctcgcaagccgcgacgaacattgttccgaaaaactacgcgagtgatccgactactggtgaggattttgttaaggaagttgggaacttatcaccgactaatatcaagcaagctaagcagtattggcagaaggcccaaaaggaactcggcaagcaaaatgtgactttgaattttctatgcgacgatacggatactgagaagaaactcgctgaatatgtccagggcgtggccgaaaagtatttgaaaggcgtgacgatcaagatcgttgcggttccacacgcgacccacgtatcacgtgattttacggggaactttgacctcgtcacagtcggttgggggccggattatccggatgcccaaaactttttggatgggatgcagagctcgaatagcatcaactttactcagtggaaagatgcgaagtacgatgcgttgatggccaaggtatctaatacggcgaaatacacggccgcgcaacggtggacttatgaaaagcaagctgatcgccggttgatgaaactcgatgccgtgattcccacttaccaagcctcttctgcatttttggtcagcaaggatgttggtggcttgcaatgggatgaattttctggaacgtccagtcaacttcaatatgcttattggaaataaaaacttgtcatgaaaggtggtgaggcgtggtgaatagtcagttagagaaccaacaatgcagtgatgaaaatgatggtccgttaccgttaatgaacggtgtgcgacctgccaaaatgaaaggaagtcattattatgaccaaaaccaactatatcaatgcctcaatctacagttcagaaaagcaaacttttatcgataatcaattcatgactgttgacgacgcaaccggaaaaatcatcgcggtcggtacaggaaccccggatacgattgctgaacaaacgacagacatgcaaggaaagtatgttatgccgggcatcatgaatgcccatacacatattaccagtattccaacttactggtggcatgacggccaggaagaccgccatccggagtcacgtgagtataataccatgtatgcgattcacaatatgcaagatatggtaaaccatggggtaacctatattcgcaatgttggcgcccagtatgatattgacgttgcgatttcaaagatgcaacgagaaggaaagattgcgggtcctcgcgtgatgacatctggccaggccttttcaattacgggtggtcatggtgcggatggcggccacgaagtcgatggtgtggatgcggtcgttcaaggtgttcgccaggcccttaaaatgggcgtcgataatatcaagatgatggttaccggtggggtacttcgaaacggcgagaccccagatgatattcagtttaattttgaagaagttcaagcagccgttgctgaggcccatcataaaggcaagacggtggcggctcacgcgcaggggaatgccggggtaaaagaggcggttcaagccggcgtcgatactgtcgaacacgcctttgatattgatgatgaaacaattgagatgatgcggcaacatggcactgtgatcgtaccaacgatgaacgcgatgtatgctatttataaatatggcgagaagaccgttccagcatgggcgcgtgaaaaggtaatcgtcaacatcaagaagcattttgcaagtatcactaaagccgcggcggctggcattcccatcgcgatggggacggatgctggaacgccttataatggctttgaggatgaatcagcatacgaaatgcagctctatgtcgataaggcgggcatgactcccgcacaagccatcgatacggccacaatcaactgtgcccgtgcgatgcatgttgcggatgaatacgggacgatttctgctggtaaatttgcagattttattgcaatgaccgccaatccaatcgaagatattcgggttattcagcaagataaggatgttttccaacatggcattcaagttcatcaagcggctaaaacggccggtgttgatgagcaagttcctgtacggcaggtcgggtagtccgtcttattgagaatcagggctaagtgtgggtagtcttgattcgtcatatgaccagttagtgtactgacaggtgggctggttctggcttgaatttgatagtggtttgatttagtggccaatcagtaggtcagatgccgtgaattagtcggctaaaaatactagcattataaaccgattttctagtcattacggacgggaaaatcggttttattgagtttagagcagctttgatacggctcgcgagtggcaattagtaaatacggcaaagggaggctgtgggccgcgtctctgaaacgcgccatgaacaggttggttattgacataataagcactagattttgctagtctgagttttcaggggtagtagaacggccgaagtcctaatcgttgtaagggttcattaagtgttcatactcaggtgttcgcatggcgaatggtaatgctataatgaaagcaggatttttaacgaggaggattcaagcatgacagtatttgaaggtaataccgtcgcggccgcaatcgcggctggtctaaaacaactgcaccgaacacgcgatcaagttgaagttgaagtgatcgctgaagcaaaaaaaggatttctggggctaggcaaacaccccgcccaagtacggctaacggtggtgccagcctccgcagcacctgcaacgacgccaacttccgctacggcgacagcgcaacagtcagtagctactgaatcaacgacagcaccgaccatgccgcggcctaccgtgcggacaccaaagtcaacgccgaccagacaagctaaaactagtcaggccacgaccagtgccgcaaaaccagcgactagcaaggcgaaagcagtggctaaacccgcttcaatggcggttaccaccggcccggttatcgctgataccgaccaatctaaaccagcgaccactagtaagaccaaatcagtggctgctgaccagagccagacgccgcggacacccgcagaaattgcagcgcgccaagcagctaacgagaccgcggtgcgggcgttgtgtgattacttgcttgcggtggtcaaagaactaggtgtcacggcggatcttgacgtcgacttcggcaaccgctatgcgacattgaatttcgatacaactaagcagggtttgctgattggcaaacacggtcgaacgatcaatgcactgcaagatttggcgcaagtttatatgaatcatcatggtgcgtcacacgttaacgtggtgctagatgtggatgattatcgggagcgccgggctgcgacacttaagcggttagccgagagtacggctcgagaagtgattgcaacgggcaaacaagttttcttggacccgatgccatcgtttgaacggaaattaattcacgctgaactagcgaataatcaccatgtaaccacattctcagaaggccgcgatccgcaccgggccgtggttgtggcgattcgcaaatagtttattcaaagtaacgcaaacaggcgtttgacaaactccgggtgagctattatagtaggtgttaatcattcttatcttttagataaagtagtcaaagtgctttatccacgctttaaggtggcgtggactaggcgctttttttctgcattttaggacatattattaactaattgtaagtaaatttggtatggtattaggcgatgaaacgctgacaagaaaggacatgatggtatgccaacgaccacagaatttgacacgatcgcggcaatttcaacgccgcctggtgagggtggtatttcaattattcggattagtggggaccaaacgtttaacgtggtgacccagatttttaagggtaaagatctcagtcgagtgcaatcacacacaatcaactatggacatattgttgatcctgatacccatcaggaagtcgacgaagtcatggcgaccgtaatgcgcgcgcctaaaacctatacgcgtgaagacgtggttgaaatcaactgtcacgggggactcgtggcaactaatgaaattttacaattgatcttgagtcacggtgcgcgaatggcggaacccggtgaatttaccaagcgggcattcttgaatggtcggttggacttgtcacaggcggaagcagttatggatctgattcgtgctaagacggataagtccatgaaggtcgcgttaaaccaattagatggtgatctatctaagctgattcgacatttacggcaagatattttggacgtattagcccaagtagaggtcaatattgattatccagagtatgacgcggttgaaacaatgaccaccaagatgctgaaggagaaggctaccgaggtcgcccaaagcattaatcaactgttagcgacggctaagcaaggtaaggtcttacgcgaaggtttggcaacggcgatcattgggcgtcccaatgtcggtaaatctagtctgcttaaccaccttttgcatgaagacaaagctattgtgacggatgttgccgggacgacccgcgatgtgattgaagaatacgtcaatgttcgtggagtgccattgaaactcgtcgatacggcaggaattcgggacactgaagataaggtcgaaaagattggggtcgagcgaagtcgcaaagcaatcggggccgccgatttagtcttattagtgttggataatagccaaccgttgacggctgaagaccgagagttgttgcaagagactgaccagtcaaaacgaatcgttatcttgaacaagactgatctaccagcccgtcttgatcaagctgaattggcgcaattagtcgatttgagtgacgttttaagtatgtcagtcttggaacaaagtggcgtcacgcaacttgaacaacggattgccaagatgttcttcaatgaaggtatcgaaagtagtcaaaataacgtgatggtgaccaatgcgcgtcacatcggtttgttgaatcaagccaaacaagcgttgcaagatgttcaaacgggacttgcggctggtatgccagttgatttggttcaaatcgatatgacccgttgctgggaattcctcggtcaaattaccggggatagctatgaagatgaattattagaccagctatttagtcagttctgtctgggtaagtagtggtaggaggaaattggaatgacagaagtaaagcagtacccaggccgcgactatgatgttatcgtcgttggtgctggtcatgccggttctgaagcagcattggccgctgcccgaatgggtaaccggacactcttaatgacgatcaacctagacatggtggcctttatgccatgtaatccatcggttggtggtccggctaaaggaattgtcgtccgtgagattgatgctttgggcggtgaaatgggccgtaacattgataagacttacgttcagatgcggatgcttaatacgggtaaaggcccagctgttcgagctttacgggcccaagctgataagcatgcttaccatgcggaaatgaaacacacgattgaacgggaaccgaatctgacgttacggcaaggaattgtcgatggcttaattgttgaagatggggtctgcaagggcgttatcacgaatacgggagcgcgctatagtgccaagagtgtcgttttgacgactgggacggcggctcgtggcaagattatcattggtgaactaatgtattcttcgggtccaaataattcgcaaccagcgatgaagttatctggtgatctggaacgacttggatttaacttggaacggtttaagaccggtacaccaccacgagtcgatggtaatacgatcgactacagtgttacggaagaacaacctggtgatcctgaaccacatcattttagttttgaaacgaaggatgctgactacattgatctaaagcatcaattatcttgctggttaacttatacgaatgagacgactcataagatcattcgtgaaaatcttgatcgagcaccaatgtttacaggcgtgattgaaggggtcggaccacggtactgcccatcgatcgaagataagatcgtgcgattcgctgataagaagcggcaccaattattcttggaaccagaaggccgtaatacggatgaatggtatgttcagggcctttcaacgtcgatgccggaagaagttcaacagcggattttacattccattaagggtcttgaagatgctgaaatgatgcgcccaggttatgccatcgaatacgacgtggtggcgccttaccagttaaaggcaaccttggaaacaaagttggtcaagaatctctatactgctggtcaaacgaatgggacttctgggtatgaagaagccgctgggcaaggattaattgccggtatcaacgctggtttgcgagcccttgatcgtggtcaattcactttgaagcgtagtgatgcttatattggagtcatgattgatgacttagttaccaaaggcaccaatgaaccctatcggttactaacgagtcgggctgaataccggttgatcttacggcatgataatgctgatttgcggttaacggataagggccgcgagttaggattgattgatgatgaacggtatgtggcatttgaggcgaaacgccaagcaatcaagaatgaacttgaccgtttaggcaaaatcagaatcaagcctaatgatgaggtcaatgctttcttacgtgctcataattctggtgagcttaaggatggtgtgttggcggcagatttcttaaagcggccagaggtacaatatgctgatttaatgaaatttatcccggcagcacccgaaccactagaacggcatgttattgagcaagttgaaattcagatcaagtatgccggttatatccaaaaagcagaggaacgtgttgatcggttgaagaagatggaagctaaaaagattccggatcggatcgattatgatgcgatcgacggattagcgactgaggctcatcagaagctaaagaagattcagccgacaacgattgcacaagcttcacggatcagtggggttaatcccgcggatattgcaattctgagtgtttatattcaacaggggcgaatcgctaaagttcaataatcatcagtagtaggttatgactggtgtgttcagttgatattaacgaatgatgaaagaaaaaattaatatttttaacgataaagcacaattccaacttggaattgtgcttttttagtgagcttactttttaattagtacacgtttcattaaaaaaacaacaacactttaattaatgatgactaaattaaattaaggtattatacttcagaactagtaaacattgtttacagtgtttacaaaataaagggggagttattgttggtaagagttagtaagttagtcagtggtattttagtggcaagtagtttattagtgagttcgggtgtcatcgctcaggcagatacgcctgctgctcccaacgcagatagtacggccaatacgactggtacgactgatattcaggcgatgtttaaaggaaatagtagtccggtatcaccagttaatccggataatcccaataagcctgataatagcggtgatagtggtaacggtgctaaagccggtggcggcttatcgctgatctacgtttctaataaattagattttggaagccatgagatcgatgttttaaatccagaaacgtacactgccgcagaaactgattcggatttatcaggcttatggaacaaaaaagcagtcacagaagtatctgatgtccgaggaagtaatgctggttggacactggccgttgccgggagtagtttgactggtacagacggttctgtaatgaaaggggcaacgcttcagctaccaaaaggtacggtaactaattctggtgcaactaataatggcgtgcagtccactgaggctcttaatgtgttagatggtaattcggcgacagtattatcggcagcgaaagatcatggtgctggtgtaactgttgatcaaattgatccaagtaatgttaagttaacggtgccggcaaacacggctaaagcgcaggggtaccaaacaactttgaactggagtttgagtgatacaccagcaagttagttagaatataaccaagaggggaagctaaagcagatggcgatggctaacggttattatggataaagtaatcgttgatgtaatcgcgagcagtggcttcccttttattaaatgatagctttaaaagatgcgtcataatatggggtgtgttgagattgaaagtggttatccaattcataagactaatgggtgtgagtcttggatttagtattttaatcggacagacaggagtgtcggctaatcggcaacaatcggtccacaacaacaatgtcggttttagtgttgccgctgagataccaaaaaatcagattcataaacaaaattctttttttgatttgaaaatggcaagcggtcaacagcagacgttacggacagtcatttacaatgtcactaataaggatattaaggttcgaacggctattcataccgcgtatacgaatattaatgggacgattgaatatattaatccggccaaatcgtacgatcagtcgttaaaataccgagtcagtgatttagccacaattcagggtgagcggacaataacgattccggctgaaggctccaaaacggtcgcaatcaaggtgaagttacctaagcagccagtaaatggcgtcttgttgggtggatggtattttaaacgggttgatgacaaggtaacaggagtaacggagaaaagtatcaacgttaagaatgagtattcgtatgttattgggttgaaattatcttcaggaaaattgccaattcctaatttgtgtctagggccggtgaaagctggcttgaacaattatcatcgaagcattattgttgcgctacgtaatcctgtcgcaagaattattccgaatttaaaaatccgaacggtgattattaataagcggcatcaaaaggtcattattaagaatacgaaaacgggtgtcatgatggcgccaaacacagtttttaaagcaccaatgccattaggatcacaacaattacaaccgggtgattatcagttacaaatgacggttaataatcagcgtcatcattggcgatttaaacgagattttcatattagtatgacagcagctcaaaaatataatcatgagtcaattgataataagggggttagtatgtggatgctaattggaattggcgcaatttcaatgctagtactggggttagggttaggcgtaatcgtctggctatggcggcgacaacggcggtcgaaggattaggttaattaatgggggtaggatggtgcaacggtttagcgtgtgtgtagcaaccattttaatcagtttaataatgttcacaataacgggagttgcggccgttggggggcggtcaacagtcaccgttagcttttatgctggtcagagaactcagcaacagatagataatcgcaacgttaagattcctaatggaaccaggccatatcgtgtggtgacagaaaagacgttgacaagaccaaaggggtattatcaattaccacagactgatgagcagctcttaacctggttttatgcgagtttcggtagcgtgctactgatattattgatggttatccgttggtttaataaagaaagctattgctaggtaaggagggaccgtagaagtgagaaggttacttactggcacgttggtcgtgggtgggctgttattggtagtttgcctcatggctgttaatgggcaggcaaaggttgtcgatgagccgaccagtgcgatgcaggatattacaactaatttcgaacaacgaacaattggtcgagtgccatggcccattacacacattgcggctaattatgtgcgagatggtcacatgacgcacaagactagtcgagtgaaaattactttagggaaaggtgtagtacattcgccgaatggtaagggattatataatttatgggatctggttttgaatcgccaaggcaaagagtatggcgcaactttcctggcgtataatatcaataatcgagtttggcgaccgcatcgaacagatactatcaagacgcatggaatcaaagcaggtcagccggtttggattggtaataagagcagtactaatgcgagcagtaatcccattcgaacactgcctgcttacatggtaacgaagcagtactgtcaaatggttagtcagattaaattatcaccacatattactggatttgaggctaataagcgcatcattaccgggacgggcacacaaggtggtgatctaatcatggctaaatttggtaatcagatcaaaaaaacacgagtcgatcatgaggggcgctggcagatgaaatgctttagcggtaatggtcacttgatggtaacggaaacaaatgcgtatgatgatattccagggcacactgaaacggtgattaataacggaactccacgaacggatgcgacgattaagctcaacttgtttttaactaatggtcataccttttcaaccgctaagggacgcaaggtattagtgaccggaatgatcttggggactgatcagaatgattttgatcgcgatgttgttttaaaaaataacgcactaaccatccactttgcccatgctgatggaacgcccatcgctaattataaggctaatggttcggtgaatgagccagataaggcggggtattttcatctgaaattacccactgaatcgcttaaacaagggcctaatgatgtgaaagtgtgggtgtcagatcaacacggccaacgatctaatattgatacgttaacagttaatgtaaattcaggactcatgtttggtcaaatcaatgctcaaatgcgttttcggagtaacacgattccacaaagcgagcgcttattatcgcccacaaatcagtggcaaattgaggttcatgatacgcgatcagttgcttcaaagtggtatgtgtatgccaccgcaactaaaatgaagtctgctcaacactcattaattggggatttggtctatattgatgctgctggtcaaaaacatgtgatgaccaatcaggaaacgttggtaggccatggcacacatacaaatcctaatcaacaaactacaaatattgcagcaacctggcaagcgcgacaaggtatttttctcgatgttcagcccgaattgtatgcaggatcctatcatggaaagatcaattggagtttgcaagatacaccacaatcttgatgagtggaagaaagatgtcatcaagatgtgttagttagtcattaaggaaattatgaatgaccgtcaagattgttttggcggtcattttagtgtgatatcgttgcaaggttacttataaatttgtaaaaacgattcaccaataccagacaagctgagttgattggactataatgattggaagttatagcggggtaagggagaacgtttgatgaaaacttttaagagtattatgagctgggtactaccaattgtagtggggttactcgtcgccatggtgatcaggcactttatttttacgatggttcgggtggatggaccgtcaatggaacctaacttagatgacaatgagcgcgtcgccgtggtcaagacagctaagattcagcacctcagtgtcatcgtttttaacgcctatcaagttgatccagacgcacgctccaagacggtcaaatatgtcaaacgagtgatcggaatgcccggtgatacagttaaatctgaagacggccgactctatgtcaatggcaagcttgtcccgcagaagttcatcagtcagtatgagcggacgcagggaacgacaaattgggatttgagtacgctggagaaccgttacagttggaatctgaaaacaactaaggtccctaagcattcgtactttgtgttaggtgatcatcggtcagtgtcaaatgatagtcgttactggggatttgtcccagccaataaggtattgggtgtggtcaaagtgccattttgggactcgaataaaactaagcgccataatattaattcaattagttactgaatagcagccagcgcgactcgttagtgagcgcgctttttttgtatgctcaccaactgaattgtaggggggaactaagttggttagtcattctttacagggagaacaacgtgggatggttaaagtgactaatgttgttcagaaaagcaaacaaaaggtagcatctaaattgaatttaatggtcaataagcctagaataatggcaagtatcacgatggaggctggtaaatatggcaactgaactaacaccggatgcacttgccgctttacggacaacgcatgcgcaggatcgaatggcaccagtattgacgcgagcgattacgaagaatgggattgaggctgcaagttttgataatcaagctgcgagtcgcttagcgcggactttttctgttgaagtactaacgggtaaggtcagtaatcagaagcacagcggtcgttgctgggagttttcattattaaacacgctccggcataagtttgcgacccggtatcacgtcaaagactttgagttatcacaaaactatttgtttttctgggataagattgaaagggctaatattttttatcggaatgttgaacaaacggcgcgtcagccgattgatgaccggcttgttcagttcttatttgctaatcccggcgaagatggtggtcagtgggcgatggcggccagcttggttcaaaagtatggtgtcgttccagctagtgtgatgccagagtccttcaacactgataatacgacggcatttcaagccagtttatcacggcagcttcgtaaagatgggttaaaacttcggcaactcgtgatggatggtgcaagcgaggccgagctacaatcactggagaaatcaatgttgcaaacggtctatcggatgacggcgtactcatttggtgaaccaccaactagctttgatttagaatatcgtgatgatgagcaacagtaccatcgtacggctaatttaacgcctcagcaattctatcaggactactttgaaactgatctggatgattacgtggtcgttactaattcaccagataagccgtttaatcgactttatagcttgccagacgaggataacgtgattggtggtaagcctatcgaatttttgaaccttgatatgggtgtgctgacggacgttgctgtgcaacagttacaggctggcgaaacggtttggtttggcaacgatgtgttgcgacagatggaccggaagacgggatacttggatgcccatttatttgaaactggcaagttatttggaaccaacgatcatctgactaaggcgcaacggctgttaacaggtgaaggtgaagttagccatgccatgacgttaaccggcgttgatttagtggctgatacgccaactaagtggaaggtcgaaaatagttggggtgagcaagtaggtgatcaaggctacttcgtaatgagccaagattggtttaatgagtacgtctatgaagtagttgttcacaagcatttcttggcaccggaatttcaggcgctgcttaacgaacgtgcacagcggctacccgcatgggatccgttgcactaggagggtaatgtgatgggaatattttcagaacgattaaaagaagcgatgcaacaagcgaacataacctctgctcagttatctaaacaaacgggaattggtcgttcatcaatcagccagtggttaagtaataaatacgtggctaaacatgataaggttacggcgttagcgacagtactgaatgtgtcgccagattggctgctaggtacgactgatgttgcaacagcggtggccccggaagcggtaccgattccagtatcggtcacgccaacccctgccgttgaccccgaattaataacattgtgggaacagctggataccaaacaacgatctaagttgatcaaaaaggcacggaagttgttgactaaatcggccgaacagcccaacacaaagcggaaaaagaacaagaaaaagaaaaaaggcaagaaacggaaataaggcaatgcaaaaaacaacttttgctcctcagctcgtcgtgaggagcaaaagttgttttttgactgtcatgatgaattatcaggggttgataatggtgaactaaatggtccatttttcccagtcacgcgcccaaatcagtcccatgacgccttctccaacgtgaaccccaacgacgggaccaatctcgccttcatcgatggtgagatcaggaaagctagccttcaagtcagctgtccattcggcttggagtttcggattgttgccattttcgattgtgacgcgaagtggatagtcaacggcagcaatctcagcagccagcttggctttgatggctgcgtatgcccgccgcatcgttcgttctttttgaatagcgacgatcttgccatcttgaaaggtcagaacgggtttaatgcgtaagaggttgccaacgagtccagaagcgtttgagagccgaccagtccgaaccaagtgactgagattatcgacaacaaaatatacgccggttgtttcacggatttttttgagctgagcaataacttgttcgggtgagtatccttcagcgactaatttagcagctaacaagaccatgtaagcttctccaccagccgtaattagtgaatcaaacggataaaccttgatgttggttacgtttggcaggtaactttcgagattagtaataaagctggtgataccagaagaaagatggatactaatgacagcatcatagcccgcctttgccagctgatcataagtcgtttgcatctgaccaagggtaatctgagtggtcgttggtaactcaggcgcggtacgcattcgttcataaaattctttggacgttatttcgacgttttctaagtaggtttggtgaccaaaaataacagtaattgggacgacgtgaatatgatacttttcaacatcggccgctgagaggtagcttgcgctatccgttacaattgcggttttcatttttcccccgctttcatttggtgaaagtattgcctaacattataacgcttgtcagtagttgaaagctagctttgatgaatagattaaggcgattaatgtttgaaattctcaacaactaacgtcataatgagaatcattaaatgggggagggcgcaggatgaccaaacgaattgagataaaaccggcaacagctgcggatcaagcagcgctggctgaaatatatttagtggaccgtcagcaagattttccatgggtcactgatccacaactgcaagattttaacgaagacagccgtggtgaattcgtgctggtcgcgtggattgatggtcagcgggctggcttttgttcgttgtaccggctggccaacttcattcatctgctttttgtggccccagatttccgccacttgaaagttggtgaacggctactgacagaaatgcgccagtatgcaaccgaaccactcacgttgaagtgtgtgatggccaacgaaaatgccctgcgattttatgcgcaagtagggtttcgaattgtcaaagcagatgcggacgcgctcccaccaaattatacgttgcgtgatacgcatactgagcagtacgtggcattagtggatgttatggccaatgaacgcaaacttaattaatctaatttatttttaattttaaggttgacattgtgataatctggcgctagaatctaatcattaattaaatttagattaaaaaccgtgataaggaacggtgctaagctggttagttagcgagctgcggattggtgtaaggcagtcaataccacttaacatagatcaccttggagttgcgcctcgaaattcgtggagatggtgctggatggtacccattaatgtaccggcgtatcgcaattgctgtacgtactaaggtgactattgtgaagtagtcgcgaataaaggtggtaacccgttctggacgtcctttaattaactcataggagttagttaaaggacgtttttttatgatttaaaggtggtgaggagtatggaatcggacattcaggtggctagttaccaacaaatgtgggcaatggtaactagtcgcacgaggacttgctcctcgagtaacacataggtcaacaaggaatcaaaaacacatagtataactgagtactccgggtagatcacatacgataccacgtgtatcgattaacacatagttttagcaacgtgcaatttatacgtttaggcacacatagttttaacatgaacgatatttatgacccgtagtcttaataattcgtatttaagacgcccgtacaattagctggcgcactgaatacatccaaataatgaagtgacaactagattaattgtaatgagttaacgtattagcaatggttagacggcctcattacgaacacatattaggataacagtaaccacaaacacataatggaggttttataatgacaactaccaccacagaaacagaaactcaagttgcacaacagctatttacggcctatcagacacagcatgcgttaacaatggctgattttacaagtagtgtcgttgacgaagacgctgcgtatcgagttcaagccgcattaacggccttaaaacagcagccggttggtggatacaaggtctcgttgacgagtgcggaaactcaaaagatgtttgatgctcatacgccgctgtacggtgtccaggttgcggatcactttttggcggcaccaaccacggttcgacgcgggcaactaatggacccactcgtcgaagtggagttggtctttaaggctaaagaagacctgtcaaccaccgattcattgaccgatttatggcaaaaaacgactgtcgcgccgggacttgaattgccagattcacgttttgctgactggtttcccgatttgcctaaaaatttggtggtcgcggatgccgcagtcggtgggctagtggtatatggaactgaacgagagactgccgagttgttcgcttcagctgatgcagtggcaacgtcaaagtgtacgctagtccatgatggggggacggttaaaactggtcaagcgagtgaagtgttgggtaacccgcttgagtcattgaagtggttagtcggcaagcttgcagagcaaggtaagacattaacggctggccaacgagtttcgtcggggacgtttgtcctaccaccacatttgaccgcggggcactggcaagccgacttcgatgccgggctgggacaggttgcgctggatgtaacagaagcctaagtaaaataatcacgaaaaaggccttcataaatgtcatgacatttatgaaggcctttttgaagtgttgctaaatgaatgtttttcagatgattagtaattttcaaagattggacagactgctaattatccaatttgtagaccagaatgtttcacgtgaaacattacttatttaaacgatggtagttttgatcaaagtacttgccgttgcgaatatcattcggcatttctttgtaaggtgcttcactgattatatcttcattgttttggccggcgtcgcccatgtaagtaatattggcaaattcgggtacaactagttttggataagtggcatacttttcacgagactgttccattaaatcgatgtgttcgttttggtaagtgaccgtaatttcagggtgttcttcaacccactttgggaagaaaatcgtaccgtgtagtttcttctcattgggcatgaagtctagtgcaacgtcagtcccagttggttcagtccaagaaattttgtaaatgccttcggtcaacatgacgatgtcagctttttgatcagtgacccaacgaccggcaaccatcccaccgtggattcggtaatcaacggtgtggtcgttcttggcgtaccactcgtattcccagccgttatcataagtgtagataaagtgtgtgccgagaaagtcatcaagtgttttaaaagtttttgtcattagaattaccttccttatgtctaatatgtcattttaatcatgtaatttattacatgttttaaacaacaaggttagtgtatactgttatcaaggaatcgtcaaggaggaatttccaatggcgcaaaaaaacaagttacaatttattattctagggttattaaaccagcaaccattaacgggctatgatctaactaaagcctttgatgacgagatcggtgaattctggcaagctcaacatagtcaaatttatccgcaattgaagcgactagaagaacaaggttacgtcacgcatgaaattacggtcagtggcgaaaaacttgaaaagaaactctaccacatcaccgcaactggtcggcagctgttacatgagtggatcagtgtcggtacaccagacttaaccgctacgaaagatgaatttattttaaaactatactttattcaaacggatcgtgatccacgcctactagcgatgttacaggaacagctcaccctgcacacagctaagttagcacacttacaacagcgattggcgaccgttttcccgcaagctaaagctgctaagcaacattatggtcactatttgatcttacaacatgcgatcggacgagaagactactatgtgaattggttgaagcagacgttgaaagccttaccggagtaatggggagagtgctgccgttctaactggtggctggaatcatagcgttaaaagctacccttaattatttagagcggcgtttgaaggaaatcagcttatgattatatgcgtgtgagaaatggtgccgtttgaattctgaaactggtataatggcagtggtcaatatcaattcacttcaatgaggagattaactatggaaaatcaaaaaatgcaagagccacttgtctatcggcgaattttactgaccgttgatgaggacgataatacctcttcagaacgtgcgtttcgatacgcaacgactttggcccacgactatgatgttccgttaggaatttgttcggtgctggaaagcgaagatatcaatatctttgattcattaacaccgtcgaagatccaagctaaacggaaacacgttgaagatgttgttgccgagtacgttcagcttgctgaacaacgaggcgttaatcaagtagagccgcttgtctatgaaggcggtgatgtggatgacgtcattttagagcaagttattccagaatttaaaccagatctattagtgaccggtgccgatactgaatttccacattctaagattgctggggcaattggtccgcgtttggcccgaaaagcacctatttcagttatcgttgttcggtaatcaagactcgggacagggattaagatccaagctgatgaaattttaacaaccgcaagctcatcatggctaatgaggagcttgcggttgtttttgactgctattgttcattaatgaacttaacaatttaatttttttgttggctataaatactgctaaacatgagtttataagtgtactgtttggatgatattaaataatttttcaaattcttgttgcattatgagcaaggatgactataataaagtttgtaaattaattcacaaaggaattgaacggaggaagcacttcatgattaagacagaaaaaaatcaaacaagcaaagttactgatgaagttgatcaattagttcaacgttctaagaaagcattagctattttgaagtcatatacccaagcacaaatcgatgatttatgtgaaaaggttgcggttgccgcactggacaatcatatgaagttagccaagttggcggttgaggaaaccggtcggggtgttgttgaagataaggcgattaagaacatctacgccagcgaatatatctggaacagcatgcgccatgataagacagtcggcgtcattaaagaagacgatgaagagcaactaatggaaattgctgaaccagttggtatcgtagccggggttacacccgtaacgaatccaacttcaacaacggttttcaagacgttgatctcattaaaggggcgtaacacgatcgtctttggtttccatcctcaagctcagaaatgtagttctgcggctgctgatgtgatgcgggaagcgattaaagctgctggtggtccagctgatgctgttttatacatcgaacacccaagcattgaagcaaccgacgccttgatgcaccatacggatgttgcgacgatcttggctaccggtggtccaagtatggtgacagccgcttactcatcaggtaaaccagcactgggtgttggtcctggtaacggcccaacttatgttgaaaaaacagctgacattaagcaggcggttaacgacattgttttatcgaagacgtttgataatgggatgatttgtgcttctgaaaatagtgccattatcgacaaggaaatttatgctgaagttaaagctgaatttattcgtttgggttgctactacgttaaacctaaagatgtgcaagccttgagtgatgctgtcattgatcctaaccggcacacagttcgtggtccagttgctggtaaaacagcttatcaaatcgcacaaatggctggcttgaaagatgtcgctaaggactgccgggtcttgattgcggagattaatggtgtcggtatcaagtacccattatccggcgaaaaattatcaccagttctgaccgtttacaaagcggattcgcatgaagcggcgttcaaacgggctaatgaattacttcactatggtggcttaggccatactgctgggattcatacgaccgatgatgcattggtcaaagaatttggcttacaaatgccagcttgccggatcttagttaacacgccatcttcagttggtgggttaggtaacatctacaataacatggcgccttcattaactctgggcacgggatcatatggtggcaactcgatttctcataacgttacagatatggatctgattaatatcaaaactgtggcaaaacggcgtaataacatgcaatgggtcaaaatgcctcccaaagtctacttcgaacgcaattccgttcgctacttggaacacatggccgggattaagaaggttttcctagtttgtgatcctgggatggttgaatttggctatgctgatcgagtaacggcggtcttgaacaagcggactgatccggttgatatcgacatcttctcagaagttgaaccgaacccgtcgactgacacagtctacaaaggggttgcccggatgaaggcctttaagccagatacaatcattgcactcggtggtggttctgcaatggacgccgctaaggggatgtggctcttctatgaacacccagaagcttccttcttaggtgctaaacagaagttcctggatatccggaagcggacgtacaaagtaccagtatccgaaaaagtaacttatattgggattccaacgacttctgggactggttctgaagtaacgccatacgcggttattacggactccaagacgcacgtcaaatacccgattacggactacgcaatgcaaccagatattgcgatcgttgacccacaatttgttgaaacggtgccaaagcggacgacggcttggactggtctcgacgtaattacccacgcaaccgaagcatatgtttcaacgatggcttctgacttcacacgcggctggtcaattcaagctttgcaattagccttcaagtacttgaaagcttcttatgatggtgacaagatggctcgtgagaagatgcacaatgcctcaacgctagctgggatggcctttgccaatgccttcttgggtatcaaccactcgatcgcccataaattaggcggggaattcaacttaccacacggattggcaattgcgatcacttatccgcaagtcgttcgttacaatgctgaaatcccaacgaagttagcaatgtggccgaagtacaaccataatactgccttagccgactatgccaacattgcccgggccttagggttaccaggcaagaccgacgaagaactcaaagaaagcttagttaaagcttacattgacttggctcattcaatggatgtgaccttatccttgaaagccaaccgggtcgaaaagaagcactttgacgccaccgtcgacgaattagccgaactggcctatgaagaccaatgcacgaccgctaacccacgcgaacctttaatcagtgaattaaaggcgattattgaacgtgaatgggacggccaaggtactgaaaaatagccctttgtgaattaagggagcccgcgctcatgatgagcgcgggcttttttgtcatgtggttttagaataactacctggaaagtttttactgtttgttttcagaggaggagaaaatgaagacttgatatggataaattatcggcttgcacactatatagatatacttataggtgtactaaatatttttgagattcggttaggaaaattcggcgttctaggctacaataatgcaagagttaattttacggaggagaagcccatgaaaaataaggcagtcacaatcaaagatgttgcgcgccttgcagaacgctcaattgcgaccgtgtcacaaattttaaacgggcatggtgataagtttagtgcggcgacggttgctaaggtggaagcggcccgggatgaattaaattatgagcctgattactttgctcagcggatgattaagaagaccagcaaaacaattggggtccttgtgcctgatattcggaatcccttttttggtgagctgcttcgaggcattgaaaacgtcttgtatcagcaaaatttcatcacgatgttgtgtaatgctgatctggatgaagacaaagaacgcgtctatttggatgaactcagccgccggggtgtggatggctttattatcgcaagttcggccgtttccaataatgcgattaatgatattctacggcagaagggtcacccatttatcgtcttagaccaaaagcgcgccgaagggttcagcgattctgtgttgactgatgactatgatggggggcggcaagctgctcaacacttaaaagatttgggacaccggcaagtcgccgttcttattccagcaaaaccgtcagccaatgtccaaaagcggcttagtggtttttatagtgtgtatccgcggacagcggtacatgtcatcgcgacgccgctttctaaagtgggtggtcgccaagttgttccggaaattttggcgactggagttacggggatctttgcagtcaatgacgaaatcgcattcggtgtatacttaggcatggctgaacatgataagcggataccggatgattacagtgtcattggctatgacgatgtcgaaatgtgccaatatgtcgcgccacagcttacaaccatcgcacaaccgatttttgagttggggcaaacgacagccaaccagttactcgaccgtattgctaatccgcagcagccatgggaagaacaccacttaccagttaaattaattgaaagaaattcgacggcacatttgaattaattattcagatgtgttatattttttacgagttattaaaacgttttcataaaacgttttaataaaaactaaattcagattaatttaactatttggagggaccattatgaatacggtaaccgttattgggagtatcaacttagaccggacgattcgggttgaaaacatgccaaagcctggcgaaacgattcacactaaggaaatcttttcagccggtggtggtaagggcgcgaaccaggccgtcgcagcgcaacgttctggtgctaatacccactttattggtgcggttggtgacgatgctgctggtaaaaccatgcttgatttattgacgcaggaaaagatcaacttggcagggatcacaaagatgactaatcaatcgacaggtcaagcttacgtcacggttgatgatgccggtgaaaaccaaattatgattcatggtggtgccaacatggcctttacgccagcagacgttgaagcccaccgtgatatcattgaaactagtgattttgtggttgcacaatttgaaagcgctgtcgatagtacggtcgaagcctttaaaattgcacaggccgctggcgtaagaacaatcttgaatcccgctccagccatggaaaaagtccccgctgaacttttagcagttactgacatgattgtaccaaatgagacggaaacggaaactttgactgggattgcaatcaccgatgaagccagcatgttaaaggcgtccgctgcattacacgccctcggtatttcagctgttatcattacgattggtagtaagggtgcgttttatgatatcgatgggcgacatggtatcgtaccagcttttaaagtcgaagccgtggatacgacttcagccggagatacgtttattggcgcgatgagtagtgtgttaaataaagattttagtaatcttgaagatgcgattcgctatggtaaccgggcgtcatcgattgccgtacaacgtttcggtgcgcaaccatcaattccttataaaaatgaaattacagccgcggagggtaaataattatgaaaaaaacaaaagttattaattcagatttgtcacgagttattgcaacgatgggccatttcgataagttgagtattggtgatgctggcatgccagtaccaagttcaaccgaaaaaatcgatttagccgttgataatggtattcctagttttatgcaagtcttgaataacgtcttggaagagcttgaagtacaacgaatctatttggcagaagaaattaaagttcaaaatcttaagatgttgacggccatcaagaagcgcttaccagacaccccaattaccttcattccacatgaagaaatgaagaaggacttggctgactgcaaggcctttgttcggactggtgaaatgacaccttattcaaatattttattggaaagtggcgttactttttaaagtagttggtgattaatggagggattggaatgaatactaccgctttactaattggcttagggccgttacttggttggggactttaccccacgattgcgtcgaaaattggtggtcggcctgttaatcagatcttgggttcaactattggaacgttaatctttgcgctgatttatgcatgggtgcaagggattgcttttccaagcggcatgaatctctggttttcaattctatcagggatcggttgggcaagtgcccaaatcgtgacatttaaagtgtttacgatggttggttcttcacgagcaatgccaattacgacggccttccagctgttgggcgcatcactgtggggcgtcttcgccttaggtgactggcctggggcaatggacaaggtcttgggtggcctagccttagttggaattatcattggtgcctggctaacagtgtggtctgaacataaggatgcaggtaacgcccggaccttacgccaagctgttatctggttagcagttggtgaaatcgggtactgggcttattcggctgcgccccaagcaaccaatattggtggggaggaagccttcgttccccaagcaattgggatggttattgtttcgatcgtatatgccctgttcttagcatcacgaggtgaaaagttagccctcgttgaaggggtgtcatacacgcacatcatctcaggtttcttcttcgcgtttgcggcgttgacttacttaatctctgcgcaaccaaatatgaacggattagcaaccggctttattctttcacaaacctccgttgtattggcaacgttaaccggtatttggttcttaggccaaaagaagactaccaaagaaatgtgggtcacgattggtggactgatactaattattgcggcagcagctgttacggtgacgatttaaaacaaattaatatggctataagactatttaatagagtcgctttgaaggagttatacgcttctttaaagcgactctatttttacggttattgattacaatggtcgattacaaaatttgctttatgatatggcgataatgaaaataattcggcataatatttatagtttatatcagacatctaaatgtttgatgaatcattagtccattaatttaaaaagccaatgaaaaaagagtgcattaataatgtatgcgctttcgtatatatttatctgtgaagaaaagaaatgattaaggagcgattttgatgaataattcatggattaatatttcgggtaaggtatacgttgttactgggggctcatccggtattggtaaagcaattgtaactgaattattgaataacggggcgattgtttataatgctgacctcaatcaaggtgatcagcaaaatgataatttacactttgttgaaaccaatgtcacagatgcggaagcggttaatcggctggtcttaaaggttgttgatgaacaaggaaaaattgacgggcttgtaaataatgctggtatcaatttgccacgtttattggctgacgccaaggatcctcacggtaagtatgaatttgcagaatcggattttgtgaaaatgtttgccgtgaacgtgaaaagcgtcttccttgtatcgcaggcagttacccatcaattcgagaagcaacagtacggtgttattgttaatatgtcctcagaagctggacttgaaggttcacaaggacagagtgtttattcagcaactaagggagcgattaatgggttcactcgttcgtgggctaaagaattaggtgaacataatattcgggttgttggtgtcgcgccaggtattatggaagctactgggctaagaacacgctcttatgaagaggcgttagcttatacccggcataaaactgttgatgacattcgggcaggctataagagtacgtcaaccacacctcttggtcggagtggcaaactatcagaagttgcggatgcagttaactatttactatcagaacgtgccagttacattaccggggttacgattaacgttgcgggaggcaagagtcgtggttaacctttaaattttagttgggggcatggtgaggcaatggataggcaaagttttgaaatattaaacttttttattaataatgatgcattgacactaagagaattacaatcccatttttctgtttcgagagtcacaattaccaagaatattcgtgcaatcaatgattatttggtgggtattgcaaaaatcaacgttaatcaagccaagttttacctagttatcaataattattctgccatggctaagctacaaactaatttcttgaaaaaggatttagatttcaatgatccctcaaagcgacaagcaacgattttaaaagaattgttacagcaaatcacggattacgttattctggatgatttggcagaatcattggctgtgagtcgtggcactatcaataaggatttaaaagcgctcaaacaacagcttgattattaccaagtcagaattgagacaaaaactaatcgtgggattcatttagcggttgaacatgattatatgtatgcagtaattacacgaactttagtcgggaaatactacgaactggaagcaacctgggataaagcgacagatgtcaaattgcttaatcttgttaaaaaacttgatcataataatgatactgtgaccatgattaaaagaaatattgcggttgttaattggttacgtaaatataacattcaaatcaatgatcgtattaataactatcatccacttcttagtgatgtaacgatggcgtccttgcggaatctagttactgagataattggtagctcgttaagcactagcgaatgggaatttatttcatacccattaaacatcagaaagctaccgaaggatgataatcagttagttcaagtgggattggtcgaagttgaggatttaatgcagtcggtttttccaatccttaagcaaaaattagatgtgaatttggactttaaacggttgttgatggagttgcgatatcatttattatttctcattaatcgggctatttttgatgtcaagtcagaaggatttatctcggtagacatgttaagtaagtatccagtttcaacggagttagcgcaattaacattatcaaccattgccactaaattgaatattcggattcgttcccaggaggttggttatttaacagtctattttcagatggagcttgaagaatacatggcagcgccaattattcatcgggttgcactagttgagcccattaatactagtatgaaaaagtttatttccgagaaattgaaagaaatgttagatgatgatttgcagattgatgtttttaactcaattagtgaatgggagcagagtccagaaaaatatttactgattttttctaacagttttttaacagataatgaattaattaaccacgcgcctattattcggttgaattctatttttaatcaaggaacgttacgtgaacgtcttcaaatttcgttggttgatgaagctgttaatcagggacagtgtcgatttgatgtcacgcagtttgaggaacaggagacctacgtcactggagtgaaaaaattaattaatcaagagatacaacatggtcaactgacaccagattttatgcaagcttggcttaatagagagcaacaatcgagtagtatttttggtgatggggttgcattgccacacgttattgataaatctggactaaatcgaatccttgtaacagtaggagtgtttgaaaaaccggtagtattcgataatcaaaaggtaaacgtggtttttttggtcgcaattccgtataaactagatgcaacattaagcaaaatattagcacaagtatacgatctaattcgcagtatcacagctaacagcaatatttataataacttgaaaaattatgatgaaaatcaaggattaaatcagttgatggaggcgatttaatgttaatttattttggcgtgatcctagtcagtgcgtttctattacaaggtttccttggactaagacaaattaagaatttttctaaaacctttcatcaattacgagtgttagcgccagtagcaattggcaaaaatcctaaaaaattacggtcggggacactaattctattagcgataaaggatgacggcacgatcttagaggctcaaatgatgaagggggttacgatttttgcaaagtttagggaattgcatcaactgcggcagaaaaatattgcggaaattgctgcttcataccagcaattaaaacaattcgataagctaacgcgagtttgtctattggatgcctataagaactatttaaattacaaagcaaatcagctaacgccacaagatttcgatggtagtgtcaaaatttggagcctaccaatgattgaaaagctgaaatctatttattataaaggcttagcaagtttgcgaaaaaaacaagtgaacgtaaaggagcattaatactatgaaagtagtcacagatttggcctcgggctttatggggctgtttcagagcggtggtaagacattaattggatggatgacatcaattattcctgttgtgctattgctgttagtcttgatgaacgcgattattgcttttgttggtgacaagaagatggccaagttggccagagcttcgtcaaagaatcctgtaacccgttatttaattttaccgtttgtttcggcatttatgctcggtaatcctatggcgcactcaatgggacggttcttgccagaatactataaacctagttggtatgcatcgattgctcaattttgccacactagtaatggggtattcccacatatcaatccttccgagtatttcatttggttagggattgcgcaaggggttcagaagttaggattgaatacaatggatttggcgattcgatatctattagtcggcctagtaatgaactttatcggtggttggattactgactttacaacagcctatgtctgcaaacaacaagggattaccttgtccaagaaagttgaatttaacggctaattgagagagtgaggaacgagatcatggcaaaggaatatcatagtatcaaagttgttaaaggctctggtggctggggtggcccgctaattattacaccaactatcacgaagcataaatttgtttatgtcactggaggtaataaaccagcaattgttgataagattgctaagttgacaggaatggaagctgttgatggctttaagacgtcaattcctgatgaagaaacagcattagcggttgtagactgtggtgggacattaaggtgtggaatttatcccaagaagggtatcaaaacaattaacgtattaccgactggtaagagcggtcccttagcgcaatttatgaatgaagctaattatgtttccaatgtagatgttgatcagattatgttggtaacatctgaggaggcgcaattttctgatagtcaaaatgaaagcgctaaccaatttgaggatgtagatgacgatacgaaattcgataatacaaagacactaacagcacaaacaaaaaatcctgggatcttaactaagattgggattggtgctgggcgagttgtttcgacgtttaatcaggccgcaaaagatgctgttcaaacagttattaatactattattccatttatggcatttgtggcattaattattgggattattaatggctctggaattggtaaggtttttgccagtgtcatggagccgttagcaggcaatgtctggggcttgatggttttaggatttatttgctcattaccattcttatctccattgcttgggccaggcgcagttatcggtcaagttatcgggaccttgattggcgttgaaatcgggaaaggtaatattccaccacagtatgcattaccagcattattcgcgattaacacgcaaaatggttgtgactttattccagttggcttaggactagctgaggctgattctaagacggttgaagttggggtgccatcagtgttatatagtcggtttatcaacggcgttccgcgggtctttattgcttggattgcaagttttggattatattcaaaataaatttttagaaggtttgaggtgtattgtatgatgacaaaagagagaattatcttttcaacaaaggtcttagaaataggtgcggaatctgctgattttaaatcgattggcatggcagtattatttggtgatgaagctccagacgcattacggccttcttgctttattatcgaagttgtcccaataagtgagcaaatcacagcaggaatgaaacttgaagtcgacaatcaagtctatcaaattacagcagttggtggtgaagtccagactaaccttggaagattaggccatacggctattagttttacgggtgcaaaggaggctaaattgcctgggacgttatatgttgagcagggcgattatcctgattttaaagttggtagcgtggtacggattatagctgaataattaacttggcagatgttattttgctctgtgtcgagttgagttaaggtcatgttttgaaagcggtagttagttttcgaagaatggctagcttctaaacatgcagacattgttggaagtatgcccctgtaaaacatacactaattactaaaattgtttaaaaaatgaatgtatgagatactaactttcaacagcgatggtggttcatcaaggcaagcagactagcgctgttgttgatctacaatgcgtttgaatcgtgattaagtggtaaaaagcatgagtttatgaccacttgaatgtaagcgtttgctatggtaatattcgtttattaaattgtgcgtaattaaattgtgcatgaaatgggggctttattatggttatgaaacaaacaaaacaaactaacatactagcaggtgcagcagttattaaagttttagaagcttggggagtagatcatttgtatggtattcctggaggttcaattaattcaattatggacgcattatcagcagaaagggatcgaatccattatattcaagtacggcatgaagaagttggtgcaatggccgccgctgctgatgctaagctaacgggtaaaatcggggtttgcttcggctcagcgggacctggtggcactcatcttatgaatgggttatatgatgcgcgtgaagaccatgtccctgttctagcacttattggtcaatttggaactactgggatgaacatggatacgttccaagaaatgaatgagaatccgatttatgcggacgttgcagattataatgtaacagccgtcaatgctgccacgttgccacatgttattgacgaagcaattcgacgcgcctacgcgcaccaaggtgttgcggttgtgcaaattccagtcgatttaccatggcaacagattccagctgaagattggtatgcttccgctaatagttatcaaacgccgttattaccagaacccgacgttcaagcagtgacgagattgacacagactttactcgcagctgaacggccacttatttactatggcattggagctcgtaaggctggtaaagaactcgaacaattgagtaaaacgttgaaaattccattaatgagtacgtatccagctaagggtattgtcgcggatcgttatccagcctatttgggttctgctaatcgggtggcacaaaaaccggcgaatgaggcacttgcgcaagccgacgttgttttatttgttggtaataattatccgtttgcagaagtttccaaagcgtttaaaaatacgcgttatttcttacaaattgatattgatccagctaagttaggtaaacgacataaaacagatattgcggtacttgctgatgcacaaaaaacgctggctgcaattttagcacaggtatctgaacgggagtcgacaccttggtggcaagccaatttagccaatgttaaaaattggcgggcttatctagcttcattagaagataagcaggaagggcctttacaagcatatcaagtgctacgtgcggttaataaaattgcggagcctgatgcaatctattcgattgatgttggtgatatcaatttgaatgcgaatcgacatttgaaattaacgccgtccaatcggcacattacttctaacttatttgctacgatgggagttggtattccgggagcaattgctgccaaacttaattatcctgagcggcaggtgtttaatctggccggtgatggtggcgcttcgatgaccatgcaagatttggcgacgcaagttcaataccatttaccagtgattaatgttgttttcaccaactgccaatatggatttatcaaagatgagcaggaagatactaatcagaatgattttattggcgttgaattcaatgatattgattttagtaagattgccgatggcgtgcacatgcaagcttttcgagttaataagattgagcaattacctgatgtttttgaacaagccaaagcaatcgctcagcatgaaccagttctgattgatgcggtgattacaggagatcggccactgcctgctgaaaagcttcgtttagattcggcaacgagttcggcagctgatattgaagcatttaaacaacggtatgaagctcaagatttacaaccactttcaacttatttaaaacaatttggcttagatgatttgcaacatcaaattggacagggtgggttttaaattcagctactatcgatgtcttgaataagtttgattgaattaatggagattatcaaataatcttatgttgcgattagggaaagaagcctaacttatttccttaatcgcttttatgttcatgttagatgtgctaaaataagtaacaatagagatggatatgggaggtgtctagatggctaatacacaattaagtgatgcgacgcatattatggcatatattgcgttgcatactgatgaccagctgaaaagtgagcatattgctagtagtttaaatacggatcctaccatggtcagaagaatgatgagtaagttaagaaaagcaggcttgttaacttcggttcgtggcgttgctagaccaacattagcttgttcgcccaatgatattaccttgaaagatatctatgtagcagtggtggctaagcgtaattttttaaacgttgatcataatacttcggagacgtgtccggtcgggtcggtaattccgcgagtgatggaaaaatactattgtgatattcagaatagtgctgaggcacgtatgtcgcgagtgacgctgcaagatattattgatgacattagcgctgttcaacaacaagcataatttaagataaagacttgacaagggtcaagtttttatttaggacatagttgtgctcagaaaagtaacaacaaaaagagggtaatggaaatgactaaaattaaagcaggacaagcattggcacaagtgttagtcgactggaacattgatcatatctatggtattacagctgactcgattaataacacggtagatgggttctaccaagagaaagaccacttgaagtatattcaagtacgtcatgaagaagttggtgctttagctgccgcggcagatgctaaattaactgggacgattggtgttagctttggttcagcaggaccgggcgccgttcatctcttgaacggattatacgatgccaagatggatcacgtaccggtgctagctttagtcggtcaatcagcaacatccattatgaatacgaacttctttcaagaaatgaaccaagatccaatttttgcagatgtagccgaatttcataaacaagtgacaacggctgaacagattccatacgtggttgatgaagcaattagatcagcatacgcgacccgttcggtttctgttgttattattccagatgatttgtctggtcaagatattgagtttgatggttttaaaacggcttcacttagcggcagtcaacaggtcttaatgccgaaattagatgacgttcagcagacgatagcggctttgaaagctgctcaacaccctgttttatggattggcaagggtgcctataatgcgcgtcaagaagttatcgcagtttctgaaaaatttagtttgccggttttgtcgaaggctccagcaactggtattatgccaactgaccatcctaatttcatgggctctcgcggtcgactaggaactaaacccgcctttgaagtctcgcaagcggcagatctagttttgtttgttggtactaactttccatttgcacgttacttgccacaaggaattaagtttattcaagtcaataataatttagcagatttaggcaaacaacatgatgctgatattactgttcttgcagatgcaaaagaatttttccaagcattacttcaatccgaagtgacaattaagccaactaagttcttgaaagctgctcaacgtgataagcaaaactggaaccggtggctcaagacaattgctactgatgatcaaggagggttgacggctgaaggggtgctagaagctattaaagacaatgctactgatgatgccgtctttggtctggatgttgggaataatacggaatgggcaatccgacagttaccattgaataagcaacagacttttacgatgtcggcttggtatggcacgatgggttttggtttgccagcaggtttggccgcccaattgaattatcctaagaagcaggtttggagtatttctggtgatggtggttatgccatggtgatgccagacttactaacggaagttaaatatcatttgccagtcattaacgtggttttagaaaacaaagtattaggctttattcaacatgaaaagttactcgctaatcaggcgccgtatgggattgacttgattggtgctgattgggccaagatggcagacaacatgggtgcgattggttttaaagtgactaaccttaaagagttgaaagcaacgtttcagaaagttactcaactacagcagaatggtaatcaactaccaattgtgattgatgcaaaaattaaaaatgttgatccaattgatactagttttgttccagtagatccagaaaactttgatgcagatacgattgctaagtatcgtgaacgatatggtatcgctgaagcggatcaaccggcacttagccaattattaaatgaattataaagggttatgtaaaggagattagtataatgacagttattaatggatatgaacagagtgatcgtgagcaaaagttaacgattttaaatttaccatcattggaagcagctgctaaaaagatcatcccgagcggaggctttggctatattagtggtgggtcagaagacgaatggactttaaagcagaatacaatggcctttaaccatgttcaaattgtgccacgagcattgacggatatggaacagccaagcacacagactcaggcttttggcatagatctcaaaacgcctattatgatggctccagcggccgctcaaggattggcacatgcacggggtgaagctgcgactgctgaagggatggctcaagttggggcactcatggctcagagtacttattcttcaacgtcaattgcggatactgccgcagctggtaaaggtgcgccccaatttttccaattatatatgagcaaggattggaatttcaatcagagtttattggatgaagcagtgaaggctggtgctaaggcaatcattttgactgttgatgcaacagttgacgggtatcgtgaagctgatattatcaacaatttccagtttccaatcccaatggctaacttgactaagttcagcgaaggggatggtaaagggaaaggtatcatagaaatctatgctgctgcggcgcaaaagattagcccagctgatgttcggcgtattacagaatatacgaatttaccagttattgtgaaggggattcagtcaccagaagatgccttgttagcaatcggggctggtgctcaaggtatctatgtttcaaaccatggcggtcggcaattaaatggtggtccagcttcctttgatgttttacacgagattgcgcaagccgttaatgggcgcgtcccaataatttttgatagcggtgttcggcgtggctcccatgtctttaaggcgttagccaatggtgcagatctggtggcacttgctcggccgattatctatggattagcattgggtggtgcgcagggtgtcgcttccgtagtgagtcaccttaatgatgagctgttgatcgatatgcaactagcgggaactaagacgattgaagatgttaaacgtgctaaattacttaggtagtagaagtaatgctgaatataatgtctgaaatgaatttaaaatacctgatataataacactttagcgttggttttggtggaagtaaattctgctgagatcaacgctttttattgtaataggaagatgttctgaacagaaatagctgaggaactaagacactgattgacgaattgaagctatgccggcgttgaagttaggatattgtcttaaaatgcacaaaaagcgtcctaaagcacccagctgagtttttcaagtcttaaaacggttattcagacatacctggcaatagtatactgtacacatgcgcacataccagttttatttaggaggctgaatgtttcataatctagttatgatgacaaggttgtaatcatgagttttgttgtgagttatttttctcataaattaacttcaaagtttcatagtaattaggatatttagagatcgatttttgattagtaaccatcaatgcatattatactgagctgaacatgaatactagttatttagtttttactgaatagctgactccttaatgtggacttacgccgtcaacaatgagaaaaacaaacacatagattcactgacgaataaataaacctgaattctttgaacgggagactttaatttgagtgttgaaaataattattgtaaattacaacaagcgcatgatcaaaaatgtcgagtctcattacggttttataaaacaaatgggcagatggccgagacagttggctatgtcactacgattgtaccgaaagcaattgcatttatggcaattactggtcatcggcaccttatccaactcaatagaatcattactgtgagtttacagtcccaagaccgccgttacgtcatgtaatatgttttggtttatgattttacacgtgtatcatgattgctagtattgatatttaagtggcaatattaacgataactagttggccttaacttgatactgggtgtgctttttgagtcgcagtctcttaaattaaaattggtctggaaagtaacttgttaattcaagttctttatcaagggctattaaatagggaaccttgtagggaaatcaattcattttatgaaattgatttctcttttgtttaaacaaaattattctaattatttctaattgattctataagcactttacttaacgatacataaaaatcgtgatacgattcagttgtagttttaaaggatattatggtcactaagttacacatataaatttttatggaggtgttgtaatatggcaaatttctacggaaatgatccttttttcaacaatgatatggatgatgttttcaatcaattatttcggcgcatggataatcaaaattcggagcgtgcacggtatttagttaatggacaatcgctgacaccggatgagtttgctcaataccgagcaactggtaagctaccccaaaataataaaacaatagaagtatctaaagatggtaaacaggctgttaaaaaaggggggattttagaaaagttagggactaatttgacggaacaggctcgtgatggattactagatccagtgattggacgtgagaatgagattcaagaaactgcagaaattttgagtcgtaggacgaaaaataatccaatcttagttggtgatgctggtgtaggtaaaactgcagtcgtcgaaggtctggcacaagcaattgtggctggtaaagttccagaaacgattcaagataaagaaatctattcgattgatttatcgtctttggaagcaggaactcaatatcgcggttcttttgaagaaaatattaaacagctagtaaaggaagttaaagcagctggtaatattattctattcttcgatgaaattcatcagattatcggcacgggcgccactggtggtgaagatggtggcaaaggattggctgatatcattaaacctgctttgtcacgtggcgagctgactgtaatcggggctacgactcaagatgaatatcgcaatactattttgaaaaatgcggctttggcacggcgattcaatgatgttgtgattaatgaaccgacggccgctgacactttacgtatattacaaggtgttaaaaagctgtacgaaaagcatcatcatgttgtattaccagatgatgttttgaaggcggctgtggattattcaatccaatatataccacaacgcactttgccagataaagctatcgatttgatcgacatgactgcggctcatttagcggctaaaaattcgcaaactaatgttgagacattggatcaacgcgttaaaaaattagaggcagctaaggaggccgccgttaaatcggaggactttacaaaagccgctgatatcaagaagtcgatcgaggaaaccaagcaaaaaattaaaaaaacggatcaaaaagaaaaaatcactgccacgattgatgatgtggcacaatcggttgaacgtttaactggtataccagttgctgatatgggcgctaatgatattgagcacttgaaaaatcttgataagcgtctgaaaagtaaggtaatcggtcaagatgaagcggttgaaatggtagcgaaggcaattcggcgtaaccgtgcgggcttttcagagggtgatcagccaattggaagttttctgtttgtgggcccaactggcgtaggaaagactgaattagctaagcaattagccttagatatgtttggaaataaaaatgcgattattcggctagatatgagtgaatatgctgatcgtacagctgtgtcgaaattaattggtacctcggctggatacgtaggctatgaagataatgctaatactctaaccgaacgggttcggcgtaatccatattccattgtattattagatgaaattgaaaaggctgatccacaagtattaacgttactgttacaagtgatggatgatgggcgcttaacggatggacaaggcaatgtcattaatttcaaaaatacgattattatcgctacttctaatgctggctttggtaatgaagcattaagtggtgacaagcaacgagatcagtcattaatggataagttagcaccatttttccgcccagaatttctgaaccgttttaatggaatcgtggaattttcacatctgactaagcaagacttaagtcaaattgtcgatttgatgttggcggatgtacaaaaaacgttagccaaaaaatccatcaaacttgaggtaactaaagcggccaaagattggctgatggaacaaggctatgatgaagcgatgggtgcgcggccattacggcgagtaattgaacaacaaattcgtgacaaggtaacggatttctaccttgaccacttagatgtcaaaaacttgaaggctgatttagtggatgctgagattgtgatatcggcagcttagcttaaatcagtgttcataaataactttatgtaagaggagattgcttgatagatctcctcttttcgttggttttcaccatttgatattaatctattgagtaatgtgaattagtgaaattaagtctagtttgacttgtaatctaaggaaaaattaagggggagtatcgatgaaactgatttatattaacgatctttttacatgaaactttagtttcgtatgaataattaaactgatgtatctttaaatgtttatttctagtcttaaaacaatattgaataattaatatatttatgtattcttttcaattaattaatactgttttaaactgttgatacaggtatgtatttgagcattataggagtgggatatggaaaagccagaacaaaaactattgctttataaattaagcgatcggttattcgctgcgattcaaaagaatcttcaactagaaatacggcaggcattactagttaaactaggcattgatactgtattaaatgttattcctaagctgataattactattatcttagcgttgctgctacacgagttggtcccagtgttagtttttatgggtagttttttagttttgcgtggctttgcctatggacgtcacttgaaatcggatttgttatgtacgatattaactatctttgtgtttgtgggtgtgccgtatgtgattggaactggtatttctgaagtatacagattgttattaagtttaatatttgtaataatcataagtatttttgctccagctgatacggtaaagaatcctattacatcgaagtcattgagaaaaaaattaaagcgacgggcaattggattgtcattaattttgagtttgttacaaatagttagtaataattattttggcacaatcattttaattgcgatggcattagccgctttattactaatgccctatgaaaggagggaaaattatgaaagaaaaaatgtataaagtacttagccatctttttcaatacgtaggtactaaacagttggttatgtgctgccatgggatattattcgaaactaaaattcctgatgaattaaaaagcaaggattagtgtagatatatgttaatgattgtcttccaagaattatctatctatttgataattaaatctttgttgagaaatatattttttgtgagactttttgatgttatattcttatccgtctgtatgctgatgagttatatttttttagcaaagttaggaattagtttttcttttttaatgttaatgatgtttatatttttcacttggtggtatgtacgagttctaagcggtgcactatgtataacatttcaagtgttcatatggtcgattatggttgaccatatttgtgatatattaactcgtttaatgaaagttcctaatgggtatgtggtagtgtttgtcatattgagtgtcgtaagcttaatttttcttaatattgtaatggatcgcacgaatttcagtcccacgtttagtaatcagagcttaaatcgcataaccgcactattattaatgataatatacttgtatattatgttgagtgaaggtctggaaaatcagttccaggttatattaagtaatttaattatattgtcagttgtaatggggttagtattggtgatttataacgaacatttaaaaaatgtaagagccaaatatgaagtccaaaagcaaagaatacaaatacaaaatgatactcgctatatgaatgaaatcgaagctcactataatgagttgcgacgtttcagacatgactatcagaatatgttgatttcgatagatgaatatttgaaaactgatgatttagaaggtttacaagaatattatcaaaagaatcttgcaccggtttcaaatcgggtgttaaaagaaaaatataatcttgaagatttgagtcgggtcaaagtgaagtcgattaagagtatcctatttagtaagttgagctatgcacaatcgcaagagattgaagttcattttgatttaaaggaaccattaattgacattactattaatgaattggatttagacattgcattagggattatgttggataatgcaatcgaagcatcggtaggacatgctgatggagagattatgagtgccatttttatcgaaaaaaatagtacggtgttcttgattcaaaacaatgtttttgaacagttaccacccttatggaagctgaaagaggcaggttattccactaagggcaagaatcgggggattggattgaatagtttaagtaagattgttaatcgcaatgagaacatgatactcgaaaccagagtcttaggagcggtattcttacaacgcttgacggtgaagcgagtatctcagaatgattagtgtctacatttgcgaagatgatccgaaacaattacaacaaatacggcaaatcattactaaggtaatcgtcgatcaacagctagacatgagtatctgtttagcatgccaagatccccacgaattgttagacaaggttaatgcacagcagcctcaaaaggcaatctatgtgttagatattgcccttaattcagatattaatggtattcaactagctagccagattcgtgacatgggccgtcgcagcaagattatttttatcacgacacacacggagttatctttgatggtgtttcaatatcaagttgaggcattagattttattcttaaggattttccagattccttgtatgagcgatttagcaaagttttacacgtggcgcaagatcgttttcaaaccgatgaaaatgaccaagacgactatgttcaaataaaaattggtgagacggtcagatcaattaatgttaaaagcattatattttttgaaagttcaaccagtccccataaaatcgtagtccatttggatgatggtgaattagaatactatggactgttaaaggacgttcctgatttgagtcctaatttctataggtgtcataagtcatatgttgttaacttgaaacgcattaagtcattggacaagcacttgcgacgattaaccatgacaaatggtgaaaaagtgctttgttctgcacaagctaatcgttatctagctaaatggcttgctaaaaagtcataatagttccaaggaagtcgcctgctaaattagtaggcgactttttatgtgctacgcgatgaaaattcagcgttattcgattagaaattgcagtgatatttgttagcattacgtgtactgggttcgttctttcctaaaccgtttaaaagtgtacttaaaacgattatcctcagattattcgtcttaaaacggtcggtatgtcccttgttcagagcctataataaagatgtgttcacggggtattggattggtcatgacagtaacgaatgcgtttagtttaaaggatgttgtgacaggcagaagttaatgtcgatcaatacgctgtgatgaattttaacgagagaggggcagattaggaatgattaggttatatacacaatcaagctgtcattcttctagagttgcacggcaatggttggaagcacatgggattgagttcaaggagaaaaattttagtgttgattcgcccacggtgcaagatctaaaacgtattttgagtttaaccgaacatggtgtagacgatattatctcagctcgatctaaagactatcctgaaattgcgcctaagttacccgaaatgccattgaatgaggcacttaaattgttgtgtgatcatccgaagttgttacgtcggcctatcatcattagtgatagtaaaattcaagttggctttaatgaagatgatattcgccaatttattccacgaccagttcggcgactaaagttcaatgcattgttgagtcgtctagatggtaatacaggggatcacattattaataaaaggatggtcgagtagtaagctatatctaagattttttgttaattaaagagcgacaagctagacttacacgatatgagtctaacctgtcgctctttagttaataaccatgagacggcatcatcattctttataacaaaaataatatcgcgctggataacatccggtcaaaatattaatcactgataatatcagcaatattcattcccagagcattagccacgcgtgtaccgtagtttttgtcggcctcataaaattgcttgatttcgagttttttgacaccaggcaaagtaacttggcctaacgcatctttgatagtattaattaagcgttcttgctcgggttctgacattaagcgatataggtcgcctgcttgagttgtgtaatcaacttgatagcgataaggctgtgcgcgtgtttcaccacgaacagaatcaggtgaaagtgcggcatccggcacctcttctggcccatgcagtgcattaggctcgtagttgacctcagcaccttgattattaattttcatgtaaccatcacgttcataattatgaactggaacaaccggcttgttcacgggtaaatcttcaaagttggcacctaaccgatatcgctgtgcatctttataggagaataggcgaccttgtagtaatttgtcgggagatggttcgataccaggaacaaaatttgctggcgacatggccgcctcttcaatatcggtaaagttattagtgggattctcatttaaagttagtttgccgactttaattagtggatagtctttgtgggagatgactttagtgacatcaaaaatgtcccatttatagtttagaccttcctcatatggcaagatttggacatacatcgtccatgatgggtaatttttttcttgaattgcatcatataagtcatcttgtaagtaatctaaatcttggctcattgctttttcagctgcttgagcagtcatatttttaacgccttggtctgagatgaagtgatacttaacccaaaactgttcgccattctgattaacccatttaaaagtatgggaaccgtaaccattcatggttcgataggacacaggaagacctcggtcgcccattaaataagtgacctggtgcaatgattctggagaatgagcccaaaaatcccattgcatattttgcgtacgacggttcgttttaggatcccgtttttgtgaatggatgaagtcaggaaattttaaagggtcgtttacaaaaaagaccggtgtgttgtttccaacgagatcataattgccttgctgagtataaaattttaaggcaaaaccgcgcacgtctcgaacggtgtcaggataacctttttcaccggcaacttgtgagaaccttaagattacgggagttttcttaccgacaccattaaataagtctgccttagtatattcccccatgtcgttttcaagttcaaaaaaaccttttgctccggcccccttagcatgaacgacccgttctggaattcgttcacgatcaaaatgggctagtttttccaaaagattatagtcttgcattaatacgggaccacgagctcctgccgtttgggaatgttcattgttagcccatggttggccggtttccgtcgttaatttttccgtcattttaatcgcccttttcacgtaaattacaagaaagctcttgcacaatttaaacgctaacaccttaacagagtgacttcaatcattatgcacagttaagttaatcgttcatgtggcgtagtttaattttaatcagctatcaagctgtttgatattttctaggccacccggaatcgtcacatgagaaatagtagcgacccatttattaaataatgtgttatatttgtctatcattatcgataattgtaaaatgataattataagaagtaatcatttatgaatcggcttaaatattcgtgtaattctattattgtatttaagcggtttaataagtctaggagggattttatgcattggttatgggttttgatcattggtgctattattggtgcaattgcaggtgctattactaataaaggtaaatcgatggggtggattagtaatattattgccggattggttggatctgcaattggggaagctcttttgggatcatggggaccacaattagccggaatggcaattgttccttcaattattggtggtgtgattgttgttgcgataacctcatttgttctgacacggatggattagtaaggagatgattgcgatgattaaaagcattttaaagttttgtttagctgcaaccttaatcgtaagtggtgttcttattggtgggaccgtacttactgctaagggaattgataacttgggtgataaattacaagataagttacatggataaaaattaattttacaatgagccactgatgggtgtactagttgacctgttagtggcttttagtatgagtaatatcattgagttcaaggaactaaatcaagagcgacgattttaaactaccttcaatcgaataaaagtaatatttacttttattaagaatgagggtatgattaaaatcaaaaaaagaggattggcctatgtctaaacttattgcgaaaaatgtttttcagttgccaaaaatgaatttattagtgctgactacatcggctttcttattggccttagacgttattttatacaaaattgctatcggaccagcgtattttcaattatcttttggctttttgtctatggcttgtattggttatctatatggtcccatttggggtggtctcttggagatgatctccgatatattaagctttactatttttggttccggcgcgtttcagattgcctttttgttaactgcatttttagggggatttattgacggtttgtttttatatcgtaaatcagtcaattggttatccgttgtgatgacgcaaatacttgtaatgatttttgttagtttgatgatggactcatggctaatttcagtgctatttggcactaattttaaagtgttattgttgggaagattggcacgcgtcatcattcagataccattacaggtgattgctattttttacttcattaaggcgttagaaaaacgacacgtttttgatagaatgaggcttagataatatcgatggatgctacaaaaagaggttgaacacggtatgaaacgcgctacaatcgttaaacaaataagtctaacttttctattgcacttcaagtctagttcaaccttttttaatattaactggccttattatgactgcggaaaaacaatttgggtatcgatggttgagttggtacccagcaaaataaaagagcggctatgtggtgggcatgataattcccttagcagctaaattgcggacacattctgctaagtagctggcgttgtgttctggatagattggtgttgttaatgcaataggagtgaggtgatcataaggcgggcaaaactgcccacgataatttggatcataccatattttattaggatgatagccgcgaagttgcatttcatccatcactaatacatgaaattgatacaacttgtaaggggaatatttgaaaacataattaacggttgcatgatttttaccccaaccattgcctctcaatgcggcaagctcacggtgttgacctagtaattgttgtcgtggtaattgatggattaattgttcatgccatagacgcataggccacactcccttatcgaattttaaaattaacaggtgaatattaaaaggaccaactcatcattatgatgccgaatatactgatacttttgaacgggtgatgattgtaaacgacggatagttaaagtgaatattcgcaattattatagcatagcgaattgatcaatagtttagtacaagatcaaaaaaacggccatagcaacaactgatatgatcaaacattccttagaatgcttaccttgaaagttgggttgagtaattaaaaataatattattttatgttgtgttagcagcagttcttaattttgatcacagcggtgtttgatagatgtttgacggtatgcaaataaaattattgttctgataaaaggaatcaatgattaataatcttgagcgtcatttttcgaatcatggcgtttttatattacaatggtcctagaaaaagtaaagttatggaggcgattaaatgagtgatttggatcagacaaacaactatcgatacgtcattgttggtggcggaatggttgctggctatgccatcaagggaattcgacaggaagatccagagggcgcaatcttagttatttcgcaagaggcggatgttccgtatgaacggccggcactgagtaaaaagctatggctagatgatgagtttactgaagagaacattcggattggtgctgaagattatcctaatgtgacttttaagttcaagacaacggttacggctattaatcggcaagataaggtcattacattgactgatagtgagcaaatcaagtatgaacagctattgctggcaactggcggagaacctcgacaaatccagggacctgctgatccacatgtgctagtctttagacagtggtcagattatcgcaagttacgtaaatttagtggtccgaacaagcgagttgtgatcattggtggtggatatgttggtacagagctcgcatcgtcactgactcaaaatgggactaaagttacgatgatttttccagaaaaagcgctgggcgagggtaaatttcctgagtccattcgggctgagtatgaagcaacgttcaaacgtaatggtgtcacactgatgagtggtcagtttgtccaatcatatcaacgccaaggtgatcatttgactctattgacaaaggatggtacggtgatcgcagccgatacgattattgttgggttaggtgtcacgccgcggattagtttggctgaagatagtagtttggatttagctgatggtggtgtgaaagttgatgagtatctcaatactagtgacccagccatctggtctgctggagatattgcctcttatccagatcacatcttgggtcggcaacggattgagcacgtggaccacgcccgactttctggtgaattagttggccgtaatatggcaggtgctcacatgagctatcaacataccccatacttctattccatgatttttgatatttcctggcaagcaatcggtaatattgatcctaaattgcaattgatttttgatcggcgaacgcatggatcgcttgtttatttcatagatgccggtaagttagttggtgttttagtttggaatgttaaggtgaaccttgatgatgttcgcgcattgcttgcgaacgctccagccacggatgatttggtaggttccattcgagagcaagagagatagtatctggatgagacatttgcgctattgtgaatgtacgtcaggacaaatcgaccatcattaacgatggttcagtaacaaatgaaaagtcagccgtaagttattttgcttacgactggcttttatttttaatgtctaaaattataaggcgctaatgaagcgttgtgcgatttcgagtggccgggtgatggcgcccccgacaacgaccgcgtggcaccctaagtcaaggcaacgtttcatcttctcgggcgtatccaccttaccttcagcgataacagggcgtgatgtggcttggaggacttcctttaagtaggcgaagtcattatcagcaatgttggcaccagtcgtggctggtgtgtagccgtgcatcgtggtcccaataatatcaaaccctaacctatccgctactttgacgttctcgatggtatcagtatcagccatcaagagggtatcagggaattctgttcgcatggtggccacaatctccgccaatttttcaccgttaggacgcggctgacccgtgacatcgcaggcaactacggcacagcccgtagcagcaacggctcgcatctctttgattgttggcgtgatgtaaacaggtgagtcgggatagtcgactttgcttaaaccaatgagcggtagatcaacttcgtcttgaatggcctgaatatcaacaacggaattagcgcgaatacccgcggccccagcttccttagcggcaagggccattcgtgacataataaatgaactatgcagtggttcattaggtaacgcctgacacgagataattaatgatcccttaactgtatttaagaatgtatttttcataaaaaagaccgctttctactagtataaattagattagttcttgaagtatttttcgtaaattgccgtagctcctgcttccatttcaggggttggatggctcattggtttcttaacgtaaccggcatcaacacccatatgtttcatgaccaatttaagcgttggataaatgtcgttggcaattaaatcagtaatcatatcgttactgatgttttgcagttgacgtgctttgtcaatatcgccagcttcaaaagcgtccatttcctcacgaacacgtggtgcatttaagttatacgttgagccgatgcaaccgtcgacattcaatgcaagggcaggcaaaagcatctcgtcaaatccagataagatgagtttgtctggaaaggcattgcgtacccgttcaagtaagtaaaagtctgcgttggtgtacttgattccgatgatctttggattttcaaagagttccgcaaattgatcggttgttaaggcaacaccagttaaagcagggatggaatagattaataatttgttgtcaacatctttaaggatttcgttgtagtagtctttgatttgttcaaaagtaaagttgtaatagaaaggcgttacggctgataatttcggatagccaagatcagtcgcaaacttagcgagttccttagcttcttttagatttagtgagccaacttgggcaaccaagtcaatcgcaccgtttgcttcatcatagacggtctccatgacttgtttcttttcgtcagtattcagcatgaaggcttcaccagtactaccacaaacatacaagccatcaaccttattgacgtcaatgttgtagcgaacgagagcacggatgccatctaaattaatattaccgtctttgtcgaaggctgtcatttgtgctgcatataatagttttttactcataagtataaaactccttaaaatttattttttgatggatttgtaataatcatctcaaaattcaaccgcttacaggaaatactatagcttctaataaaaattattgcaacacgcttttttggtaattattatcattatataaagaaaacgcttacgcaatcgttgctttcctgatattaaatttcttttttagttgataaaaaaataattattgtggtattgttaggccgttcatcttaacgattcgaccaaataataatgcaaggatgataattatgacaacacaatatttagtatttgatatcgggggaacaaccattaagtacggtctcattgacgaagtattacatctaagtcatgaaggcaagtgcctgactgagcataatcatgatggcctgatcttaaagcaactacagcgtgtaaccagggactaccaagcagagtattcgttagctgggattggcgttagtacagcgggaattgtgggtgcagatggtgcgattcaatacgcagggccaacgatctcagattatcagggaacaccaattaaagccgctttaatggcgcaaactggtctaccggtatttgttgttaacgatgtcgatgcggctttgctaggcgaacaattagcaggtggtgccaagggcgcaacttctgcatattgtgtggcactgggtacggggattggcggtgcgtatgtcgaagatggtcggcttatgacgggtgcccatgcgacagccaattcgattggctatacattgtatgccccccttaccaagacaaattatgaacagcgagcatcaacattaacgcttgagtatcaattagcaaaatatcagatgagtgttaaggatgcgtttgaagaagctaagcgtggtacggtcccgtatgtcgccatcattaatgattgggcagcagaagttgcgacgggattagcatcaatcctattattgtttgatcccgacattctcttgattggtggtgcagtatcgttacagggacaatatttggtcgatttactgaccaatgcgttgaagccactattaccgccagatttaattaaaacaaaaattaccacggctgaattagccgataaagcccagttatatggggcgatggcagggctgttgatacgataattatttttatttaaaaagaaagcgtttacaattatcgtattatgtgataagttgataacgtaataatcattcgaacagttcaaccgctactaaaaaatagtgcaagcagtgcctactgagtgttaaagcccagttttctaagcatgtttgcaagattttaagtagcggttttttattttgaaattagtgaagggtggactaaatcatgaagatcggaattaacaccgcaatttatgagtcacaagttcaggcaggagccactcaactggagtgcttaaaaacattagtaactcgttttgatgttagtgcagttgaagttcgcggtgaattcttcaaacccgagacgcgatcggcggaactgttagcaatcagtcagctttgtgaggaacaacactgggatctctattattcggttccagaggaactgtttagcagtgatggctataacgcaagtctagtgacaaatctagaactggcaaccaaatatcatatcaaatcattgaagtatagctttggtgtgcaaccaacattgcaagcacatgacttggaagcgctaactcagctgttagcaactacccccatacaagttacgatcgagaaccaacctaatgcgaatggtgatttggcgacatttgagtcagatgttgcttgggttaagtcacaaaagttgtcattagggtacactttcgattccggaaactggtattggattgatcaacagcctgaaccagcctttgcagcattgaagtcagcaatcaccgtatttcatttgaaggatatcaaggatcaaacaacggtgatgttgggacaaggggcaacggattggcacagtctattaggtcagttgtcacccgaaatcccagtatttctggaatataatattgcagctgcagatttatcgggacagattgatttggttaaacaagcattaagttagcgaggttcaataatatgaactatcttttgcaattagttttaatcttattactgacaaagttaggtgcgcatattgcggctacctttaacttgccaagtgtgattggggaactattagtcggaattttagcgggacccgcagtctttcacatcttaacgtatagtacttttattcagtactttgccgaaatcggggtcattattttaatgtttattgctggtctagagggcgatttgaaattgctttttcgctactggaagccagctttaactgttgcgacattaggcgtcatctttccaacggcatcggccgtcctactttgtgtgggaatgtccgatttctcactgacgacttcaatttttctcgggcttattttgagtgcaacttctgtaagcattaccgttcaagtattgaaagaaatggattatttaaatacacgtgaaggtgcaattattctaggcgcagccgtagcggacgacattatctgtgtggtgctattgggaatcagtacaagcctgtttggcactgctagtgcgcacaaccaatcgcttgtggcaatggttttgccgaaagtactgttcttcgtcgttgtaatcgcacttgctaagtggtttgtcccactctttctgagaggattcaataaggttaatgcatctgagaatattacgacagcggcgatggtgctctgttttggtttttcgttcttagccgttaagttaggaatgagcgatgtcttgggtgcatatattgcggggttagcgatttcagaaacacgctttaaggcgcaacttgttgctaaggttgaaccaattgggtatgccgtctttattccagcattctttgtcagcattggtcttgaaattacctttaagggaatgcaaaacgatctagtttttatcggattgttactagtgcttgcgattttaggcaagcaaattggtggtgccattggcggtaaattgtttggattgacctggaatgaggccaatattgtgggcgccggaatggtttcaagaggtgagatggcactggttgtcgcgaatgtcgctgtctcggcgggcttaatcgatcataatcactatacggcaatgattgtggtgactgttatggcgacacttattgcgccatcaatgcttaaaacatttattcaacatggtaaacgagctgtatcacatattagtttaaataaaacaagcgaggcgaaatcatgagtaaagttggatttggagttctgaattgggttgtcttaggagcatacttattggcaatgctaggtgtcggagcttattttaccagaaaagctagtaaaaacacggattcatttttcaaagcagaagggcatattcctgcttgagcggcggggttcagtatttacgcaactactttaagcgcaattacctttatgtcaactccagaacaagcatttttgagtgactgggcatacgctatcggaagtttttcgattctaattattattccaattttagttaaattctacattccatttttccgcaaattgaaagtaacgacagcttatgaatacttggaagaacggtttagcccagtcatgcgggccattagtagtttgctgttcgtactttatcatatcagccgggtggccattgtcatctatttaccgattattgctattacatcggtttcaaacatcaatccaattctaattgcctgtgttgtcggtggcctttgcattctctatacattcttaggggggattgaaggagttatttggagcgatgttattcaaggattcttgcttctaggtagtgctctgttaatttgtgttttaggaatcttttatatcaagggtggtttcggtacggtggttaacgatgtcgttaccaatcataagtttatctctggtaacgactttaatattggcaatctatctaagtttgtgccgttgatcttagctggtcaaatctttaatagtttgtatcaatatactggtagtcaagatgttgtacaacgttatcagacgacagctacgattaaagatactaataaatctatgtacactaatggctggttagcattgattaccattccattattttttggaatgggtacgattctttacagtttctatcaacacacagctgccttgccagcaggattcaatacgagtgcggtggtaccatattttgtcattacccaaatgccagctggggttgcaggattagtgattgctggaatctttgcggccgcgcaatcaacgattgcttctagtctcaacgcgatctcctcgtgtgtaattacagactttaaacaacgtttctttaacgataagttcaaaaatagtaatgatgttaccttggctcggggaatcattatcattgcaggcgtgttaggattagccgttgcgatttatctgttgatgggtaacgcttcacagatttggaacttattcttgtcggtcactggtatctttggtgtgccaattgccggaatcttcgctgttgggatctttacgaagcgtgctaatacggttggggtgttaaccggactagtgttaagtgtcggcttgtccttctgggtacaatcattaaacatctcttcattattggttgcttgcgttgccttcatttcagcttttgtcttgagctacgttgttagcctactcttcccaggtggtaatcatgatgtgactggattgactgtttcaacaattaatgaaacatacgtgaagaagaattaaaatgtccgacgatcttgtattaatatcgcttggttattagtctaacccatgatgtttaggacaagacgtagacgtaaatctgaaatctcgattgtcttcacatgaggatagtcgagattttgtgctcaatctgtttcaaggcaagttattgacacagattttaaggaggttatggaaatggagatacgcacactagctttaaaaacgcccgaaggacagccatttacgatgtggatctatcaacatgatcaattcacgctatttccggatgatcgacagtggccattagcgttgatttttcctggcggtggctttgcgggctactctgagcgggaagttgaagctgtagcacttaaatttattgcaaagggttaccaggcggccgtagtgaagtataatcttacgtcggatggcccgttttatccaacagctgccacgattggattagcggcattaagctacgttaaacggcatgcgcaggagttgaatgctgattctgatcacgttgttgtcagtggcttttcggcgggtggacatttggtagccgtgatgacagcgcttggcgctcaatcagaattcttaaataatcatggctttgaagagacaaagctagtaccatttgcgcaaattttaagctatccggtgattgatctgacaatgggttttccaactagtcatcatgagatgatggctgtgactacggatgaatcttactggcatgcgcaagagttagtcacgagtcaaacaccgccgactttcatttgggcaacgcggactgatgagcttgttccagttgtgaatagtctggtctatttagcagcgctaggtgagcataatgttccatttgagagccatatctatgcagccggtgtccacggattggcatttggtgatttagctgattctcgctatcatcaccctgaagatgtggtcccacgggttcaaaactggtttccaatggcattgggctggttacgtacattatatgctagcaagaatagtactgaaatttaggggggtgtgaaaatgaaatatgagcaattgagattaatgacgccgcaacattttgaatttaaattaacctgctattggaaagaccaacttaaaatggattatgatcctcggagatggccaatccttctaatttttccgggcagtggatttattcaaatgacagagcgtgaagcagaaccgattgctttggcttttagtgcacagggctatcagacaatggtagtggaatacaatctattggatcgcgggccagtttatcccaacgcaattgatgtcggtttgactgccttaaagtatgctaaaactcaaggaccaccacattatggtgatgcgaataagacgattttgatgggcttctcggcgggcagtcacgtcgcagcattaactaacgcgatggggaataacaccgagtacctcaaaactcacggctttggtgatagcccattgacgtcacgcttgcaggtcttaggttacccggttatcgacttggcggcaggttttccgaaaagtcgagaagaggcctttaaaattagtccagatgaacaatattgggctagtcagaacctagttactgatcagacaccgccaacgtttttatggaatacttgtgcggatgcggtagtgccaacaatgaatagtttattgtacgcagaagcactagctaggcatcatgtcgagtatgatattcatacatttacacatggaaaacacggtctgtgcttgagtacagttgaaactagtcgatataattacccagaagatattgagccacgtgcggcgaactgggttccgttagtgctaagttggttgagtgaaatgttagatttgacgcaagtggactttaaataggagtgacgaatgcaagataatgaggaagtattgggtactcgtttgcaaaatggaatgtttggtgtaccggatctacatccagatgaacaacaccgttatttagggaccttttacgaacgagttgaacttcaaatttcatttaagcaggctctgaggtatgactttacgtcagtactagtgccggtattgcggcaaccaagagactatcagcttttgttgaacggtcaattagatatggatatcatggggcgctatatgcggctagcgaatcagtatagcattttgtttactgtcaaaaatagtcacttttatcatcacaatctagatagtgcagcgattatcctgtgcgctgaccatgcacttaatcgaactgaagttgacatattgcagcgatacccacaaattgctcagagataaatcggaaaaactaccatcaagattagctgaaatcttgatggtagttttttagcgtttaccgaatttattatctgtaattaaatcgatcgtatgattcattcgatcacgatacttcgcattctctaatagcatggcggcgataatatcaagagcgtaggttatggcaaattgcgagttaacaaagcgcgagttgttgacgaatttgctgttttttacgagaatcgtaagatcacttagttctgctaagcgactgcgttcatcagacgtaatggcaataactttggcttgcttctttttggctaacgcaactgagtcgttgacttctgctgtagcaccagtaagagaaatggccaagataatatcaccaggttgcatgatgccaccgctgatgtacatgatatgggtgtcggtcatcgagaaagcggcaatccccattcgaattaagcgctgggtcatctcttgtgcggtatagcccgagctacccagaccgtacagatagactcggcgagccttggagattaaattaacggcggcatggagatcgtcgggggataatcgttcccacgttccactcagtattttcttgtagtaactatagacctggtccgcaacggtatcttttttgtcagtggttgttgcagggacaactggcccttcggctaattgaattttgaaggcgtaaaagttttcacagcccatttttttgacaaaacgggtaatggtcgcattactaacgtgaacgttcttagccagactagaaatcgtcattttttggacttctttcggctcttgaatgacctttaaggcgactttgcgttcttgtcgtgagagtgtcggatacgactcctcgacagtagttacaatactcatagatttggctcccatcatggtttccttatgttaacgctacaatagcatagtttttgccaaatagaaatagatcagaaatgaaagaagctataccaacacaactgttggtatagcttctttcatttcttatgaatacgatttagacatggttatcgttctacttcaatgcagtccatttccagttttcaacttctggaagatcagtaccttcagcacggatatagtcatgatgcttgtttaagatgctgttcatctcttggatgacatgggcacctttttcggcataggctggcgttgctaataaggcagctttaactaagtggaaacgatcgagttcgttgcgaacacgcatgtcgaatggcgtggtaatgtcgccttcttcgcggtagccatgaacgtgtaagttatggttatgacggtcgaagaagatggtctttactaagtcatcgtaagcatggtatgcaaagataactggcttgtctttagtgaagaaggcatcaaattcagcatctgataagccccgtgggtcgtccttcttcaacttcagaagatcgacaacgttaatgaagcgaatcttcatttcagggaagcgagcgtgcaagattgatacggccgctaaactttcagtcgttggttcagagccggcagttgcgaagacaacgtcgggttcttcaccattatcagtacttgcccaatcaaccacacctaagccatcacgaactaaatgcttagcttcgtccatcgtaaaccattgtggacggggatgcttgctggcgatgatcaagttaatcaattgtttactttggatcgccttatcaaaagttgcaatcaaggtgttagcgtcacctgggagataggcccgaacatattcggtcttcttttcagccaagtgtgagatgatacctggatcttggtgagagtaaccattgtgatcttgctggaaggcagttgatgatgcaatcacgtttaatgaagggacatcaacccgccaaggtgtttcttcgtgagaattccgtaaccacttgaaatgttgggttaacattgaatccacaacgcgtaggaatgattcataacttgcaaagaagccgtaacgaccagttaagttgtaagcttccaacatgccttcatccatatgttctgacaacatggagtcaataatccggccttgaggtgctaacaaagcatcgttaggttcgtggattggttccatccattgacgcttggtatcttcaaacgcagctcctaatttgttagataaagtttcatcaggaccccaaccgcggaagttcttgttatctttgtttaattcgattaaatcacggatatacttaccaagttcagtcatgtctgaaccgtcttccttaccgtgatccttgttgtccaaagcataatcatcgatatttggtgtaattaagtctttagttaacttgccgccgttagtgacgggattagcagccatacgagcttggccttcagggatgattgcggcaatttctggttttaaagtaccattttcatcaaataattcttctggtttgtatgatttgagccagtcaactaatttgtcggcgtgttccatgtgattgcgatcgacaggaattggaatttggtgagcccggaatgaaccttcaattggttcgccgtcccaactcttaggaccggtccagcccttaggtgcccggaaaacaatcattggccacttaggacgagattcatcattgttatccttggcgttcttacgaattgcgtggatttcttcaatgactttatccaattcttcagccatgattttgtgcatcttggcagggtctgtaccttcaacaaagtgtggatcccagcctagacctttaaagtagtcttcaagttcttcatgtgattcacgtgaaagaactgttgggttagaaatcttgaagccgtttaagttcaagattggtaagactgtcccgtctgtaattgggttgaggaacttgttaacttgccaagaagttgccaatgggccagtttcagattcaccatcaccaacaacagtagcagcaattaaaccagggttatctaagaccgcaccagcaccatgcaagattgagtagccaagttcgccaccttcgtggattgagcctggtgtcttagggtcggcgtgggaggcaacaccacctgggaatgagaattgcttgaataagcgcttcattccggccttgtcttgggtgattttaggatacgtttccgtataagtaccatctaagtaggagttagaaaccattacttggccaccatgaccaggaccttcgatgtagaacatgttgagcccatacttgttaatagcacggttcaaatgggcataaataaagttttggccggcaattgtgccccaatgaccgattggatggacttttacatcggtcgcctttaatggttcccgaagtaacggattatttaatagatagagttgaccaactgagatgtagttagcagcgcgccaataggcatcgacgcgttttagatagtcatcagaagaataatcaactgttttggatttaattgcttcactcattattttgcaactcctttgcaaacttttgttttatttatcattacggttattatgataacggtttcaatcataaagtcaaggtgaaattggcaaaataatttaagaacctggcatttaaaagtaagaaagacggttaggggcatggttttcccccaatcgtctttttttatttgccactaattaatgagatgtcggctaagcgaatttgtttggcaatctgagtgtccaattgttcatcggtgatgataacatccacatcattaacgtcggctgtcttgtaaagtgcatttttttcgaatttagtgtgatcagctaagataactttcattcgacaatgagacatcatctttttggaaacttccacttcttctatatagtggttggtgattcctgcttgaaggttgacgccgccacagccaaagaaaccaatgtcggcatagatattattgatattggcaagtgtgattggcccggacaaagaaccttcactagtccgcattgttccgcccaagagtacaatttgaatatttttaacaaactgtagcgagttgagaacgaaagtagagttagtgataacggttagattggttagatggctatgtttaatttcttcggcgatttgaaaagcagttgtaccgtaatcaagaaaaattgactccccatcatgaattaagcgtagtgcattggtggcaatttcatttttttcagcaactgcttcgtgtctacgcttaccatactttgtctcgttgacactttgcggggtagtagcaccaccgcgaattgcctgcactagtccttgtttatcaaggttgtaaatatctttacggatagtctcacgagaaacattaatttccttgctaatttcagcgattctaatggtaccacgttggtttaattgatctaaaatatacttttgacgctgcataacttccatatgaggtggcctccttgtaaaaataaaatttatttttcggtagtaatcatagcacatatttggcaattgtttgcaatctaattttgtaaagtgattgaaatctctatctaaatcctttatatgtaagcgcttaatagagtgctatgtcgaactttgtgagataattaacttgcttttgcgaacgcttatgtcgttgcaaagcactctttgcaaacgggtgttaaaaacttttttaaagaaaagtattgcaaaagatttgcaaaatgatacaatttaaactgttgaaagcgattacatttatataaatacgaagggagcgtcttattttgagtgagaaccttgttgaagtaagtgattatttgagagaccaacttatttttctacacacctcttttaaaacgtcgaaggaattatttacagcgattaacgcgaaggcacaggaaaatgggtttgtaactgatcaatttttaccgaaaataatcaagcgagaatcaacttttccaactggcttgcaactggaacatcgaggtgttgcaattccacatactgacgcggatacaatcaacaaagaatttgttgccgtggttgttaatgatgctccaattgcttttagtcggatggatgatccagagcaaaaggttgatgcaaaattagtttttgtgcttggtctgaataaaccacatgctcagttagagatgctgcaagcattaatgggaattattcaagatgattcattagtaaattcattggaaaatgccgagaactttaaccaaattcatcagttgttaagcaaataaaagataaatagaagaaatacgaggagagattattatgaaaaaattaaatgtattagtagcttgcggtgccggaattgccacttcaacggttgttatgaaaaaagttgaagatttgtttgccgaaaataatattgacgctaatttgattcaaattaagattgctgaagctgcttctaagcaggatgacgcggatatgttgatttcaacaactgtactaccaactgaatataagattccagcgattaaagcaatgggctttttaactggtcttggtgttgataaattgcaggatgaaatcttgactaaagcacgcgaaattcaagcacaataattaagagctagggttttaagcaggaggatgcattatgaaagtattatctgatgttgtacaaagcatcattaatgtcggccccagcgttatgcttcccattattatctttattgttgggttaatctttagggttaaaccgggtaaggcactcacatctgggattactgttggtatcggtatgattgggattaacctagtcatcaatttgttgacaactagtgttggtcctgctgcgcaggcgatggttaaacggtttgggtttcatttaacgattattgatgctggatggcctgccgtttctgctgggacatgggcacagccgatctcagctatcatgattccaattattttagtcgttaacgttggcttaattttgttaaatcttactaaaacacttgatatcgatatttggaattactggcatatgattgcggccgcggctacggcttatgtggtgacgaaaaactggtggtttgcaattctttgcgggattatctatgaaatcgctgtcttaattattgctgataaaactgcgccaaaagtcgctgagttttatggcttggatggcattagctttccaactggttctgctgcggcttatggcctaattggtattccaattggatgggttgtcagcaaaattcctggaatcagaaaatgggatgtggatccacaaacaattcaaaaacggtttggggtctttggtgaacccatggtcatggggattgtcattgggatgttactagctgccttaggtggttacagcgtaccgaacattttgaagcttggaatgtccatgggtggtgtgatgttcttaatgccgcgtatggttaagatcttaatggaagggttaattccaattcaagaaggtgctcaaaagttacttcaagagaagtacgggaaccggaagatttacttaggaatggatgctgctctttcaaccgggtcaccagctactttggcaactggactattaatggtaccaattacgttattcttagccattattttacctggtaaccgggtattgccattcggtgatttagcaacaattccgttctttgctgccttgattgttcctagtcgtaaaggaaatatcgtccactctgtactctctgctactatcgtaatggtatttgcattgttgatggcaactgactttgggccaacgttgacatcaatgatgcacggtattgttgcctttccaaagggcgcatcagaggtcactaacttggatacgggtggtaacatcttgaactggttaattttgaaactatcacagttagtacaaccattacttaattaaaggattatccgtagaaaggaaaatggattatggatactgtaaaaacaactaaaactgacgaattaaagggcgctaaaactatggaggctgtcgttaagacggaatctggttacgacaatatggaactgaagcaaattccaatccctgaagtaacaggagacaaagttttattaaaagtggcctacactgggatctgcggtactgatattcatacatttaagggtcagtatgccaatgcggtgacaccacttgttttgggccatgagttttcaggtgaagttgttgaagtgggaccagatgttaaaacgctaaagcctggcgatcgggtgactagtgaaacgacttttgcaacggatggcacatgtgtttactgccaagataaagaatataatttatgtcctaaccgtgtaggaatcggaactaaagctaatggttcaatggcaaattatgttctaactcgtgaggaaagtgctcacattttaccagataacgtttcctacaagatggctgcaatgtcggaacctttagcatcttgtgttcatgctatgtatcaaaagacaccattcacgttacatgacactttattaattatgggaccaggaccaatggggctactctcattgcagattgccaaagaaattggtgcctttgttattgtttctgggatcactaaggatgctgatcgtttacaaattgctaaagagttaggtgctgacattattgtagatacccaaaaagaagacttggccaaggtcgtgatggatgcgacagatggcgttggtgttaccaaggtttatgactgttcaggtgcaacaccagcggttaactctgcattaccattgatccgtaagggtggaactttccaacaggttggtctttttgcaaagccgatgaatgaattagatgaacgttcaattattcagcatgaaattacgtatcgtggctcacggtcacaaaacccgtatgattgggcgattgctttacatcttgaaagcaagggtgctattaaccaagatgcaatgattacgaaggtctttgatcttgaacactggcgtgacgcttttgatgcaatgatggccggtaaagagctcaaagttatgattgcctctaatcctgatgatccagatttagcagactaaactaattgtagttgaatgacagaatattaaaattataacctccttaatttagagcgctgagatatttgtcttggtgctcttttttgggagcaggggggttctttatgaagtatcaaaatatcttgttcgatattgataataccttgattaattcagcagacttaattgctaagttattgaaggagggggcagttcgcgagggtgttgatatgccaattgaagaatatcgtaagagaattggccagcccggtgagatgatcctgagagaatttggtgttcaaaattggcagaatgtattagccagatatctaattgaatttaacgagaatatgaatgaaataacgtattttgtgggagttgaacaaatgttagatgatttattggcaatgaatctcacagtgggagtggttacatctaaggatcgtgttcaatttgataaagaagtcagtcattttccgattatcgcaaagatgccaattgtgactactgctgatttaactaaaaatccaaagccaagtggagagccgattacctacacattagagagatttaacttagcacgtgaaaggacgttgtatgttggtgatagtatctttgatatgcaggcttcaaagaatgcaggcgttgattttgtagttgctaaatggggagcattaccgaatgtcgattttaataatgcgaaatatcaagctaagaccccgaatgatatcgttggaatagttcagtaagtaaatgagattagactggaaagagcgcattatttaataataaaaaatcctttttaactctaaaagcagaggccaagatagcaactttcgtttcttggcttctgcttttagatacattaataaatgaaatgaagacgagctagttatctttatacaaatatctgaataagtcccttttattattcaaatgatacagattagttaaccaatccttttgttgtaattgtgtcatcaagtcactgatgaatgatagatgcttctcgtaatctatgggggctagaccaataattacatggaccattttttgatttgtcataacaggtagcggcttatcaagtaaaaagaaagtagcaccgagattattaacgccatcacgtggagcagcgtgcgccaacataacgcctgacccaataaccatgtatggtccgttactttcagttaaatgaatgatctgatcgatataatttttttcaacactatagtcttcaagtaggggggacagtgctgtacgcaccgcctgcttccaagatttttgatgatttagaaaaccaacatgttctggcggcagtagtttgattaattctgataaattttcttggggtgcggctaatagtggttcctgagttagctgggtcaaatagtcgttgagtgcgagtttcagacccataggatttcttatcatagcgtagttgcctacaatatccaatagtgtatccacattaaataacttgagtgtgtcagaagttgccaacccagccttaataatagcattatcgatgatcttccactccaactcggaaggaaaagcagatacggtagttattggtatgttgcgctgggtgtttaatttgattgtactgatgacaagctgaacattacttagatctgaattttcgtattgaagcacattcattggactagaaaaatgaataccgcggtaacggctttctagttgttgaagtaatagacgactggtaccgatgccactagaacaaacgacaagtacttcattttgtgttggggtgcttgttttttgctcacgaatagcaccaccaaagtaaatggcaattaatgcgatttcatcatcagaaagtgtgtgatgaatatattgttcaaatggtacgacaactttacgagtgatttcaaaagtgtggtgataatgctgttgaatactttttaagtcggggtattcaaatggcatattatattgagcacgatagtaggttgaaagcaagtgaaccgttaaactgtcactaatcgacttgattgaaacatgtgcgccggagaggtggttaaaactagaaatcattcgaactgagaatggttttaacttttgaatcaagtcgtcattccaattgacatgagcaaattgactagaattgatcaacttgactaagtagtcaacctcattagagttatcgatatgataatcgttcaaaaaacttttagcccaaatgtgatccagtgttaagtcagtttgtgcggatataacatcacttagttggttattacagtctctaatgttagttaagtaccaatataaaaatagtcgaattgtgatacttgcatcgtcggttaaatattttccagttattctttcaaagagtttaatctggtcgtttatggtagtgggcttaatggtagcccgcctagtttgttcaatgagtgtcttcagttgagtagcatgatcgtacacccatttgcgaactgctgtcggggaacccgtgattattttaccggattctgtattggtgatttgtaaatgatatagcgctagttgtgagtgtagtactttgatatctctaataactgtgttcttagaaatattaaattggtaagttaggtccgctaacgagcaaccactagtgttgaggatactaaatgcaattagtagttggcgttgcttagcattgttggtcatgatcttgctagaagtttctttttctgtcattttatgcagaaatttgatcgtgtcagtcggaaggtaatatcctagttttttaacattagtaatcggaaattctgcatgctgatcaagctcatcgtttactttatttattagatagaataggctacgacgtgagatatgtagatgttgttgtaagaagttagctgtggtgtagcccgatgacgttaatagaatttctaataattcattaccatgttttcgtttgctgaaatttacacgcaattcagtatcctccctgtattaagtctactaaaaaattaaagcattaaggtaccaaagtgccaaagttgcactattctcaaaaacattgttgcacttgtggcgctattattcaagtttatactggtcattgtcagataaatagcgatatcaagaaaggaggatgaataaaaatgctgttggatttattgaataaacagactgtgcaagtatcagaaggcacagggctagattggaagcaagcaattgaattagctgcggaaccattgattaataataagacgattgaagatggatacatcaaggaaatgctcaatgtggtggaatcagaaggcccgtacatcaatatcggaccacaaatcgcactcgcacattctagaccagcgggtaacgtccatgaaatcggattatctatcttaaaaacaaatcatagcattagtctagtcaatgatgaacaccccatcaatttatggttcgtattggccgcggtagataataacagccatttagccgttattaaagagttaatggagttgttaaccgatgagtcggcggtgacagctatgttaaatgcaactagtgaagttgatattttagaagttattgcacatgagcaagaattacaaaaataggaggatactattatgaaatttttagctgtatgtcaaagtggtctgggaagtagttttatggttcagatgaacattcagagtattttaaaggacgagaatgttaaagaagatatccaagtggatcattctgatgttgggagcgttggcgctgattcagcagattacttctttgttgaatcaacgcttcaaagtgcattaggaagtattcctgagaataaggttgtgttactaaaaagcttgattgataagcaagaagtccggaaccatgtcaatacaattctggatcaagaaaatattgaacatgattagccgctgaaaaggaggagaatcacatgaagactgttttgaacttatttgttggtattgtgacccaaccgtctattttagtagcgctaattgcgatgttagggctactacttcaaaaaaagaaaagtacggaagttgttcaaggaactattaagacctttgccggtttcttagtcttaactggtggtgccggaattcttcaaaatgcattgtcaccctttgcttccatgtttaagtttgcgttacatgtgcaaggagttgttcctagtaatgaagcagttgttgcaattgccctggttaaatacggctcaacaacagcactaattatgttagttgggatgattgttaatattttattagctcgttttactcgctttaagtatatcttcttgacagggcaagcaatgttatatgtttcttgtttaactgcagttatattggtaagcgctaacattggcacgggttggcaaacgattgtacttggtggtctatttgaagggacattattaacggtaacaccagcattgacacaaccatttatgcgtaaaatcacgggtggcgatgatgttgctatgggacacacgggtaacattggctatgcgctctcaggattgatgggtaaatggtttggtaatgcagaaaagtctacagaggatctagaaatccctaagagtttgggctttctgcgtgattcgacagtttcaattacgattttgatgagtattgtctacattattttggcgattgtgacaggtccagcttacattgaatcgaaactgagtggtgggactaattatattgtttatgcattagtacaagcaggaacatttgctgccggtttcgtggttgttttacaaggtgttcggatgattttggccgaaattgtgccagcttttcaaggtattgcgaccaagttggttcctaattctaagcctgcattagacgttccaattattttcccatacgcaccaaatgcagttttattaggattctttgtcagtttcattgttgggacgctaagtatgtttatcatgattgcgctaggaactactgttattattccaggtgtagtggggcacttcttctgtggtgctgcagcagcaatttatggtaattctactggtggtcggcgtggtgcaatcattggcgctacagtaaatagtttgttgattagttggttgccattgtttattttaccagttttgggaagcttgaaattagcagcttcaacgtttgcagataccgactatttggttccaggaatcttgttaggaaaattagggagttacggaagtgtagcagttattacaggaattatcttgtttacaattattgtgattctttgcagtatttttcttacccggcgtgctaaacgtatgactgatggaactaagtaatcagtaattatgagtactactttcaataatttacgaaaactaataataaaggagataaatctaatcatgaaatttttcttagatactgcgaatactgaagatattaaacatttcgcggaacttggtttagtagatggggtaacaacaaatccaacgttggtgtcacgtgaaggtcgtgattttgaaaccgttatcaaagaaattacgcagattgtatcaggtccagtatccgctgaggtaacggcaaccaaggccgaagagatgattgcccaggctcgcaatgaagttaagtgggcttcaaatattgtggtgaagattccgatgactgaagaaggacttaaggcggtcaaactattaagtggtgagggcattaaaacaaatgtgacccttgtattctcagtttcgcaaggcttattagcggcaaaggccggtgctacttacatttcaccattcttaggacgtcttgatgatattggtggcaatggaattcagctagttaaggatttacgtcaagttttggatacttatggattcaagacggaaattatcgctgccagtgttcgggggccacaacatgttcaagaagctgcgttggctggcgctgatattgccacaattccagccgcagttttcggtaagttatggtctcatccattaacggacaaaggtttggccagttttgcttcggattggaaagcatttcaagcaacgcaaaagtaatcataatagcagcttaggaggtaagtataatgtttgataaagttgacgagctgggtgttaatactattcggacgttaagtatcgaagcaattcaaaaagcaaattccggacatccagggttaccgatgggagccgcaccaatggcctatgtgttatggacaaaacatctaaaagtcaacccacaaacacacatgaattgggttaatcgtgatcgtttcattctttcagctggacatggttcagctatgttatacagcctgttacatttagccgggtatgatgtttcgattgatgatctcaagcattttcggcagtgggacagtcggactccggggcatccagagtatggacataccgatggcgttgaagtaactactggtccgttgggacaaggcttcggtatggccgttggaatggcaatggcggaggcacatctagctgcccaatataaccgacctaattttccaattgttgatcagtacacttatacaattgtcggtgatggcgacttaatggaaggaatttcgcacgaagctggttcactagctgggcatcttaagctgggaaagttaattgcactttacgattcgaacggcatttcattagatggtaagacgtcgcaagcgtttactgaaaatgttggtgacaggttcactgcttatggctggcagcatctggtggttgaagatgggaatgatcttgatgcaattgacgcggcaatcgaacttgcaaaaaagacaactgaccgtccttctttgattgaagtgaaaacggtgattggttatggcgcacctaaacaagggactaatgctgttcatggtaacccaattggtgcggatggcattaaagcagctgaaaaagtatatggctggaattactcggattttgaagtgccgtcagctgtttcagaccggtttgaagtaactattcaggaaaatggtgcgcgtgctgagcagcaatggaaacggctatttgaagaatatgaggcgaagtatccagatcaggcgcagtcttttaagcaagcgttcaacggacaattttctgatgacttgaaatctactttaccgcactatcaattaacagatgcattggctagtcgggcggcaagcgctaaggcgattaacgctgctgccaaagtaatacctagcttatggggtggcgcagccgatttgtcgagttcgaacaaaacaatgattgcggaaacatcagactttcagccagaatcctacgatggtcgtaatatctggtttggtgtacgtgaatttggcatggcggctgcgatgaacggaattgtattacatggcggcactcgggtattcgggggaacattctttgtcttcactgattacttacgtgcggcagtccggttgtccgcactacaacacgcaccggttatctacgtcttaacgcatgattcaattgcggtcggcgaggatgggccgacccacgaaccgattgaacaattagctagtttacgatgcatgccgaacgtacaagtgattcggccagctgatggtaatgagacttcagctgcgtgggagcaagcactgaaaacaactgataaaccaaccgttctggtattgagtcgacaagccttgaagacattacctgtatcagttgatacggcctttgctggcgttgaaaagggtggctatgtggtcagtgctgctcaaaaagaaataccagatggtttactaattgcgactggttctgaagttaacttagcattggaggccaaagcccagttagcaaagcataatcaagatgtcgcggtcgtttcaattccgagctttgatcggtttgcgcaacaatcaccaaaatatcgcgctagtgtgcttccgagtgcggtaacaagaagggtgacaattgaagctggatcaacatttggctgggatcagtatgctggcgatcatggtgctaagataggtgtggatcgcttcggcacttcggcacctggtgacttggtacttgataagtatggctttaatgtaactaatgttgtgaatacttatctgaaattaaaataattattgaagaaatagaaacggggcgttgctcggtttctatttcgtgttcgataaagaatgaggatggctatgatggaaaatattaagatgattgcgattgatatcgatggcacactagttaattcaaaaaagcaggtgacattgcgagtcaagcaagcgattaaaatggcgaaggaaaagaagattaaagtggttatctgcacgggacggccattaacaggtgttaaagcattgttgcaggagttggaactcgatgctcaagatgatcaatacgttgtttgttttggcggtgctgcaacctacacaactagtggcgaactgattgatgaacgaccgattagttatgaagattatattgacttggaagccctagcacgtaagttacgcttgcattttcacgcggtatctgaggatcggctgtatacggccgaccgtaatattggtgattatacactctatgaagctaatctcgtttcaatgggtatctcatatcggacgccagaagagatgcggaatattaaactgattaaatcgatgtacgttgatgaacccgaagttttagacgctgccattaaacagcaaaaactatttgaaccgttgaaaaagcaggttactttcacgaaaagtacaccattttattacgaggccaacactaatggtgttagtaagggcaacgctttgcaagtactctgtgaaaagttaagtttgactgctgccaatgtgatggcaattggtgatgaagctaatgatttgagcatgattaagtttgcaggacatggagtagcgatgggcaacgctattcctgaagtgaagcaagtggctgatgaaataactgtcgataatgaacatgatggggttgcaaaggctattgaagaaatcacgagataaggataagtaggtataacagcattgttatatcggctataagggttacaattgattattgactcttaaagtgtttggaatagattaaattattttagagatgatttcatgaaaaaaactttattttttcagcaatgatcttatactaaaaagatgtaagcttattggcttatcaaatctaaatattattttcgaggaggattactatttatgtgtactgccataacttatcaatcttataataattacttcggtagaaatttcgattatgaaatttcatacaatgaaatggttacgattacgcctagaaaatatccactagtatttcgtaaggtggagaacttagatcaccattatgcaataattggaattactgctgatgtagaaagctatccactttactacgatgcgatgaatgaaaaaggcttgtgtattgcgggattaaattttgcaggttatgctgattataaaaaatatgatgctgataaagttaatatcacaccatttgaattaattccttggttattgggacaattttcaagtgttagagaagtgaaaaagaacatacaaaaactaaacttggttaatattaattttagtgaacaattaccattatcaccgctacattggttggttgctgataaacaggaatcgatagttattgaaagtgttaaagaaggactaaaaatttacgacaatccagtaggtgtgttaacaaacaatcctaattttgactaccaattatttaatttgaacaactatcgtgccttatcaaatagcacaccccaaaatagtttttcggaaaaagtggatttagatagttatagtagaggaatgggcggactaggattacctggagacttgtcctcaatgtctagatttgtcagagccgcttttactaaattaaactcgttgccgatgcagacagagagtggcagtgttagtcagtttttccatatactagggtctgtagaacaacaaaaagggctatgtgaagttactgacggaaagtacgaatatacaatctattcttcttgttgtgatatgaacaagggagtttattactatagaacttatgacaatagtcaaattaacagtgtcaatttaaaccatgagcacttggatacgactgaattaatttcttatccattacgatcagaagcacaatactatgcagttaactaaaagccactactgtaatagttaaaattgtttaaaagaggaaatcagtttgttatcagttgatttcctcttttatgtatcactgttttcagagtaagttccaatggctggcattgctgttaatatgacactagatgatataagttatcatgttaagctcgatggtaagttgggtttaattgatagaaaacataatagttatgagatgcttgaaatacctactaaaatacattttcaccaaattttatatgatcatgttttgaataaggggattaatttgagcgactggatagacattaagatattaatgacaagtttatttaggaaaagagcacgttaatatatccaatagtaattgaaataataaacaccttaggagtgattggtatcctaaggtgtttattaaagttaaggattaaaatattaagctactattctcgataacagctactgtcattatcgtaagtgagtttaacaacatgatcagacaattcaactgtgatctgctgataaactggttgataaccgtgatgagtgagttgcacattaaccttgttatgatcaacggtaattgtgtaattgttccattcacctgactgatacttaaagtcacgtccattatcttgatagtgttggtaggtcccttgagtaccaaatactctaaacgtcatcgctttcaacggttcatcgctaatgtggctaacagcgggtccccatggcaaaatggtgttttgttttacaaataatggtagtttatcgagtggggtatcgactacaatatcctgattaccggcatactcagcaccgttccaaaaatcaacccagttcccagctggtaaataaactaaccgcttaaattgagatttttgaacaacgggggcaactagtatgtcgtcaccaaccatgtattcgtcattcaagtcgcgtacacgagggtcctgatcgtagtttaagacaacgggacgcatgattggtaagccagttttggtttccttagcaaataaatcgtatagataaggaatcagacgataacgcaatttgagatacttgcgataaatgtttaacgttggctcgccaaatgcccatggttcttgttggcgagtccctaatgctgcatggttccgtaacagtggactgaaaattgccccttcaatccaccgtgtcagtaattcagatgtcgtgtctgaggcaaagccaccaatgtcagttccagtaaaactaaagccacttaatcctagattgcagagttgtgggatcatcatttggatatgtggccacatactgcggttgtcaccggtccaaacagtcgagtatttctgagttccggcgtaagctgcccgtgtgatgacaaatggtcggttgccattttgctcttttagtccagcataggttgctttagccatattatggccataaacgttatgcatcttcttatgtgttgaaggcgtgtcttgatcattaaagaccacgtcatctggaatcggaccttcgaacgtagcgggttcgttcatatcgatccaaataccagcgacacctaaatcagttaaaaatttaccgttgttagcccaccactgacgaacttctggacgaccgaagtctggaaaagcagcgttacctggccatactttgttaatatagacatcaccgtcagcagatttaacgaaatagccttttttaagaccctcggcataaatgtgatagtcagaatcttgtttaacaccgggatcgatgattgggatgaccttgagaccctgttggttcaacttggtaataaacttcttgggattaccctggtatttatccttgtcccaggtgaagacccgataaccatccatgtaatcgacgtcaaagtgaatcgcatcgcatggtaagtcgtactttgcaaggttatctgcaattgcttgcacttcttcttgactagcactgtagccccaccgtgattgttggtaaccgagcgtccacttttgaggtagtggcgttcgaccagttaaataggtgtaattggtgacaatgtcttttaacgtggtaccaccaataatgtagtagccgaggttaccttggacagctgaataaaagtagtaatggttgctttccttacccatatctaaatggctctggtaggtattgtcgaagaagataccgtaaggatgtccattctttagccccaacatcactgggattgacttgtaaatattaggtaggatctccagctggggagcggggttatcaacgttccaattatcataggcaaaaccacgtttgttcagatatccggtcttgtcaccaagtccataaagatattcatcaggtgctagcgatttaatgatttcgtagtaaccttgatcagatttagtaggtgccttagtcactgaatggccttctgcctcaactaatcgttcatggactttgtcgacgcctttcaagtgaatgcgttcaccacgataatcggtaatcaaggcattgccatctttatcaaaggtatcaagatgccgttcggaatcgaggtgaatcgttaaagctgatgtccggataatgtaatgatcaccagcactttcaatagtgaaatcagtcgcctgaattttatgaccctcaattgcataggatccaccttgctcaccgcgattaataaagacgcggatgatttccggcgtaacaatagttaattgtaatggttgggcgaaagcaaacgtgatcgtttggccgttctgtgtgtaacttggtaatgcactcatattaaaaaacactccttagtaaaatgacttttatttagttggattctctgacaaatcttcttgaggcttgtcttgcttaataatactaatggcaagtactgcgatgaacattgagataccagcaataagcatcattccaggcatcgaattaccaacgaatttaaagaccataaagctggcaacggatgcgagaatttgtggcaagcaaatcgtaccgttaaaaattccaatatatgagccttcattggcaccatctagtgaagaagtaaagatattaaagggctcgacatgcaccgtaaagaagccgataccgattaaacagaatggggcaattaataggtactggttgtgaatgaagaatacccaaacgaggccaactgcgaagctagctaagccaaagcgataccaaaactttcgcttgtatggattagtccgtgaaagaactaagaaaccatatagaacggcggccattgattgaatgaaggtcaagattccataccaattaccggcagcttgatagccagccgaagcagcattagttgtgtgccaaacgttttcggcgatagcaccagtagtataagtccacatatattgaataccaatccaggcaaatagttgaacgagggcaacttcccagaaagctttcggggcttcttttactaattgccaaataggcttggtgtgcttatgttgttcaggatcgatatgatgataaagtgcgtacgtgtcaggatcatattccttaaccgtatgaatagtatatgctgagatgcctaataaaataatggcaccaatataaaacgcaattcttacagaaagagggacaacgcctttttgcgccgtgtttgcaacaccaaagtaagttaggacgaacggtagaatagtagcaagtacgcctcctaggttactgaaagcttgttgccaagaccatgctttgtccttctgattttcattaaccatatctccaataatcatgcggaatggttgcatgcaaacattacttgataaatccataaataaaatagcaatagcaccaaatagtaatgcagcagttgaagcgtagccaaagccgaatgaaccagcatttggtaataacaccatgaccaacgccgctaatggtgcgctgaatagtaagtagggcattctacgaccaaagcgcgtccaagttcgatcagagtatttaccgactagtggttggacgaataatccagccaatggcggcagaatgaagaagagtcctagtttggtgggatcagcgccaatggtctggaaaatccggctcatctgtgatgattgtaatgagaaggccatattaaccccacaaaaaccaaaggtaattgcaaagatggtttttaatgggaggttgggcagcgaattagcaataatagatgtcttaggcttactggaaacatcagcgattggtttattcgggtgtactgcaggttggttcatgagaatccatctccttaaaagttaatcacttttcaacagggcaatactagcacttaacgtaaacgtttacaataccgttttaataataaagtaaacgtttacgcttttggcaatgatttaaccggcttttagcgctataattaatttaaatcggaggggagctggaaaaatgaagccaacaatcaaagatattgccgctaaaactggcttttcaattgctacagtgtcacgagtgttggcgaaaaaacagggtacatatagcgacaagactcaggagcgtattttaaaagttgctaaggatctcggctatcggaagaatacactagccatggaattggttaaaaagaagacggacgtgattgccgttattgtcaacgtcacgccgacgaatttttcaagtggaattattgatggtattcaacagcgcgcgactgagatcgggttacaggttattattctatatgctggtaatcggaataccgagttacaacatcaagcaattgtgaccgccttggaacgtactgtttcaggtattttgttaatggcgattgaaccagataaagcagacttacaattattaacagaatcaaagacaccgttttgttttgtttcgatcaatctagcagatgaacgcgtcaaatccgttagctctgacaattatcaggcggcctatttggcgacaaagtatttaatttcgcatggtcatcggacaattggcctagccggaatcgaccattatcatacaggtagtcaacggcttgctgggtatcaagcggcgttaaaaaattattcgattcatgggcaagctgaatgggtgcaacccggagattatagttatcaggctggttataatgtttttaatgcttatcaagagctgggcattactggggttgttgcagctagtgatatgacggcggccggactacaaaaggctgctcaggagagtaatgtgaagctacctggggcgctttctgttgtcagcattgatggaacgctcatctgcgatattgcgactcctgcgttgacaagtgttacccagaattttgtccagattggtattgaaagtgttaattgtttggttggcaaatctgccacgcggttagtcccagtcacattggttgaacgtgagagtgttgcaactatataaagcgtactgagaaataattttagcttcgctgacctgataatcgagaacttgattgtcaggtcagcgaagctttttggttacaacgagattattccgtcactttaaatacgttctcattaacgttagtatattgtcggtactaagcgattgttttatgcgaaaagcagcaaagtgattctcaaatcgatgaaaccgctttatttcggatgctatactacagcaaatgaagtcgaaagtgggggagactatgcaaattgataagttaacattaaaagatgtggcaacgacgaatcggcagtatctggagacgatttttgccttgggtgatggtcacatgggtgttcgggactcagtaccgtttacaggtaatcaacaagcaacactaccagtgatgctcatcaatggctattatgcgacgaatccaatcacatatggagaaagtgcctatggatatgcgaaaaatcatcaaacgattatttcattaacaagcccgcggtacttagactttgcaactgagaagacaagttctgagattcctggtgactgggatatgacggtcgacgatgccgtgcttgattttgatacgggcgtactaacggaaaagtttcagattgttacctccgaccaccatcattttgaactggtcgttaaatcaatgattgcgttggataattcgcatcaactattcttgaactacgaactgacttcgcttgattatacggggacgttgcggttcacgcggccgattattcatgatgtaactgcgacgacggcggacgcggacgatccgcgagtggcgcaacgacaatctgggttaaccaaccaatttataccagctgatcgtcagcagcaaatagagtggcagacgttggtagcttcaacacaccaacaaataacgcaacgggattggttgaccagctttccgacaggctttgaagtatatggcgatcatgccggttttcatggcagtggtaccatcgaagtacagacaacgctgagctggtcgtttacgcgccaaatcagtgaaattaatcaagcgttgccggataagataatgggttggaccaacgatattgtggctcgtaatcggcagattttaacggacttttggcaacagtcgcaagtgcaaattagtgataaaaagttacaaactgggattcaatataacttgttccagttatttcaatcagctggtcgtaacgggttaacgaacattgcagctaaagggattactggaccgggctatgagggccattatttctgggataccgagatgtatatgttaccgttcttcatttatacgcagccacaaattgccaagcaactgttgcattatcggtttagtattttgccgcaagctcgagagcgggcgcggagcttgggtgtgacacggggcgcattgtacgcatggcgaacgattaatggtgaagaagcaagtgcctattttcctgctggcactgcgcaatatcacatcaatgcggacattgcgcatacggttaagttatattttgatgtcactaatgatcagaacttcttgcgggaacaaggtgcagcagttgtcctggaaaccgcacgtttctggttgcagtttggtagctggcaacagcgtgatggccggtcgcaattttgcttatacaaggtgacggggccggatgaatataccgccttggtagataataattactatacgaatcggatggttaaggaaaatatggcttttgcagcttggctactcgaaaagcattatattgacggcgatgctgatgaacaagtgcagttcacaaaggcaagtacgaacatgtacctaccgtatgatcaagaacaacaagtcactgcacaagatgatcattcaccaaagatgccggtgtggccctttgcgacgacggcagcgacgcaatatccactgttgttacattatcacccgctcatgatttatcgtcaccgggtcaacaagcaggcagatacgttattagcagaaatgttgttcccagaagatcaatcgcttgaacaactacgtcgggattatgcttactatgaaccaattaccacgcacgattcttcattgtcacgttcgatttttagtattctagctagtcggttagatgatcgtgataaggcttttagctactatatggatacgtcgttgatggacttagttgatttacaaggtaatgccaaggatggcttgcatgaggccaatcttggtggtagttggttgggattaacatatggatttgctgggatgtatgtcgctgacggcaagttacacattaccaatcatttaccaactcagatagcacatcttagttatcggttgcgttttcgtagtcgagtactagaagttcaactatatcaagataaaacgcaagttaagcttgtcactggcttaccgttagcagtggtagtggctggaaaagaatatgatgtattgcaaggtgtccgtagcgaatgatgaaaacttatagcgaattgaccagatggaagtagtacaaaaaatatttacacacggttgataccgcttacaattgttgctaatatatacagcataaataaaagcgtgttactgactcgatcaggcataaacctactcataactgtattcatagtctctttggtgagatgtgatactttttaagtaggttttttgtttgaaatccaggaggcgtgagtggtgaaatttctaaagaacttcaataataatgccgctttagtggtagatgatcaggatgttgaatggattgtagttggtaacggtgtaggttttggtaagcatcagggtgatcagattgatgatcagaaaattcagcggcgtttcgtggcaactttgaaacagaatgttgatattgatgactttcaggatttgaaacctcagtcttttgtgattacaacaaaggtggttcacctagtggagccgctgttgaaggtcagttttagtgattatcagtactttgtgcttgcagaccacattgattttgcgttgaagcgagccaatgatggaatcgatgtcgataacggtacagtccgttgggaagttaaaaaattgttccctaaggagtttcacgcagccagtcaagcggtcgatttaattaatgtgacggcggacgtgatccttcctaaaagtgaagtggtttttatgacttatcacttcatcaatgctggttcagatggttccaagttgcaggaaacgattaaaattacgaaattgatcagtggcatcattgatatcgtgcaatatcaataccagatgcatctggacccagagtccttcaattacaatcgtttcattgcgcatttacgtgcgctaatggtgcaacgcgttagccgcagtaatggaactgggagtgaattagatcagtcattactgcagttgatgcaagtaaaatatgcgcatgcctatgcaacagtggagcggatcgatacatttttacaaagtaaggctggctggcgactagagccggacgacaaagtctatttgacccttcacatctggcgcgtcacccaccgacaaaaaagtgaataaataagattattaacggtgtgttactggttatgcaggcattaacccaaatatcttttcttgagagcagcagtcactagggccctagtggcatggtttgaagaaaggacatttgggtttttgtttactcaaattgcaattattgatttatagataaatgaggaggaacaatgatggcttatgaagatttaagtaaaaagattatcgccggagttggcggtaaggataatgttaagagcgtggttcactgcacaacccggttgcggtttaagctcaaagatgaaagcgctacccatactgatgaattaaaagatacagatggtgttattacagttgttcagtccggtggtcagtaccaagtagtcattggaaatgaagttgcagacgtttatgaaacgctcattcgcgtcggtggttttgccgatggtggtagtgtacctgatgattatgaagacggagaaaagatgagtatctttgaccggttcatcgatttgatttctggtatttttactccgatgttaggtgttttatgtgcggctgggatgatcaaagggttcgttgcgatgtttgtcgcgttcaattggttgtcagagaattcaggaacatacaagattctctactcgatcggtgatggtttcttctatttcctaccaattgttttgggattgacagcagccaaaaagtttcatgttgatcaatttgtcggaatggcgattgggatggcactttgttatccaagtatcgtcgctttgaacagcagtaaaacagtattaagcacgctgttcagtggcagtatttttgaatcacagattcacgcgactttcttaggtattccagttgtgatgatgagctatacttcttcagtaattccaattatcttggccgtttggtttgcatctaaagttcaggcatttgcaaaacgaatcgtgccaacggtagctaagacgttcttagtcccatttattacgttattaatcgcagtgccgattacctttttaattattggaccagttgcaagttggttaagtgatggtatttcaacagtatgtgttgcaatctataacttcagtccgatcgttgctgggcttgtgatgggtgctttctggcaagttttcgttatctttggtgttcactgggggttcgtagctgttatgatggccaacctagcctcacaaggctttgaccctattttaggattatcattagccgcttcgtttgcccaaactggagttgtattaggcattctattacaaacgaaaaatcaaaagacacgcggtattgctttaccagcctttatctccggtattttcggtgttacggagcctgccatatatgggttaacattgccacgtaagcgcccatttattctgagttgtgtggccgcttcaattggtggcggtattattggttttgcaggtacaaaaatgtatatgatgggcggtatgggattattctcaatcccagctgcgattaattctaaaactggggtagacggctctgtatatggcttaattattgcgatggccattgctgcagtccttggttttgccctacaaatgttatttggttacaagagtgttgatagtaatgacaagcaaactaaggtcgtagaaactgcggcaactgctgatccagtcatggtcggtggtgtttcagtagaaacgacaccaactggtgcagcaactaaagtagaaccaagcgtcacttacaatgcggccactaagttaagtagccccgaaacgggccaaatcatcccactaagtgaagttaaggatgaggtcttctcatcaggtgcaatgggcaaaggtgttgcaatcgaaccaactgatggtgtcttatacgctccagctgacggcgaagtagcactcgtattcccaactggacatgccgttggtttaaacacaacagatggtgctgaaatcttgatgcatattggaatggatactgtcgaattagagggcaaaggttttgaaacgctagttcaaaagggcgagacggtcaaagctggtcagccgctagtgaagtttgatattgaagcgattaaggcggcagggtatcccgttacaacgccaatggttgtgactaattctaagaactatcatgacgttaaactggcctttccagctgctacggaagttaatgcaactgaaccattattacaattagactaattaaaagggagttttcaattatgtattcaaaaacaatgccaactggctttccaaagaactttttgtggggcggcgcgactgctgccaaccaagttgaagggggttggaacgttgatgggaagggcctaacaactgctgaagttgttcagaaggctactgaccgcaaagtaatgtcgatgaacgaggttactaaagagagtgtccaagctgccattgatgatcaaacggataagctttatcctaagcgccgtggcgtcgacttctatcatcactataaggaagacattaagctattcgcggaaatgggcttcaaggtataccgcctatccttagcatgggctcggatctttcctaaaggtgatgaaactgaacctaatgaagctggtttgaagttttatgacaatgtttttgctgaatgtcacaagtatggtattgagcccctagtgaccatttcccactatgaaatgccattaaacctaacattaacgaataatggctgggcaagtcgcaagacaattgcagatttcactcgctatactgaagtgctattcaaacgctataagggtgttgtgaagtattggctaactttcaatgaaattaacgcttcaacttggggatttactggtactggtgcaattgatagtgatctaagcttacatgatcaaatgcaattacgctaccaagcgctacatcatgagtttgttgcaagtgcaattgcagttaagcagtgtcacgagattgatcctgaggcccaaattggctcaatgcttgcgcggatgcaaacttatgccaatacgcctaatccagctgatgttcgggcggcccaattgcaagatcaattgaatttgttctttactgacgtacaggtacgtggtgaatatccagaatatatgaaccggtactttgcagaaaacgggattgaattaacgatggcagctggcgatgaacaattgttagctgaaggcaaggtcgattacttaagttttagttactatatgacgacgattacttcggcgactgatgatgttgaacaagccagtggtaacttatcaatgggtggtaaaaatccatacttgaaatccagtgcctggggctggcagattgacccagttggtttacggattaccttgaacgagttctgggatcgctatcgggtaccattattcgttgttgagaacggcttgggtgccgaagatgaaatcagcgccgatggtaagattcatgatgattatcggattgactacttacgtcaacatattgaacagatgaaagaagcagtcaaggatggtgttgatttgatgggctacacgacctggggttgcattgatgtcattagtgccggtacatccgaaatgtctaagcggtatggcttcatctatgtcgatcaagatgatgaaggtaatggtagtttgaagcggatgaagaaagactcatttgactggtataagaaagtaattgcttcgaatggggaagatttgggatagttattaataattgatattcagaccaatgattgattatacttgttgtaagggctatcattattagctaactagaaagggtgttgattaaatgtcagagttcccagaaggatttctatggggcggcgcgactgctgccaaccagttagaaggtggctaccaagaaggtggtcgtggcttatcgattgcggatgcgttaccaggtggcaaagaccgatttaaaatcgttagtcaaccagattttgactggacgatcgatacagataagtacacctatccgaaccatgaaggtattgatttctatcatcattacaaagaagatattgcactgtttgccgaaatgggtttcaagtgttatcgtttctcaattgcatggtcacgaatttttccaaacggtgatgaaacgcaacctaacgaagccggattaaagttttatgatgatgtgattgacgaatgcttggccaataatattgaaccagtgattacaatctcacattatgaattgccattgaacttggccaaacggtatggtggctggaagaaccggtatttgattgaattctacgaaactttcgcgcggaccatcttaacgcgttatgcttcaaaggttaagtattggatgaccttcaacgaaatcaatagtgcggcacattttccggtgatgggccaaggattagtgccatcgacgggtgctaatgacaaaaagaacgtttttcaggcatggcacaatcagtttgtggccagtgctaaggcagtcaaaatcgcccacgaattgcgagacgatattcaggttggctgtatgattctctatgccactagttatgcttatgattcgaacccagttaaccagctggctaatttgcagcataatcaagatttcaacttcttctgtgcggatgttcaagtacgtggagcttatccgacctataccaagcgactgctggctgaatataatctgacctttgatgatctggagaccacagatggcgacttggcattactacaacaatatccagttgattatattgggtttagttattatatgtcgagcgcggtggaaaccacgggtagtgtaaccgatactgttgctggtaacctgatgggcggcgtcaagaatccatttttgaaggcgagtgactggggttggcagattgacccaaccgggttacggattgcgttaaatgagctatatgatcgctatcagaaaccgttgtttgtggttgaaaatggcctaggtgcgattgataaacctgataagaatttctatgttgaagatgattatcgcattgattatttgaagcaacatattgaagcgatggctggtgccattgatgatggcgtcgatttgatgggctacacaccatggggttgcatcgaccttgttagtgcatcaactggcgagatgagtaagcggtatggctttatttacgtggacctagatgatcagggccacgggacgttagctcgctatcccaagaagtcgttctactggtatcaagatgtgattaagcataatgggttagcggagaaatctgaatagttgaaatgcaattagtgatatctgacagcaatatatcattgatgagatgatagaaattggcatttaacgcttgcaatcgttttccgaaaccgctatactagctaattgtaaataaggattgttaccgctaacattagctagtgggcaaaacctaattaatcgattgtattcgtgattgatagcacggatgcagtgggttattaggtttttttctttatttaggtatgagagtcgaggagcgtgcgcatgcgaatcaaaaaggtttttaataataacgtcctattggctgaaaaaaatggacgggaagttgtcttaattggtaaaggaatcgggttcaaaaagcatactggtgacgatgttgagcaacaacagattactaagatttatacgccagaaggagataattggattagtaatttccaaagcttgatggcagatattgaaccggaatattttgaagttgcttcgcaaattattgagttggcagaacaacaattgcaaacgacttttaatgtttatttgttgatttcattgactgaccatattcactttgctgtctatcggcaccaccatcagatggatattcataatgaaatcttgtgggaaactaagcgaatttatcaccgtgagtttcaagtcggcatgcaagcattggcactgattaaaaagcattttgatgtgacgttgttggaagatgaagctggatttattgcaatgaagtttgttgagaatagtatggctgactctaacactgatcaaacacttgcaatgactaagttgattaatgatatcttgaatattgttaagtatcagctgtcattaacgatgccagatgagagtgttagtttgcaacgatttttagttcatctacgcttttttgcggagcgtttaacgctgaaacgacctgatcaatcccaaggggcagatgatgatttcttatttgaacatttatctaagcaatacccccgagcctttgcctgtgtccaaaaaatcgctgtttttgtgaagaagtcgacggaacagactgtttcggtgaatgagcgtatttacttaatcatgcacattcagcggatgttgaacgagaatcaataatatttttgggattgtaactattcgattaggcaaaacccaagtagcaaccagtcaacctgtgtttttagtgttgataacgggcctacttgggtttttgtcgttttataaagggaggaaaaagtgtatggattattcagaattagcacaatcaattcttaccaatattggtggaaaagataatattagcaaagcatggcactgtgcgaccagactacgtttcaacttaaagtcaacggacaaagcgaatactgaggcgattgaaaacttagatggtgtcattacggttgttcaaagcgcgggccagtatcaagttgttattggtaatgctgtggcgcaggtctttgccgttttagcagatttagcaggattagcaaatcctgatacggcggctgatgcagctactacaacggaagatacgggtgaaaagcaaaacatcattaatcggtttattgcttttatctccggaatctttacgccgtttttaggtgctttggctggtgctggtattttgaaagggttgctagctttagcggttgcttttaattggatgtcaacgactagtggggcttataagatttggtattctgctggtgatgctattttttactttttacctgtctttctagcatttactgctactaagcagttgaaggttaaccaatttgtagcggtgtcacttggtgcagccctgctatacccaactttagtaactgttatgacgaattcaacaacactacatttctttggtattccggtggttccaacaacatacacgtcaacggttatcccaattctactggcagtttgggtattgtcgtatttggagccagtgctggacaagctatttccagcggcaattcggaatattttcacgcccctcttttcattaattattatggtgccattgacgctgttagttgtcggcccaattgggggactcattggtaatggattagcaagtggtgttatggcaatttataacttcatgccaattggtgctggtgttatcatgggtgccttctggcaagtctttgttatctttggtgtacattggacgttcgtaccattgatgatgaataatattgctaagatgggttatgacccgttgttaccaattcttagtgcggccgtattatcacaggctggtgctgcgttagctgtttttttgaagtcacgagatcaaaaaatgaaagcattagcagggtcttcttttgtcacagcattgtttggaattaccgaaccgacgatttacggggtaacgcttaagttaaaacgaccattctattgtgccgttgtgggtggtgcccttggtggtgcaattattggcgccgctggtacgcacgctagctcatttacactccctagcttattagcggtaccaacttttctaggacatgggtttatgggtgaagtcattggattgattgtagcattcttaggtggtgcgatcttaacgtacttctttggattcgctcgtcaacagcaggctgatcactcagtagtaagtgatcaaagtgataacacagtaatggctccggttgaagggacaattattccattgactagcgttcatgacgaagtatttgcgtctgaagcaatgggcaaaggattagccattgttccaaataaagggacggtcacagcgcctgttgatgggacaatcacggcagtatatcccactggtcatgcgattggaattacggccaatagtggtgctgaaattctgattcacattggtattaatacggttcaattaaatggtcaatacttcgaaacaatggttaagcaaaaccaagtagtcaaacgtggtgatttattaactaaatttgatgtggataagatcaaaacggctggttacgatacaactgtcatggtcattattacgaatacggctgactatcaaatggtcaagccaactgatgcgacggaggctagtgataattggattttagaattacaacctaaggagatcatggaaggagcaccagctaatgtataaaccaacttatcctaaaacgttccctaaagactttttgtggggcggagcgacagcagctaatcaagttgaaggtgcctggaatgaagcaggtaaaggcctgacaacggcagaagtagtgaaaaaaacgacggatcgcaagcatatgtcaatggatgatgtaacgatatcttcaattcaaacggcgctagatgatcaaactgatacaatgtatcctaagcgtcgaggtgttgatttttatcatcattacaaagaagatatcaaactatttgctgagatgggatttaaagtttatcgtttctctattgcttggtcgcgattatttccaaaaggtgatgaactcaagccaaattcagatggacttgctttctatgatcgagtcattgatgaattgcgacgctatcacattcaaccattagttacgctgtcacattatgaaatgcccattggattaacgcttaagcaaaatggatgggccagccgggcaaccattgccgattttaatcggtttactgaagtcgtttttaaacattttaaaggtcgcgttccgtattatttaacttttaatgaaattaataccggaacttgggggtttcatgccactggagctgttgatactgagaattcggcgcatgatcagatgcagttacgttaccaagcgctgcaccatcaatttatcgctagtgcactggctaccaaacaattacatgctattgacccggatgctaagattgggtcaatgctggcaagaatgcaaacttacccagccacacctaatcctgcagatgttcaggctgctcaagtggaagacgataagaacttatttttcacggatgttcaagctcggggagaatatccagaattcatgaaccgtttttttgcagagaatgatattcaactgcaaatggcaccagatgatcagacgattttagcgaagtatccggttgactttattagttttagttactatatgacaacagtaactcaagctgatgcgcctgaacaagtgaacggtaatatggctactggtggtcgtaatctttaccttgaggaatccgattggggttggcaaattgatccggtggggttgcgagtgacactgaatgagatgtgggatcgctatcgtaagccattatttgttgttgaaaatgggctaggcgctctagatcaattaacaactgatcaacaagtgcatgatacgtatcggattgactatttacgtaaacatattgcgcaaatgaaagctgcagttcaggatggcgtacaactaatgggctatacgatgtgggggccaatcgatttgattagtttttctacctcagagatgtccaagcgatatggttttatttatgttgaccaggatgatgctggtaaaggaagtctgaaacgttataagaaagattcattttactggtaccagaaggtcattaaatctaacggtgaagatctagcttaattagttaatgatggtgaatttacgtgatataagaactgacttgccgctggtgtgatcaactgatgggaaatgatactgttagcatccacccagtttaaaatagcatgtgaattgcagaaatttgctttgataagttggattaaactaaaaaggtctatctcgaaattattaaaatttcgagatagacttttttataatcagtaacatattttttactatattcaatccacaaaccggaacttactccaaggcttaataaagtcaagcagtaacagttcctcaggtgcaatccgaccaatccgattctttcggggttcacagtggggttgtaagacgatttgcaattcatttttataaatgccgaagttgtcgttgcctactaatacgtcgccacgctgaaattccacatcattatcgtgtggactgttgggcgtttccttgtaggtcacacggggcatggttgaacggatgacatttgggttaatatcgccacggcgaaaatgttgtggggtcaaggcaatggttctttcgattgcattcgtctgggcttcaaattcaatgtgaaattgtacttgataccgattgattgctgataatgcggccagttcggcttcactcgcataagcgttaccgataattacatcgtcgattagtccggaagcgaagagatgcttggcctggacggcgattggtaagcgccgatcagcttctaatgttggcagaccatcgttgacgttccatggccccatcgtaccaacctgacttgccacgaaagcggcggagtgaatgccgaacttacgaaaacgttcgctacacttaacgaaaaagttgtaaggtagtgcggttccaacttggggatagaaattatggcagccataaataaatgggacgtttgcttggtagctgagaatattattcagataatcgacgtcattactcatattaagttcgatgatcaagccgtacggattatacgagagcagcgcctcggtcgcgccatcgaaaccctcatctagtcgaataccggcgacgtgtaaatcagcgaaaaactttagatctttataggaaattcctagttgtttaaaaatccgtggtgaaacgtccaaaatcgtttggtaacccaactgatttccaacgtcaatgattttctggtacttagctttggtttcggcgaccgtaccagatacttccagcatgctcataaaaattcgagtgaagccgtagtgttggcctaatttgagataagcggcgttttcttcaaagtcgctatgatcgggataaatggataaacctagttgacgcattgtcatgaattaatttcctcctgagtccaccggtgccaatagatgacggcgtgggcgttgttagttgtaatatcgttaaatgcaattgttggtattgactggtgcactgtcgtcgttaacgtgtcgcggaccaggcgattgtgttttaaaacggaaccagagagggcgacccgttgtggccgggactctgcaaaccgctgatataaggtaacgacttgttgtgccagtgcttgggctgacgtgactaataccgtgatggcttcagaattttgttgctcggccagtttggcgattaactgtgctaattgagcgttagtttgtcgatcttgagcgtaaaatttctggacggcggcagcaacatcggtaactttaagttgtgccaataggggagctgttagttgactagtttgaccgttatcagtctgggtcagaaccagtttaagtgcccgcttgctaatgtcgtaggcactgccttcgtcacctaaaacgtaaccccagccgccaacgcgcagaaatttcccggcttggcggccataaacgaccgaacccgtgccggcaatcactaaggcgccgtctgctcctgcaagaccgttcagtagggccagttttgcatcgcttatgacctgggtattagcgtggtaacgttgggtgatggttttttggacctgatcagcccggccagcagtttcaatgccagcaattccgattaaaatcaacccaatctgactagctggaattgcggcagtgagctggtctaagacagtggttaagttagtaacggcagcagagtagtctaggacaacgttaccagggccacccgtaacgctttggaccagatgctcgggggctgtcgtccaagtttgaccaacgatgtgcgtgccaccacagtcaacgccaattaaatatgtcattttagacctcctcattgcagtgcgagtgcgtcacgaacgacaccgtgtgcgcgctgtaaacgctgctcggcgtcgctgacagagacgccagccaagtccatgacaatcgctgtcttaacgttttgatgagctgcagcgaatagttcgctggcttcatcggcagaaacgccggtggccagttcgatcatgtgtttcgcgcgaatcacgagtttttcgttagttggtttaacgtccaccatcaagttatggtaaactttgccgatcttggccatcgaaattgtcgatagcatgttaagaaccatcttttctgccgtgccggctttcaaacgggttgaaccagcgagaacttcagggccgggggttacttcgatggcaacctgagcgtgttgactgattagtgcctgattattgcaggctagactgattgttgccgcaccgattttttgtgcgtagtccagtgcaccgataacgtaaggcgtgcgaccacttgctgccaggccgaccacggcatcattagcagttaaggccagatctttcaagtcttgtgcgcctaaattaggattatcctcagcaccttcaacggcgaccgtcatagcttgagctccgccagcaatgagtccttgaaccatctctggttcagtaccaaatgttgggacacattcagcagcgtctaaaactcctagacgaccgctagtaccagcgcccatgtaaattaagcggccgttagctttaaaggcagtgacgataagggcaatagcagcggcaatttgtggtagttcgggtgtgatgctttgactgactttagcgtcttcttgattcattaactgggcaattgccaggatcgacatttcgtctaagtcgttactggcaggattacgaccctcagtagtaagttggttaatatcagatttcaatcgttttccctcgtttcttaaaatatgtacaaagaggactgcagccaatgcagcagtcctcccagaatcataatcataatggctaattacggttggcgctaaagttagaccgattgtcagcaaataagcaatcatgttcattgaaagtagtcgttagtttaagcataccgtaatgacaaatccgtgtgattttggtgcaatctattattcggcaacggctgctggagctgctttttcagcatcggctttagcagcgtcttgttcagccttcaattggttacgatcccaaatcttgaagaatgggtaatagataaaggtggccacaataatattaataatacatagaacggctgctcgccagtcccaagcagtggtcatcaacgccccaattggtcctggtaatgtccatggaactaaagctaccgtccgactaacgaggtgtagaacagttgcagcccaagtgataatccccatggttaacggtgcgaggacgaatgggattgcaaagtatgggttcatgacaattggaacaccaaagataacgggttcgttgatgttgaagattcctgggataatggtaacccgtccaattgttttaccgtaagcggacttagagaaaaatgctaataagatacagagagacagtgttgccccagcaccaccaatgtagacgaaccattggaaaaattgttcagtcatgaagtgaggaaccgttgcagcagttgcacctttggaaatggcagctaagttatcgttcaggtttggataccataatggccagaagattggggtggctaaagcagcaccgtgaatcccgaatagccaaacaatatcagttaagaggattggtacgataactgaaagtaaattgtcacgaccaaagtaggctaatgggctgaagacccattgtaggaaagcattaacgtcaaagttcaaaccaacgtgaatgacccaagcaccaacgattaagaaagtcgcgggaatcaaagctgagaatgaagctgcaacagccggtgggactccatctggtaatgtaatgacgaggtgatggtcgcggcagatccgagtcacttcggccgttaaaatcccagcgagcattgctgtaaataaccccgcagccccgaagtgtgttagcggcaccacggtggcagcggcctttagtcctaacgctttgaaagctgctggagtggtcgtaattggtttaactgccaacaatagaaagaccatcactgagacgaccccggttgaaatatgatcgaagtgataatcttcagctaaccgacctgcaatggcaaacgcggcgtaaatagccataaaccccattgaaaaattaattggaattgctaaaccagcggcatagggtttaataaagtttgtccaagcagtaataggtagttgcgtgacgatcgtaaagaatgagccaacgatggtaactggaataatgacggccattccgtctcgaatagcacgtaaataacggttggctgcgatcttactcatgacatcaatcgtcttatctttccacgtacgtgaattatccataattcattcatctccttaacaaattagtaatgacaagttagtgttgaattaagtcctccctttttgatttgagttaacacattaacttgatttcatgagtgagtatagcataatataacagtatagttaacgctttcattgttgttagttaattgacatgggtaaattttgattaagtatagacatttaatgtattaagttaataataaggggggcagccatgagtcgtaaagaaccaatttatcaaaccattttaagcgccttgattctggaattgaacacgaaccattttcgaaagaatgatccgttttatagtgagagtgagctacggaagaagtatcaagtcagttccacgacagtcgtgcgggtactgaatatgttagccgatcagggttatatctatcgtattcagggtaagggcagctttgtttccaaatttaatcgggggactgcggtacgaattacggatacccatacatacgatgttgatgaggaacaggttgcaatcttagtggccaatcagacgacgccactaccaacacgggctaagtttacggctgaatcgacaacctggtatttagagcgattacgcgaaattagacacgcaccatttgaattttcgcagtcgtggtatttggcgacgctgattcctgccacagcaatgaagaagttacgggccgtacattcgatttatgcactaattaggaaacatgcgcagcttgatttatcacgccagccctttgagcaagaatatgcggcgacctgcgttcctaatcaacgaattgcggattatttgcacgtgagtctggatacgatggtgattaagatcgaacggtgggtatttcaaggggaagaaacgctggaatataccgttagttacatgttgcctaactattttgggctggcgctaactagtgattccaagtcggtagatcctaaccgaattcgatgatcgatgcataaagagaggagtggcacacaatgtcaattcatagcaataacttttattccaacgtgttacgacagtcagtgcaagtccaagttatcttgccggaaccagtgaacgcggtcggacaaattttaccagactacagtagtggtgaacagcaacttccaactgtgtggctgttgcatggcttaggtggggacgcaacgtcgtggttacggcgaacggaaatcgaactactggcaacgcaataccgagtagcggtcgtcatgccggaaacggggcggggattttatacgaatatggtccatggtccacgctattgggattacttgacccacgagttaccaacacgaatgcgttatatctttccgttgtcggcacgaccggaagacaattatttgttggggaactccatgggtggctatggggcattacgttatgcctttacctatccgcagcggtttgcggctgtcgcggcactatcaccggtgacggatctcaaaaggtttcacgtggaacaatcggcaattatgccagaccttgagctggctttctcaccagcacagatgcaagggacgccagcggacttgtcttacttggtacagcaaccgacaaactgggggacgttacgtgttctaatggcgacgggtgatcaagatatgttacggtcaatggatgaagccttcaagccagagttggcggctgtgtttaaagaccagtttgaatggcagttacaaccgggtcaccatgattggcggctctggaatcatcaattaccatttgcgatgcactggttaattaagggaggttggcgcaatgtttaatgttaaagatgagcacggccactataatttgtggcggcagacgggattagctttattaccgctattattggcaattatcgcatatccattgctacctaatcgtgtctacgtgccaaccgctgtcaccagtctgacgccgtggggaatcaagagcaatatcttcatttatcccgtcttttgcctgattctgtggttctttatctggctatttatcttcttcaaccggttatatgaaaaaaatttcaaggtaacccgccaaaaatatcggccaatggagaactactatgtgtggagcagctgggtgttggatattctggcgactttgatggtggtggttcagatcttggtgagtgttagtcggtgagtggtttgttaggtgtgaagttggcactatgagattaacgatattattgaatagtaaaatggctacagattgagcaatcaagttcctcaatctgtagccattttactaatttttatgctgttttacatagaaaacttgcgatttcgaatcatcaaaatgataacgattacaagactgagtagtgtcacgccagtatcgatttcgaaaacatgtagaacactgacagctgtgtcatcaatgatgaagctagagactaatggacctacaaagaatgtcagtgcagtagcaaaactatagtagccagtcaccttacctttctcagctggaaagtattggcttagtaaagttaatcctaattgccaaatacctccggctgcgaagaagccaattgcaatggcagttaaccgagcaccgtcagcactagggataaccaccatttggagtaatgctaggaacgaaatcagagtgtaagcaaagatcaacttgattggcttaatgcgagttactaatgaggaggtaataaaaacggatactagtgaggccattgcataccatgaaattagtgatttagagctgtttagccccaactttaagacgctactaccgaagtttggtgcgtattgagagaaaatgtaaaacgtaaatgaaagtgtaaaaccaacaattattagcaaactaccatcaattaacatagaaggctgattgccactaggattaatggttgttttaggctcgtcgctaattttagtgtgtttttgagttaatgtttgtggtgcgaagctggcaagtccaattaagatgatatctaaaaccatcacaactaccatgacgactagtgtgatttgagcgtttggctgagcagcaacaatgaacggcaggacgaattgtgcaagagacatggccgcttttactaacgaattcatgctagcagcttgctcttggaaagcatctgtcagtgctggataactagctgtatcaccaaaggaattggttgcgcccataaagagtgcagcgatgcaagcactgatgagattagtactaaagaacaggcccataagaaatagaatttgtgcaaccataccgattaacatagttcccttacgccccaagcgatcagaaagataacccgcaatgagaattgtcaataagcggccaattccaatcattgcaatgacagttgagagccctttaacatcagtgtgccatagtgcttggaattgagtcccgtattgagacacaataatagtagccattcctaaaatagcataatttaaataaattccggcagctaatggtaaatatgtcttatgtttcatggttatatcctgcttttctttaagttccatagtatcacccaccaattcttattttcacaaagtgtgcatttttaaacgttataagcaacaaaaatggcatttttaatatccaatataaatgttgaaaaatcaatcaagtaaacggtttataattattaatatttttaattgatactaaattcacaatcgttgattcacttcaaattttaacacggtctcgagaagtgtctaataacaaaatcgcattcaatcgatagctagaagctattaatcgaatgcgattttattggttcagagttaaatattgttaacagagagtgttttgctttgatcacgaacgaaggtgatgaactcttcaacagcgggttgaggtgtacggtgcttaagggtacccatgtacaaaattcgttgccatgttggaaatgacaatggaataatcttgactggcatggtttgaagaatagacatattaggtacaacggcaattccaaaaccgctggccactaaaccggcgatggcctgatcttcttctacggcatatgcactaatgggttgaccgccacagtcgttaaatagtttttgcataattggatgaagtccactgcgttgcgaaaaagtgatttggggataggctaatgtttctgccaaattgatactggagcggtttgccagtgggtgtgtagttggtgtgatgcaaaccatagtttgttcagcgacgggaaaaaactcgatatcgctaaagtgatccatctttgagcaaaaagcaacatcatatttgttgttacgtaaaccgttcagaatatctggggacaggccagtatcagtgttgaattgaaattggacagcggcatgggggcttagttgaagaaaacgctgggcaatatctggcaaccacttaatacttagtgttcggagtgcggcaatacgaatgggggctttttgttgatcaaaacgtttaatattagtcacacttttgtcgagtagtaggagtgcggattcgacatcactagcgaaaaccttaccagcaggagttaaagtaacactacgtccggctttttgaaagagatcaatgttcaattctgcttctaaggagtgtatggctttagttaaacttggttgtgtaatatgtaacagcttggcagtttgtgtatagttttcagttcttgataatgcgacgaagtatcgtaaatgatccaaattcatgatagaaataacctcccgaagttcattctgacgggtaacgattgatactcaaaagttaacaactacggttaatataacagaattaataacttttggctatggatagccccaactaaaagcaattggacgagtcgagtgatagcgattacatttaacttgtaaaataaattatgtgaatcacaaaacatgcatgtgtcgaatccactatttggaggaaattattatgacaaaatcacatccaattacaattagttcctggacacttggtgatcaatgtacatttgaagatcgttgcaaagcggctagtgctgctggttacgatggcattgggttacgcgctgaaacttacgtggatgccttgaacgaaggtttaacggacgatgatattctcgctattttggataagtataatattcgttgcaccgaagtcgaatatattgttcagtggtgtgaagcaacgcgcacatacgaacaaaaatataaggaacaggcttgcttccatatgtgtgaattatttggtgtaaagcatattaataccggattgatggaagattatgatattgactatacagcaaagaagttacaagaattagcagcccgggcgggtgatttaattattgcattggaaccaatgccttacagtggcttacctaacttggacaagacttggaagattatgcaaaaagccaactgtgacaatgtatatatgttactagatatgtggcattgggtacgagccaaccaaccatatgacttgttgaccgaggaacaagcaaagcgggttatttcaattcaaattgatgatgcatatactcggccatatgctgattctatcttacgggatgaatcaatgcatgatcggttggctccaggtgctggtgatttggataccgctgggtttgtcaagatgataaaagatgcaggtgttgatcctaaggtgattggtgtcgaagtaatctctgatcaatacatggctaagggtattgattacgttgcggattacacctataagcagactgtgtctgttttaaaggaagcgtggcctgaaattttaaaagacccagttcaagcttagatatttgattataaggagtgattattaatgaataataattggttaggattaacggataaagttgttgcaattacgggtgctgttggtggtatgggtaccaagttctgtgaagagtttgctaagcagggtgccaaaattgtcttgattgatatgattgcggataaaaccgaagcgtacgcaaagaaattgacagaaaagtatggcgttgaaacgttggccgttaagtgcaatacgactaacgaagaggaagttgatgctgctgttaaggccgtgactgataagtttggtgaagtcgatgtgctagttaatacggctgctattttacgcttctcaccacttgaagacttgcgtttggatgaatggcaagctgccttgaatgttaacttaacgggttacttcttaatgtcacaacggtttggtcgcgtcatgattcaacagaaacatggtgcgatggtacacatctcaaccgtagcgtcacgttatcctgaaacatatagtggggcctatagtacaactaaagcagcggttaatatgatgtctaagcaaatggctgctgaatggggacagtatggtgttcggagtaactgtgtcttaccttgtctggttaagacgccgttatctgagaacttttacagtgatcctaaagttgaagagggccgtgagcggttagtggctagtcgccgcattgggactttggatgatattgctaatacggtcttattcatggctagtgaccgttctgactacactaatggtggtgaagtgaccgttgatggtggtttgaatatgatgatttctgacatgattccaaagccaggtggtcgtcgtcaatacgcgattgatcatcatcaaccagcgaaaaaatagaaattaattcagttacatgaactcgtggatgagactgggacgactgtctcggtctctttctttattaattaagaggagataacaattatggaaaaacgaatttcaggtaccactggtttatttaccttactcggctctccagtaggtcattcaggttcaccggcaatgtataactttagctttcaagagcaaggattagactatgcatatttagcttttgatgttaaaaaagcacaaatgccagaagcgattgatgcattacgattatttaaggttcgcggtagcaacgtaacgatgccatgtaagggcgttgccgcaacacttgttgatgagttgtcaccggccgcaaagattgtgggggctattaatgtcattgttaacgataatggtaagttgacaggtcatattacggatggcattggttttgtacgcaatctgaaagagaacggtgtagatattgctggtaaaaagctagtcgtgattggtgctggtggtgctgctacggcgctacaagttcaatgtgcattagatggtgctaaatcattggctatttttaaccgtgaggacgacttttatgcgaatgccgaaaacactcaaaagaagattaaggaagcaaagccagaagtcgacgttaacgtctatcatctagaagaccaagacaagttaaaagctgagattgagaaggctgatattctggttaacgctactattgttggtatgaagccgctggacggtcaatcattagtcgatccaagctatttacgttcagacttggttgttgcggatactgtttacaaccccctaaagaccaagttaattgaagacgccgaggcattaggatgcacggtagcgccggggaaaggcatgttattgtggcaaggtgatgcagcatacacactctttacaggtaaggctatgccaacggccgaatatcaagcctacgaggcacgtcaagcagctaagcagcattagaaaggggcaataaaaagatggaagcacgaattgatggacacacaactatgctaggccttttcggctcgccggttggccattcaggcccaccagcaatgtataactacagttttgaaaaggcaggtattaatgatgcatacctggcttttgacattcaggctgatgaaatggccagtgcgttaactaaaatgcgcgttttaaatatgcgtggtgctaacgtaacgatgccttgtaaaaaggttgctgcagaattagttgatgaattgtcaccagctgcagaattaatcggtgctgtgaatacgattgtcaataatgatggcgtgttagttggtcataatacggacggtgcgggctatgttgaaaatctacgccagcatggtgttgacccacagggaaagcgccttacggtgttaggtgctggtggtgctgctacagcaattgccgttcaaatggcactagatggcgctcaggcgattcatatctttaatcctaaggactcgttttatcaaaatgctgagttaacggctcaaaagatcatggataaagttcccgcatgccaagttactgtaggcgatattaatgaccaggaagtcttgacacaagcaattgcacaaagtgatattttggctaacgcaaccaaggccggtatggcaccgaatgttgaacaaactaatattaaggatatgaccgtttttcgttctgatttagttgtgacagatactgtttataatcctgttaccacaaaaatgttagcagatgcagctgaacatggaagcaaaacaattggcggtaaggggatgctggtttggcaaggtgccgcagcgttcaaattgtacacaggccaagaaatgcccgttgaagaagtaacgcaacggttcttctcagatgatgggggacgttaagatgacaagtaacacaaattcaaaccgtaaatattatgtaacagcattggcattgtactttgcttactttattttaggaattgcctcttcaataatgggacagtataaaactgagtttgcaaaggcgtggggcgcatccacgctggctaacggaaccattgatgttagtatggtagtttctgtcattgctgcctatggtctgggacggctgattgcttacccatttgctggtccagtctctgataggattgggcgtcgtatcagtggtttcattggaattgcgttgtacgccgtattcttttttgggatgatcacagttcacagcatgtggtgggcgtatgctattggtattattaacgggattgctaattcgttcttggatacctgtgtgtcaccaagtgtgatggaaatctttcctaaatcggcctcaattgcaaatctatttacaaagtttgccataacggttgctcagtttgtattgccgttcgttattggtttggttgctagtgctcaaatgtcatatcgagtcatttttatcgggtgtggaattttaatgattgctgatgcaatcttagttctggttttaccatttcctaagcaagataaagcaactgctgaggctaaaacgactactgacaaaccgaagcatcgtttcacaccagctgcgattgcatcaattttaattggttttactagttcagcgacgtttatgatttggttgaattgcaatcaagagctaggagctagttacggaatcaaagaccccagtatcctgcaatcattttatgcggttggtgcaacggtagcggtcttattaactgctcagtttatccatatggggctgaaagagacgaccgtattagtactatatccaagtatttcaatcgtcatgttaatgttatgttatttcattaataatccagtcattctctatattggtagttttgttattggttacgctgctgctggtggggtactacaattggcgacctctacgaccattggtttctttccagatagtaaaggtctagcgacatcccttgtaatgattgcctcaagcgtggctaattatgctgtattatcagctgcggcatacttgacaaaagttaccggtgctgatgcgccacggatgataattctaatgaacattgtgattacgttaattggggttggtttagcattgattgtgaaacatggtggtcggtcaacacgtacgtcggctgcttccggtgttgaaagttaattaaaaattgcgccttcaataaaggcgcaatttttagattgatcgttcttgattagtgtaatgttgccaacaataactgcgaataaactcttggaaacggtggacggcaggtgtaataaaaccactgcgacgaacgactaagtaaatttgatgttgtaatggctgatcagctaagtgtttgatttgaacacgctcgggatttaaaagtggtaagtagggcattaacgcaacacccatattgtaacgaacaaacccagccatagtatgatcttcttctacttcataagctaccttgggctgaacgtgggctgctgataggatttggtcgattaatggtcgcaagccgctattctgtgaaaataagatcattggataaggtgctaggtcttcaacgtgtagcggatttttttgtaccgcgggatgatcatttggaacaactgcaacaatttcttgttgaactagtgggataaagtcaaagagatgggcagttagctgctcacccagtctatcgacgttagaggctagaacgatgtcgtatttttcatcggctagtgcttgcaggagcacaccggagtttccttgaccaagctcaaaagtaattgcttgattttcgctttgatttttgaaatgggacagtaactcaggaactagttgttgtccaagggtgtaggtaaatcctaatttaacatgaccggtatctggatccataagttgtttgacgagttcgttgccttgtgataaatcatttaaagtagcagtgacgtatttcaaataaacaccgccaattgatgttaacttgatattacggccatctgcttcaaaaagtggaacacccaattcgtgttcgagttttttgatggcataactcaacgaaggctgtgagatacctaagttttcggcagcctttgccatatgttgtgttcgagctagctctttgaaaaaaactaaatgtcttaaattcatgaggaatgctcctttactcatagataactttgatgatttaaacaactcatccatatttattatattaaactaatttgctaacataacaagtgaattgagtaacaaacagataaaaataatatttaggagtggtttttcatggcagaacgaattgatgggcatactttactgattggtttaatggcgtatccaattcgtcattcaatgtccccaactatgcataacaatgcttttgctaaattaggactaaattacgcttacttagcatttgaagtgacgaatgaaacgctgccaagtgcaattgagtcaatcagaacacttgatatgcgtggctccaatatttcaatgccaaacaagcaaaaagtgattccattgcttgataagcttgatccagcagctaaaatgatgggtgcggttaatacaattgttaatgatgatggtgttttaacaggttatacgactgatggcatcggatttatgaaagcgctcgtggatgaaggcttggatattcgcgaacataaaatgacgctagctggtgctggtggtgccgggactgcgatcgcagtgcaggctgcattggatggtgtcaaagaaatatctatttttaatatgcacgatgcaacatgggcaaatgccgaacggaacgttaaactaattaatgagcagaccgactgtcacgccactttacactcattagaagatcgtgatgatttcaaacgggaaatccaaagctcttatatctatactgattcgacaggtgttggaatgaaaccacttgaagataagacgcttgtggacgatcctagttggttcagctcagaccaaattgtgtttgatacagtatatgcaccacgaacgactaaattaatgaaggtagctcgtcaagcaggattgaagcatgtttacaatggtttaggtatgatgcttgaacaaggtgcagcagcctttaagctgtggactggcgaagacatgccagttgattacattcatcagattctgtttagtgatgatcaggataaataattgatgacaggaggcaagttaagatgcaaccagcgataaagctacgaaatattgaacttggtagtggtcgacctaagttggcagtgcctatcacaggaacgacgattaatgatattttagcagcgacgacaccgattttagctgcacagccagatgtcgttgaatggcgaattgattttttcaaggatgtaattaatccagaaaagttgaaatcggccggtcagcaacttcgtcaggctttaggtgatattgccttattaactactttccgaactaaaggtgaaggcggcgaattagcactatcagatactgagtattttaaactgtgtgagacggtcttagatggtgggttcacggatgccttagatgttgagcgttaccatgacgaacaagctgttaaacaaattgttgcagcagctcatgagcatcaagtagttgtgatcatgagtaatcatgattttgataaaacgccggcggttgctgagatcgttaagcgccttactagtatggtcgattatggtgctgacgttgctaagatggctgtgatgccacaatcggtggaggatgtcttaacattactgacagcgactaatattgcacgccaaacactaccacagccagtaatcacaatgtcgatgggtgacttaggaaaagtgtcacggcttgctggtgaagtgttcggctcttgtttatcatttgcaacggtcggggcggcttcggcacctgggcaaattgcacttgaaaatttacggccggaattggaagatctgaagttaaattaaagcataactgaaagaaatcgtgaggtcagagtgatgattgggacacaaaaaaagtatgtttcacaatttacgatgatgggaaccgtcatctcgctgacattatttgagccgaatcagttagcggtcgaagcggtctatgattacttgcagcggatggatggtgtcttttctgtcaatcgtgccgattcagaattagctgcgatcaatcaatatgccggtattcatccagttttggttagcactgaatgctttcaactagtgtcggatgctattaagtacacaaagcaatatgcggatagttttaatgtgctaattggaccgttggttaaactttggaagattggttttggtgggcatcaagtaccagcggccaagggaattagccaacgattagccttattagatacgcacgaagttatcctagatgaagcccaatcgagtatctacttgcgtcaatctggcatgcaattagatcttggtgcgattgccaaggggtattttgccgatcaggtcgttaagcagttacagcaggctggcattaccagcgctattgttaatcttggtggtaacgttaagctattaggggccaatccgctaaccgataatcggcgttggcaagttggaattcaagcacccgaagcgccacgtggctatccagcgctacaggttgaaacgcctgctagaacggtagtgacgtcaggtatcttcgaacgatattttaaaattggcaatcaccgctaccaccatatccttgatccgcgaactggttatccggttgaaaatcaagttgatcaggtgtcgattataactgaacggtcagaattagctgaagtgttatcaacggtggcctactttgaagggccaaaccgtggttgtcaactaatcgaacagttgccacatacggaagcaatttttattgatcatgaacaacaggtaacagttaccagtggcttaacgccgcgacgcaaaggagtgtttactattgagtaaaaaacaaattaccggccaagcaatgggccacaacggtattatcaattatgaagttgacgtgcaagataataagattgaggatttgaaaatattaaagcattccgaaacgtcggggatctttaaccaagtcattgataaattgaaacaaaatatcattacggaacaatcattcaatgttgacacaattagtggtgcaacggtgatgacccaagcgttacttaagtcggcagataaggctgtaaccgatgctggtgttgatgtgcagccagttcctaagaaaaaagcccccaagacgcaaaacttgcggaccgacgtgctcattattggtggcggagaagcgggcttagtcgctggctgtcgagcgttgacaatgggtcagaaggttatcttagttgaaaagaacggctatcttggtggtgcgacgattctgaatggttctaacgttgttggtaccgggtctgatgttgctgcgcaaatttttgataataatcatgatacgccagaaatgttggcacaagatgttgctcgtgaaagcttggagacgaactatccagctttgaccgacctaatggtgcataacattggtccagccattgattttattagtaagtttgcagatttacattatcaaaaagcacagacgcaaacgccagaacattcgattaaccgtcagattgaactaccttcagcaagtagctatgaattcattcaaaaagtttcgaaggcgtttgctgctgcgggtggtcaaattatgttggatactcgagtcgagaagcttatgttggacaacgataaaaagttacgcggtgtgattgctgctcaaaaggaccaaacagtcaacatcaaggcacgttcagttgtgcttgctgcaggtggtcatggcgctaaccaaaagatgcgtggtactgaaagcgaaggcattgattattatggcccaatgacttccactggggatgcctatcaatttaatggtgatttggatttgcaaacgcacgatttaggttggtacaagctgtatccacatggtgttgaagtggaaccaggcgttgctaaattgaccacgtacgcgtcgaaacaagcaactgatatgggtgcaatttacgttaactctaagggtgatcgaatcgttaacgaatcaaatgtttatacgacttttcggaatgccatccttaaacaagcggataaagttgcttacctagtaatggatgaacggacttggaagaaagtttacgacctactgatcctgcatgatttcacaccagaagaaattaagagcttctttgagaataagggtaaacggccagtatttgttaagggttctttggaaagtgctgctgagcaggccggaattgtggttgatgaattagtccaaacggtcaaaaattatcaaggctatgttcaagatggtcacgatcatgatttcggtcgtgatccgaagtacttgcaccaatttgaaggtgaaacattctacatcattgaacaacgtgatcgctttgcgacgactttaggtggctatagtgttgatgctgataacttgcaattggtaacgactaaaaatgcaccggtagctaattactttggtgcgggggaaatcatcggcggcgctaacggacatgattcaatgccaagtatgatgaatacttgggggatttcgtcgggttacgttgccggcgccgcggctagcgaaaacgctcagcggcaggcaaccgcgggcgatgacgaagccaatattgtggctattgtggggactaacgcttcaaaatcatataaccgtaagttgttgtatgccatgaaagaattatttgaaacgcaagttaattttgaaatttgtgaaattaaagatttaccgctattcaatgaagatgatatggattgggaaccggcaagtgtaaaagcgttagccgctaagattgaagccgctgatggtgtcgtctttggcgtgccagaatacgatcattcgattccagctgccttgaagagtgccattgaatggctgtcctgtgcagaacatccattcaaagacaaaccagtgatgattgttgggacttcgttaggtattcaaggtacggtacgtgctcagatgaacttacgacagattttggactcacccggtgtggatgccaaagttatgcctggtaacgagttcatgttacctcaagccggcaataagtttgatgagaacgatcatctgaatgatgacggtagtgaacacttcttgaagcagtgctttgggcactttttagaggggcttgaattagcatctaagaagacagtgacgaattaactactatctagactaaaagaacgtacacaactcgtgtacgttcttttagtctagattttagttgttaaatcttttgttccacatcgtcgattgtgacaaccagggtcgcgcgaatccaatcaaacttagtatgcatttgatcgaaataagcgccactagtttcaaacttgccggtaccatgaatgtggaaaccacagccagtaccagttgtgccgggaaccttgtaactaccgacagcaattgtaatgtggttgtcggtagcaaaatcggcctcaattgagtgcatgccagccgatgggatcaatagggtatgatcatcgataagttgcatataatgactccaggtgttgacgacgtgtgctggtgcggcgttgaccgtaacgatggttgcgggggtcgtgtctttgataacttcaataaatttagggtccataataagtactcctttacgtttatattctcataatatattgtaattgatatatataaattatcaagcgagagtgttcgatgtctcaataatcttagcggaggtagcatggtaaaaccaggcgttgctttttactaatgaaagcggtaactttaactaggaacgaataacgagagggtgtttaatatgtatcaagcaagccagaagcgctatgaccatatgatttataatcgagtaggcaatagtggtttgaagctgtcagcaatcgggctaggtctttggaataattttggaagcgttgatccgatcgctaatcaaaaggcaatcattcatcaagcttttgatttgggaattacctactacgacttagccaataactatggcccggagcccggcagtgcagaaactaattttggtcgtattatggctaccgatatgcggccataccgtgacgaaatggtcattgctagtaaagcgggctatgtgatgtggccgggaccatacggcaattgggggtcacgaaaaagtattattgccagtgctgatcagagtctgcagcgaactggtttagactactttgatattttttatagtcaccgtcctgatcctgaaacaccaatggaggagacggccactgcgcttgatcagctagtacggcagggtaagacattgtatgtaggcatttcaaattataatggcaagcagacggctgctatgaccaagatatttgaatcattaggaaccccatacattattcaccaaccacgctataatatgtttaatcgacaggtggaacaggacttgttccccgttctacaagcaactcataaggcggcggttggctttagctcactatcacaggggttattgacggacaagtatctgcacggaatcacgacagattcacgggccaataagcaaacaattccatttttgagtccagtccaggtagaacagacactagctacggtaaagcgcttaaatgaagtcgcgcaacaacgggagcaaagcttagctcaaatggctttggcttggaacctacgtcagccagccttagcaagtgtcttgattggtgctagccggccagagcaggtggttaataacgttgctgcattggaaaagttgaaatttagtgaatcagaattagcaacgattgaacagattcttaccgaacaaccggcaattgattggaatgctggtcgatcatagcgtttgcacaattcgctatagtcaatgttatagagccgcaaaagaaagggccatatccgaggatatggccctttctgtacctaatagttaagttaataataacataattttgcagatttgcacgcacaggggggcctttactaaataaattagtgtttaaattcgccaattttcacaattaatgataaagttttacatgatagttatcacgattatgcgttgaagttcggcgcaatacttgaaaattaaaataatttgcaaataaatcatgcgatagcgactttagatggtagtaagaattagtttgaatttaagggggccaattcatggcggcgacgctaaaagatattgcaaataaagttggcgtatcattggcaactgtatcgcgcgtgttaaacaaagatcagtcattgtctgttagtgatacaacgcgccaacgaattctagatgcagcagaagcattacagtattcaaaaaataaacggcatactgtcacgacggcgcgtaagcgacttgctattgttcaatggtattcggaatctaaggaacaagatgatttgtattatatgtcagtccggatggggattgaacgtcgtggacaagataatcagtttgaagtgactcggatcttccaaaataatttacaagaattgggaccagacgtagatgcagtgattgcagttggaaagttcagcgagccacaagtcaaggacttggcatcagtaactgacaacttagtattcgtagatgatgatcagtttgatgctggttttgatagtgtcattactgattttcggttggccacagaaaaagttgtcgattatttttggcaacgcaactttcatcatattggctttattcacggtcaagaaatgacaaccgaccatcagttagcggtagttgatcgacgcatgctaggttttcgggccgcgatggaacgacggcatgcgtttgatcctaagttcgtttttaagggcgattatactagtgaatctgggtttaaaatgatgcaaaaagccattcgtaagttgggagatcaactaccaggagccttttttgtggcaaatgatccgatggcggcaggtgcgcttaaagcgttgcaagctagtggcatccaggtgccagaacgagtgaagctatttagctttaacaatacttcgctggcgacattcgtttatcccgaattaagcgcagttaacgtagatactgagttaatgggggcgaccgcagttaatttggtcatcagtcgactagcagggcgaacaacgacacaacgggttgagctgggtactaatctggttgagcgagcaagttccaagtagtgaagggcgatctgggatagaaaccagatcgttcttttagtattttaactaaaagttttactcaacttcaagaaattctggtatacttctaaatgaaagcggtttaaataacacggaggtgcatgattttggaaactaaaaaaacggtgtttgaccaactagatggtcaagatgtaatgcgttatacgctggtcaatgaccatcaaactcgtatctcggtccttagttatggtgggacgtggcaagaattcgtcgtcaatgaagacggcgttgaacatcccttgatttggggccttgataacatgactgactatcaacgagtgggatactgcctatgtcaatcaattggtcgggttgctggccggattggcggcgctaagttcaaaatcgatgatcaatcctatcaagttgatatgaacgaacaaacccattcgctacacggcgggaatcatggttttaacacgctgaactttgaaggtgcttttagccaaaccaatgatagtgtcagtgtgactttgaagaagcatatcaacgccagtgatgataattacccgggaaatatggatgtcgctatcaagtttacattagataatcaggatcaagtatccattgcatttaccggtgatactgatgcagcaaccctctttaatccaactaatcacgtttattggaacacaactgatgatcggaccagtttggcccaacaaaaattacagattacgagtgcagctcacttggaatttgatgatgaaaaagtcccaactggtaagaaattagcagttaaaggcacagcgtatgactttaaccaggcacaaccagttgaaaaggcattagaccagctgaagactgagaatggtggcattgaatttgacgatgcgtatgaagttgccccaagtgcggcagaaccaattgctatcgttggggatactgatgataagcgccaagtaaaaatttattcagatcgcaatagtcttattatcttcacggctaatccgtttgatgctgataaggaagacgcgcatcaatataatgcgttagcgacggaagcccagacacttcctgatgcaatcaatcatccagattttggtgatattgtgttacgtccaggagcaccagtgacgcatacgattcggtaccaatatgaacggttaaattaatactagttgaggtgtcaggcgagttctgcctggcgccttttttgtaaacgtatgagtaaacaatgtttaatttagttaacaaagtcccgagcatctgattaataccgtgattagtaaaacgatgatcattggtaagataatgagtactatactgcttaagcccttggaaagcgggcaatcagtgtcgataggcgcattagcaggtcctaatcaaaagcggtatagataaaacttttgaacaaattttactaaaaatcattgacattacttctgaaaacgattacatttaaacttgtaaattattcaaggaagatgtgaggcgagattatggatgcagagacaaagcagagtaaaggtcgtaaaataacatcgcgacttgcttattcgtttggggcgtttgggcacgatgccttctatgccactttatcaacttattttattatgtttgtgacctcccacttgttcgataagagtagtggggctcaaggaacacaaatgattgcttggatcaccatgattattgcaggtttgcggttcgtggaactagcaattgatcctttgatcgggaatgccattgataatactaattctcggtggggccactttaaaccatggattgtcattggtgggattataggttccgtcgttttagcacttttattcacgagtttaggcggattaaatacctcaaaccccattctatatttaattatttttgcaattttatacattacaatggatattttctattcgtttaaagatgttggtttttggtcaatgattccagcaatctcatttgactcagcagaacgtgaaaagacggcgacatacgcccgggttggctctaacattggtgccaacatcgttggggttatcgttatgccaatcgtcttaatgttttctgttaagtctaacagtggtcaaggtgacaaccgtggttggatggcatttgggatcattattgccgcaatcgctttgatttctgccttagttgttgcacttggaaccaaagaaaatgattctgaattgcgtaagaacactgaaaagactagcttcaaggaagtcttcaaagtgttagcccgtaacgatcaattgatgtggttatcattgatgtatgggatctacacggcagggattgccattacgaactcactagaactttactacttcacctatattttgggtgacgcctcgaagtttacactattaggttcgctaaatgcgattattgggatttttgccgtattggccttcccaccattagcaaagaagtttagtcgtcgtaaagtgttcttcttagcagttgttattatgatgatttcactgatcatgtttgcctttgctggtcagtcattaccaatgatcttaacagcggccgtattattctacattccacaaccattaattttcttagttgttttgatggttttgagtgattctgttgaatatgggcagttgaagtttggtcatcgtgacgaatctttaaccttatccgttcggcctttacttgataaattaggcggtgcgatttctaacggtgtcgttggtttaactgctgtttgggctgggatgacagctggtgccactgctggtgatgtgactagccatggcgctgccatcttcaagttaatgatgttcggtgtacctgctgctatgattttgattgggacattcatcttcttcaagaaggttaagttggatgaaaagatgcatgcacaaatcgttgatgaacttgaaaaaacatggtcaactcacttggaaaccgatgaaactcctgctgaagttgaagcagaagccgatgccaagacgacggtttatcaagatcctgttgccggggaactgatcagtttgaaagatgttgctgacgaatccttcgcaaacggtagtatgggtaaaggtttcgccattaaaccaacggatggtcgcgttgtcgcaccatttgatggtgaagttgttgcaaccttcccgactcgccatgcaatcggattacgttctgataccggtattttaacgctaattcatattgggattggtaccgttaagatgcgtgggactggatttgttcagtacgttgagaagggcgaccatgtcacacaagggcaagaattaattgaattctggcaaccagcaattgaaaaggctggcttggatgataccgttatggtcgttattacaaactataaagatatgcccgaatttacgtatcttaaagattcaggaaccaccgtacaagatgatgaagatgtcttacaattatcgaatgtcggcttaccggatcaagcatagtttctttacgaggagagctattaatgacgcgagccattaatagctctttttgtgaactgaaatagaaaaagctaatagcgaagggaagattttactatggcagtaacgttgcagcaaactttaattgacattgatgaagaacaacttgtctttcacctgcataacgatcaaatctcgtatattctaggtgtggagacaggcaacgtgttggcccacttgtactttggcccacgggttcggggttatcatggcgagcgtcagtatccccggattgatcgggggttctcaggaaatttaccgaatacgactgatcgaagctattccaaggatgatttgccacaggaatacggtggcaataataccggtgattatcggcaacccgccgcgattattcgcgcggccaatggtgctcgaacagttgattttcgttatcaagactgccggatggaagccggtaagccggaacttaagggcttgccacaaacttatgtcgaagatgaggatgaagcccaaactttgattgtgacgttgcgagatgccacattaggcgtgacactcgaattagcctacacgatttatcgggatcggccagttatcacgcgtagcgcccggttgattaatcacagtgagcaagctgtcgacttagaaaaagtggcttcgatgcagatggacctgccaacccaaccattagatgccatttcgttacctggaagctatgcgcgtgagcgccagcttagtcgtgaacggctccatcgaggtgtaactcagtttgaaagtcgccggggtgctagttctcatcatatgaatccttttgtggcgctagctgatccgaatactaatgaatttcaaggcaatgtccttggtgcattgctaatttattcaggtaaccaccagattagtttagaacgggacccaattggtcagacacgcttgactatgggaatcaatgaatataacttcgactggcgattggcggccggtgatagtttccaaacgcccgaggttgcaatggtatactcgacgacggggcttaatggtatgtcgcaaacctaccatgatttattgcgtgatcgcgtggcgcgcagtcgttacaagcacgatctccggccgatcttgatcaacaattgggaagccacttactttgactttgatgcggacaagattcaatcaatcttggatgctgcagcaccactgggtatcgaaatgtttgtgctggatgacggttggttcggtcatcgaaatgatgataatagttcgctaggtgactggtttgttaatcggaacaagttaccaggaggcttagcggatattagcaaacggacccatgataaagggatgcggttcggactttggttcgagccagaaaatatttcagccgattccgatctttatcgggcccatcctgattgggtgttaggcgtaccagatcgtggccgaacgttatcgcggaacgaatacgtgcttgatttcagccagccggatgttgtcgacaatatttttgaacaaatgaccgcagttcttgataaggtgcccattgattatatcaagtgggatatgaaccgcaatttaacggaagtctattcgccacatagcgattcaactcatgaaggtgagactagccaccgctttatcttaggtgtatatgacttgatggagcgtttaacaaaacgctatccacagatcttatttgaaggctgctctggcggtggtggccgcttcgatgctggtttaatgtattatatgccacagagttggccatcagataataatgacccgattgaacggctcaaaattcaatatgggacttcactcgtttatccaatttctgcaattaccgcccatgttgggacgagcccggatgaattgttaggacggtcgacgtcgatgaagatgcgtggtgctgtggcaatgagtggtaccttgggctatgaactggacgcggcccaactaagtgatgcggacaagcaggccgttaaaagacaggttgccttctataagcagcaccgtgagttagttcaatacgggaccttttatcgattagagagcccgtttgaatctaatacggtggcgtggatgtttgttagtccggatcagaaagaagccttgctgttcaccttcgttattttaggtgcagttcaaccagaaccgcatattacgaagttagcgggattagaccctcagcagacctacgttgagaccgacacaaacaaaatgtacggtggcgatgaattgatgcaactaggactctacacgactcccgttcaaactagtgactttacggcgcaggtacattacttcaaggctaaggactaagctcagccattaaacatattaaaacttaatcatcgttaatctaaaagaacgctctggcaaataactcgccggagcgttcttttgaaatcaaaataacttttagaaatgaatattaaagctgaagtcaatgtcttgatcagcggggatatgatatggggattctacgtctgttccccaactatcaatgccaccgaccccacgaacggcaccgtagattgataagaccgttcgccgtgctaatggtaattcttccatgtgcgttgcgttttctagttcagcggcggtatagggaaggcagctgaaggcgaatggtgcatcggcttggctaaatgtcaaactgaacggtgtgttgtcgtggtcagcgttattttgtgttgttgatcgcgttactgtcacttgttcagtttgcatgtgcatgccgcattcttgtgggaccaagtatggtgtgactggcagactgtcaacgtggaatcgcccgtgcgttgcgccggccagccggtcaggataagtctcaccggacaaaccggtatagtcgaagccggtcgcggtagttggtatgataaaccgcagaccaaatgagggtagctctggcaaatcagactgaccgctataatgggtggcgatattgatctgaccgtctgctgtcaccgtataagtcactgtgacgatggtactaggaacggtcgtggtaacgaagtggtaagccagtgagactttcgtggcgatttcgtgatccgtgtatttgttattgagtggcgcgattggtaacggtgtgactggttggtcgtcaaccgtcaattcgatatcttgacaagttgagaacttatcggccgcgtaccactgtgcggatttgactgaaaagccgctaccgtgatcattatcggttgtcgcccgccaaaagatgggcgtgggtgtacgatagagccattctttatcgttgacgacgagtgattcaagtccgccacgttcgtagctaaagaggtagtggaaattagccccctgtagtcctaaactcccgtcgccgtaaataacgtgtagttgattatttgtgtaagccataataatatttcacctcttgcattgctggttttggcgtccggtcagcaaacattaagccgtcaccggagaattcataatcggagtggcgttcgtcgaaatcaccgccataccggagcacatcttggtcggtaattgggtcatgaacgaagagggcttgatcaataaagtcccaaataaagccaccttgatacatcggatacttgtcgatcaaatcattatatgattgcataccgcccagagaattccccatgtcatgcatatattcacaatctaggaaaggtttggttgggttatcttccaagtaagctacaatattttggggtttttcgtacatccgactttcaacatcagaaatgcgatcttttaattctggtgtgtggacaacaccttcgtagtggacgagtcgtgaatcatcgtgttctttataaaaagcctgcatcgccgcgatatcttcgccagcatacgattcattgccaagtgaccaaaaaatgatcgatgggtggtttttaaaccattcgtagtttgaacgggcccggtcgatcaccgctgctaaccagtgtggattatcgccaggaacattgtaagaaggctcgatagcccctatcttttgccatgacccgtgcgattcgaggttgttttcggccattaggtagataccggcctcgtcacataattgataccaaggtaattgatcaggataatggcaggtccgatcggcattgatattgttagctaacatggtttggatatcagcgcgcatatcagccatactgataacgcgaccggtgtgggcgttccattcgtgccggttaaccccgttgatcaccaaccgtttattgttgacgtaaatgactttgtcatcgcgcagctcgaccgtccggaacccaaactgatatgggacgacttccaagagttggtgatcagcatcgtaaacttcaattgtcaattgatagagatacggcgtttgtggtgaccacaagtgcagttggtcgaataacatggtatcaaaggttacactgccactaccggtttgcgtttgactcgtcagtactcgcccgtcatggtctttaacggtcagcgctaaagtggctggttcgccggttactttagtagtgatgttgagctcaccacttttgagattggcatttggaactggtcggatgtccaaatcagtaatatggctagcaggctccgccagtatattgacgtcacggaaaataccagagaaacggaacatatcttggtcttcaataaaggcagcagtactgcgtttgtagacccgaaccgctaaaacgttaccttggtcctgaatatacggcgtcaaatcaaattcagaaggggtgaaactatcttcagcgtagccaataaaatggccatttaaccagacgtacagggcttcttctaccccttggaactgaatgataatacgttgccctttaaaagcatcgtcgagatcgaaggttttgaggtacgagccgacggtgttgtccgcagcgtcactgaataggcctggtgttaattgatcttgattgagggtatacggtgggcgacggtaaattttaccttcccatgggtatagcgtgttaatgtattgaatttgaccatagccggctagttcaatatgaccgggaacctgaatcgtatcaaagtcggttgcatcgaaatcgggttgataaaaatcaactgggcgttcagccggtgtcttggcgaagttaaaacgccaagcgccattgagactcttgatgaagcgactacccgttttgaattctgctgtgtcgtgataataatggtgatcactatgtgcaggtaattggttgacccggaagacttctgggtcatctaaccattgaagattagcttgcatgaggaagctcctttcaaagttacataaataaaacgcttacaattatcataaaacaaaatattaaatttgtatatgtcgttttagttaaattttaactaaatgacaacaactactgacaacgacaacgggcgataagaagaatttgaatcgataacgtgataaatttgtaaagcgttaccaaatcttgttctaaaggtcttatggggtgttgacaacaatcaaaaaaagcattatagtcaaactaataaaattttagtaaaactatttacggagggatttttcatgaatactagcgacttaaaacaggagtttaccgaagcctttgataccaagccagaacgggtctttttctcacctggtcgaatcaacttgatcggtgaacatactgattataacgggggccatgttttcccatgtgcgattacaatcgggacatatggtgtttatgcaccccggacagatacgacagtgcggatgtactcagctaatattccagatgctgggatcgtcacgtttgatgtcaacgacctttcatatgacaaagccgctggttggacaaattatcctaagggaatgatggacgaaatcgcgaagaccggcgttaaattcgatcatggttttgatttctacgtccatggcaacatgcctgatggtgctggattatcatcatctgcgtcaattgagttattaactggaatcatgttaaacactggttttaatctcggtattagccaattagatcttgttaagattggtcaaaagtgcgaaaacaactatgttggtgttaactccgggatcatggatcaatttgctgttggaatgggtaaaaaggaccaagcaattttacttgataccaacaccatggactattcttatgcacccgtaaagttaggcaacaacgtaatcgttatcatgaatacgaacaaacggcgcgaattggcggattcaaaatataatgaacgccgctccgaatgtgaagaagcattacgccgattacaaactaagttagacatcaaatcacttggcgatttaactaacgaccagtttgacgaagcggcctacttaatcaatgatgaaaccttaatcaaacgtgcccggcatgccgttttcgaaaatcaacgggccattcgcgcaactaaggccttggctgacgatgatttaacgacctttggcgaattagtgacggcttcccacgtttcactacactttgactatgaagtgactgggaaagaattggatacgttggccgaaacagcttggaaacaaccaggcgtgcttggtgcgcggatgactggtgctggctttggtggctgtggtattgccatcgttgataaggaccaagtcgatgtctttaaggaaaacgtcggtaaagtttatcgcgacacgattggttacgacgctgatttctacattgctgaaatcgcagacggccctaaggaactttaataaaagaattgatttaaaatacaaattagcagtaagcattgagaaatattgaggaggaattagaatggcagttttagttttaggtggtgccggctacatcggttcacacgcagttgatcggttggttgcaaaggggtatgacgtggcggttgttgataacttggtcacggggcaccgggcagcggtcaatgaacacgcgcgtttttatgaaggtgatgtccgggatacggcgttcatgaataccgtgtttgaccaagaaaacgttgaaggtgtcattcattttgcagctttctcagttgttcctgaatcgatgaaggatccgctcaagtactttgataacaacacggcagggatggttaagttgctcgaagtgatggctaagcacgatgtgaagaaaatcgtcttctcatcgaccgcagcaacttatggtgaacctaagcaggtgccaatcaaggaatcggacccacaagtgccaactaacccatacggtgaaagtaaattagcgatggaaaagatcatgcactggtcagatgtggcttacgggattaaattcgtggccttacgttactttaacgtggcgggggctaagcctgacggcagcatcggcgaagatcacgcaccagaaacgcatctcgtcccaattattttacaagtagctgctggtgaacgggatcaattacaaatcttcggtgacgactatcccactccagacgggaccaatgttcgggactatgttcacgttgtcgatttagctgatgcacatatcttagccttggaatacctaaagcaggggcacgatagtgatgcgtttaacttgggttcttcaacgggcttctccaacaaacaaatgttggacgctgctcgtgaagtcactggtaagccaattccagcaatcatggcaccacgccgcgctggtgatccaagcacattggttgcagctagcgacaaggcacgtactgttttaggttggacacctcagtatgatgatgtgaaagaaattatcaagacggcttggacttggaaagaaagtcatccggccggctatgatgatcggggaggccaagcataatgacgagtttggatcaatttgtcacggcggtgatcgcgtcgccttcgcaatatactgaattagatcggatctatgtgcataaccgggttcttggtttggtcggcgagggtgatccgattgcggcaagcgatgaccaattaacaagtttaaccgatgccttggttaaaacggcgattcaaaatggcaagatcgaagcgacccaatcggatgaagatatcttagcggatcaattgatggatcttgtgaccccgttaccatccgtattaaaccaacgtttttgggataagtatcaggttagtccgcaaacggcaaccgactatttctttaacttaagcaaagctaatgattatatcaagacgcgggccattgcgaaaaacgtggtctttccagcaaaaacgccatttggtgacttagagattaccatcaacttatcaaagcctgaaaaggatcctaaagcgattgcggcagcgcgtaaccaaccgcaagatggctatccactttgccaactatgtatgcagaatgaaggctatctaggccggctcggttacccagcacggagcaatcaccgaattattcggttaacacttggtggcaatacttggggtttccaatattctccatatgcttactttaatgaacactcgattttcttggatcaagagcaccggccaatggtcattaaccggcaaacttttaccaacttacttgaaattgttcagcaatttccacattactttgtgggcagtaatgcggacttgccaattgttggtggttcaatgctgtcacacgagcattaccaaggtggtcggcacgaatttccaatgatgaaagcgccaattgcacgcacgattgacttaggtatcgcgggtgttaaggctgggattgttaaatggccaatgtcgacgattcggctgacgagtcaggacttggttgcattaacggatgccgctgtgaagattcatgagacgtggaagaattattcggacgagagtgtggatgttcgtgcttatacggatggcacacgtcatcacacaacgacaccgattgcacgcaaagttggcgatgactacgtattagatatcgttttgcgtgataatcagacgtctgctgaatttccagatggcatcttccatccacatcaggatgttcaacatatcaagaaggaaaatattggcttgattgaagtgatgggccgggccattttaccagcccggttgaagaccgaattagctgaagtcggcaaatacttgttggatcagcctaatcaaatggtcgcgatgcatcaagcatgggctgatcaattgaaggccactaataccatcaccgctgacaatgtgacgactgtcattgatacggcggtcggcaacgtctttgcccgggtcctggccgatgctggggtctttaagtgggatgacgctggtgaggcagcctttgatcgttttgtcgcagcaatgcacgattaagttgttaatcaaatgaagacgtggggcaacggggtgttgcagacgcgatttaccgatgagtcatgattggtgaatagtgtcacgcccagttgccccacgtttgttattcagtgctaattaattaagagaaaagaggaatgacgatggccgtaacgttaaaagatattgcgcaacgagcagatgtctcattggcgacggtatcgcgggtcttaaattatgacaagacactatcagtgagcgagcagacacgcaagcgcgtgtttacgattgctggcgagctgcggtacagtaagcgtaaacgtcagcatataaaggcgctaatgcggaaaaatatcgctgtgattcagtggtactctaagattcaagaacatgatgacttatattatttagcgattcgtaaaggaattgagcatcaagctcaagtgtgtggttttacgacgactagtatcttccagaataatttagatcaggttggcgatgatattgatgcaatcgtggcggtgggaaaatttagccctgtccaagtacaacagttgagtcgtttgtcaagccagcttgtttttgttgatgacgatcactttgctcagggattcagcagtgtggtgactgattttacgtttgctactaaccgcgtcgttgattatttttggcggcgtggtatccgagatatcggtatgatttatggcaaagagtggtccactgatcagcaggtggagattcccaatcaacgtcagcaaagctttgaacaggcgttgcagcggcatcatgcctatcatgctgagtatgtattagctggtgattacactagtcaatctggttatctgatgatgaaacgggccattgaaatgttaggtgaccgcttaccacacgctttctttatcgctaatgatccgatggcagccggtgcgctcaaagcgttacagcaagctgatattgctgtgccacagcgggtcaagttgtttagtttcaataacacgacgctggccgaatatgtgtatccagagattagctcggtcaatgttgagactgaactgatgggaaagacggccatcgatttgttggtgagccgattccaagatgatcgtcaagcagcccagcgcattgaactgggaacgacgttggtagaacgtgaaagcaccaaatgaaatcatcgagtgttcgtgaaatttggcagaaatatcgtaattaattaatgtgccacccgattgttaaaaagtggtgcatgactttgatgggcactggttggtattgaatagcgcacgtgaatgggttgattggtcatgctactactttctgattagttggtctgttttgctaaggtgtgaggccataataacgacaattgtacccttcaagggtataattgtgagtgaggtgatgaaaatgaaaacaactgccacaatccttaaggagattcggcaacattaccaaattagtcaggcaaagctggcaaagttactcaacacatcggttagaacggtacagcactgggaacaagcggactaccaaccaagtggcaccgcggtacgtttgattcagattttggctacggacgatgcggtgtataccgcactgacaaacctcgaggaggagaatacgattatgtatttagaacacgatgatcagaagttcaccatcatgggtgtgcagtttcggaatcaagaggaataccgggcgaccatgaatgcaattatcagcaatatgtatgagggttttgagccgactaaggaagatgttcaagacgctcgtcgtttctatgacgaaggcccgattagcgcacaagagatgctagcaagaatacgtacttcgaccaatcgtaaagccgaatgagaaaggtatgggcggactacctacaaccaaacggtactttgaaaaatcgcttaggcattactgaagcggctactttgcagaaaattgagtacaaagtgagtacgcaacggcaacagcaattatcccgcaatcactatcttctgccagactctcatcaattgacaggacgtcaaattggagagctaaaattgatcaatgggtttttgctcggtgaaatttacgactgggccggtcactatcgcgaagttgatttcaacaagaccgcgaatggcgtagtgacgttttttcacccggtggctttatttggtaatgctgagatagatattcaacgccaactcgataattttgcgctgttaccggatgaccgggaacaagttgcacaggcgttagggcaagttgtcaccgaaatcaacatgtttcatccgtttcgggaaggtaatggccgcacgacgcggctgtttactgaggttttggcttggcagcatggttttgacatcaactatacccaggcacagcaggatgcttacatgcaagcgtcaattcaagatgatgctgagatgatggcacaggtgttcctggaagtactaaccaaatagatcaattattgttagtcgtgatactaagaatggtcttaaattaaaacaacaagtgcactcggaaatttctaatctgagtgcacttgttgttttagcttagtgagatatatgacgtttgtcgcagcggtcaattttactgcttgagtgggccactaacttttcgtttatattcggatggggtggtctttaggtattttttaaacagacgaaagagtgatgaggtgttttgatatccgatgatgtcgcaaatgtcagcgagtgtacagttagttttgatcatcagattttgggcagcagaaattcggcggcggtcaacaagttctttaaaggtcttgcccgtcgcttcttttaatttgttacccagataattcgtattataagagaacttggcgctgacatcacgtaatgtcacgctggcgaaattctgattgatgtactgaatgattggcaaaagattgtcgtccgtattgtcagaaaagttaatgtattcttgctcaatcgattgcgataattcaagaattaatgtagatagcagcaggcccattgatttattacgttggcggctctttgtaaggcccttgataattaaactttcaactaaattgatggcaacttcttggtgtgttaagtcaaacagaataaagttgttgtgcaacgtattgatgtgggatgcattatataaaaattgagtgatttcattggttgaaacggcaatatagtcgaaaagttggttcatcgttgagtcattcttgagcaagatgttaatcaaaatatcattactgcccgttgattcaatttgctgaacaatgtctttatccatcaaaattaggttgtgctgatggagggtcactttttcgccattaatatactgagtacaagtgccagcatacatataattaagctcaataaagctatgcgtgtgagctggaacataggaaaagcgattatttttggtaacagcaatatcaccgtgcttaaaaaaatctgagcggggcatctggggaatcggattattcacatagtctaagtccatgtagttaacgttaccatgtgattggcgttgctttagctcaaccggtgtcagagcaaataattcgtaattgagaaatttactagtcattaatactaaccttctttaatatttatcgtttagtacaacctgtgattttgcacgatcattcatgtagttgagatatggtaccccttacagtaatcgcttacaatattcgtataaataaagggaggttcttcatatgaataacggcgagacgtcaacttcaatggtgaaaaaatatcggccattagcagtagctgcaggaattggttccattctaggatcaggaattatcgttggcttatccgcgactattacagtgtggcagaacggactaggtcttactaacagtcaagttggtattatttcaggtgcactaacttttgcaattgcaattggatccttattagcaggacagataacaaaatcttttggtctggttaaatcgtttaattggttaaacctgatttatgcgattggcgccttgatctgtgttttctcgaataattatatcatgcttttgattggcgtcatcattaccgggttagcttcgggtgctgatttaccaattagtttaaccgtagtttcgcatgatgcaccggatgataagacctcggctagtttagtatcgtcgacgcaaatcttctggcaaattggggttttcatgtcttatgtttgtgcctttattgtttctaaaatggccggtgcttccggtgctcggattgttttttcgattttagcaatttttgccttgattacttgggcatggcggactttttcaactaagttccgagcatttcatgaagaaggtgaacaacggcgtattgatcgcgaagcagcttcacagacaacagagaaggtctcgattaagacggtcttcgctggtgccaacaagggacgctttatggcattcttcttcagtattttaatcttctatgtttgctggaatctactggccaatacgttcggacagtttcaaacgtttacgctggttcaagcacatgcgagtcaaagtttcgcaactggtgctgggatagtcctaaactttatctcgttgttggcaaccatggcttttgcatcagtcgctgggggtaagtatcgtaataagttcttcttagttgggattaccgttcaatttttggcaatgctcggactagcaatgagtagtcattcgttatggccaattgtcatcacgattggctgttacaacattgggaataatattgctggtgaagcgatgtataaagtttggacacaggaagcatttccagttgaagttcgggcatcagttcaaggatttattaatggcttttcacgggtatgttgtggcctatttgccttaattacacctgcgttagttgtgccatcagcaattcgtaacacgatgtttgggttcgctgccattgtctttattagctttgtagcagggctgacaatgatgcgattggaaaagaaacatggtattaataacttttaaacaaagtatttagaaagcgagtggaagagatggcgtttacttttcaaatcaataatgatgttcaatttcggcataatcaagcattattagacaagtcggcaagctatcggccaatactgaaagaaacccaagttaaggcggcatcgattgtggcgctcgagcgtgatacgcaataccttgaaggatggggtgttaaacaaattgcacctattgaacgattatcaagttatgagttgaaacgtgacgaccaaattatcatagattttggcgatcatcaggttggtcaatttagtattaatattaacgctgttggttcaccaatggatgcaccactatgttttaagattaagtttgctgaaatgcctgcagaattagcacgcaagagtgaagattacgacggttggttgagcaaatcttggattcaagaagaaactgttcacttagatgtgctgccaaccacgctgacgttaccacgacgctatagttttcgttatgctgagatcacagttgttgatacgtcaccaaaatggcgagctgtttttagcaatccagtggtcacggcgacaagtgcggtagacactgcgacagttcatcaaccggaattagccgatgcacaattacaacggatttatgaggttggcttgaaaacattagctgattgtatgcaggatgtctttgaagatggaccaaagcgcgatcggcgattatggattggtgatcttcggctacaagcattggccaattatgcaacgttcaaagatacagatctggtcaagcggtgtctgtatttgttcggtgcgatgcctacaacggctggccggattcctgccaatgtttttactaaaccaacggcagttccagatgacaccttcttgtttgattacagtctattctttatttcaattttggctgattatgaggcgtttagttctgataaaacagttttgaatgatttatatcgtgttgctaaaaatcaaatggatttggcgttggcacaagttacttctgaaggtaaattgaaattgactgaagaaaatccggttttcatcgactggtcaaatgattttgacaaagaaacggctgggcaggccattattatttatacgctaaaacaatttattacgcttgcggaactggttaatgatacaagcttagagacctatacagcgatactgcgtaaattaaaccagtacgctaaaactcaattgtttgattcgcaatcggggttatttgtctcaggggatcagcgtgaagttaatgtggcaagccaagtgtggatgacactagcacatgttttggatcctgagcaaaccacggcgcttatgcaaacgaccgtcacgaaactgtttccaattactggtattgcaacgccgtatatgtatcaccatattacggaagcattatttgaagcaggcttaaagcaagaggccgtccaattaatgaaagattactggggcaaaatgattacgctaggtgcggatacttattgggaagcatttgatcctaatcaacctgattattcgccgtatgggagtcccattttaaatagttattgtcatgcttggagctgtacaccggtgtacttgattaataagtacctcgtttaggaggagtgtctgcgatggttgacgaaaaagtaaagctgagtaaagcaaacgtactcttaataattgttgctggtctagcttcctatatggatgcagcgttgctcgttagtctgggagtagcgctacctatctggacaaaatatttagcactgaatagctggatggtcggactactaagtactatgctgacggtcgcggttgcaattggttcatttgtgggcggctggctgtcggataaatttggccgggtcgcggtgtttaatgctgatatcttttttgtcgcgattggctcgtttattattgcgattgcacaaaatacgacgatattgattattggtgttgtgattgctggtttggcctctggtgctgatttaccaacgtcattggcggttatttcggaacggatgtctagtaaagtttatggtcgggcaatttcttcaactcagattttttggacgatgggcattttgttgtcacagtttattggttttataactgctaacagtggtatgggaagcccggcagccttatttggttggattggattagtggcaattattaattggtgcgtgcgggtcttttcaaagcgttttaaacagattgaaacagacttagttgaccatgaacatgtggactgtgcatctaacggtcaatcggttaagaagtatcgattaggtcagctattgcgaacaggtggtttgttagtaccaatgattctactaactgttttttatctattttggaatttgccggccaatacgtgggggtcatttgttaactatttcttagtgactgttgatggccgtacgcaagcctattcgacaatcgtggcattaattgccaatattgtgtgtctgttagttaacctgatctatttaaaggtttcagacactaggtatcgctaccgagtgatgtatttaggtattgccgtagcattgctttcctttgtgactgcagggatctttagcgatgactggcagattttcaccgttgtttatattttctactctggtagtacagtattatgtggtgaggctctttataaaatttggagtcagactttctatccagtggatgcacgggcaacgatgatgggcttttcttatggcttagttcgggtgctgaccgctgctttctcgctagtaacgccaacattaatgggatattcgccgcaactattattatggattatggttggatgtacggtgctattcggtgcctgtgcagtgatcattgtcgctattattaagaagaccggtttaaaagacccaacgatgaaaacggtttctgaataaactgattaatattactaagaattaaaaatgtaagccgggcattgccgggcttatttatttaaaatcaaggaggataatgctcatgtcaaaagaggctgtttggttatggtatcctggtgattttgaaatccaccaagggatgttacaaaattttaaacgtgaagaacgtgggatgggttggcctgcctattggtatattgatgattgcaaccgtaatgttaattttaaacggcactatgatttaaaagaatccacacaatttacagtactcgccaaaggaacgggctatgttgatgttaatggcactaagtatcgcttaaatcatgcgattaattgtgatgcgggtgcgactgatattcaagtgtttgttggtaacgttcagggattgccgacgatttatattgttggtgagattatcaaatctgatagtggttggctagctagcaattttgtcaccacattacccgctggtcacgatattctctacactgaccgtaaccaggatcctaatgtgattgaatatcggacagaaaaagtagtggccaaagcacaacaagcagttgatggtggcgttttatatgattttggtcgcgctgtgaatggaactgtcacagtcaaaacgaatgggccagttacactatgttacggggagtccgaaactgaagcacgggatgttgagatgtgttattacaagcagtcggacgttacagctacaacaaaggttcgtaaacgtgcgtttcgatatgtctttgtgcctcattgtcagttaggtgacattgaattaactgctatgcacgaatatattcctaaaaataatccctccagttttacctctgataataagttgatcaatcaaatttggaatgtagcgacggaaacgttaaacctttgcagtgacttgttctttatcgatgggatcaaacgtgatcggtggatttgggctggtgacgcgtaccaagctaattttatcaatcaatattctttcttcaacgaagatattgataaacggacgttattagcgttgcgtgggcaagatgatattaagcaacatatgaatacaattgttgactattccatgttgtgggtgattggtgttctaaatcattaccagatgacgggtgaccgtgaatttctcaaaattatttaccctaagttagagagtatggtgcaatactttattcaacagacaaatgagcatggttttatttatggtcggaaaaatgactggatctttgtcgattggtcagaaatggataaacagggtaccgtggcggctgaacaaatcttattacttgaggattacaagacaattatgacttgtggtgaggtcttaggcaaagatgtggcgggctaccaagcgaagtatgaccagttgtttaagaacttaatgaaatacttttgggatgatgaacaaggagcatttattgatagttatgaatcgggtaagcggcacgttactcgtcatgctaatatttttgccattttgtttgacgttgttgatgagaacaaacaacaattaattttaaagaatgttttgttgaataatgcgattactcaaattaccacgccgtattttaagttttttgaacaagatgctttatgtaagctgggggaacaacaccgtgtttaccaagttttattagactattggggcggcatgttagatcgcggggccgtgaccttctgggaagaattcgatccgtcgcagcatggcaaggatatgtatgccatgtatggtgatccctatggtaagagcctgtgccatgcctggggagccagtccgatatatttattaggtcgtcattttgtaggattacggcccacggctccaggataccagacttttgagatcaagcctgagttatcagaatttcatcatttacacaccgtgttacccattaaaggcggtaccgtgactgtcgtaaaagatcaacaccaactatcagtcactgctagccgagctggtgggacattgattgtggatgggcaaagacaatctttggaacctaatagaactgcggtggtcccagtgtaaatctataaaatgagtcgtaatagtcatcttctattttggaagatgactatttatttataatcaaagggctgttgagaagcagaaatcagcaaatatgaggtggatttaatgcccataaaaagatactgtgattgtaaacgctttagatgtaaaatgtaaacaaacagactaaggatgtggctactatggttagtatcagagatattgctcgaatggcgtcggtgtcaccagccagtgtttcgagaatcttaaatcatgatcaaagttttagtattaacgaagaaacgcgaaagcgagttattgatattgccaatcaaatgcattattcaaaggatgcaagcaagaaagggcctcgtttcaatcatgacagtatgcaaattgggctgatactcagacatagtcgagaatcagaattgaatgatccgtattttcatgagatccacagaggcattgaattggaagcagccaggtggcgtatgcgtgtgataacaccatttggaatgaaggataaagcaaaagaatggcaaacgttaaatgattttggtgccattattatggttggcgaaatgactaatgaaggcgttgaaatggttaagaaagtcaatgacaatgttattctagtcgatagttattctgaacatccaggagtagatgtgataaaaactgatttttcggaaaaaacacaagaaattctagatctattatacgaaaatggacaccgcaaaattgcatttattggtggatacaatagcgttgtgcgcccagatggtagtgtccttagggataatcatgaggtgcgtgcagttaattatcgtaactggatgaagttgcatgatttacaggatgggatcaatgttaaaattggtcgatggtccgccgaagatggcatgacacttgcaaaagagatattacaaggcaatgatcgcccgactgctattattgtcgctagtgatccgatggcaatgggtgtttataaagctatcagtaactttggattaacgataccagatgatatttctgttgtgagttttgatgatgttgagatgaatcagtatttggtgccttccctttctagtgtccgtatggaagctcgggaaatggggaaaatggcggtgaaattggcgcgggatagaatgattgaaccgagtggtatgccgatgcaacttatttgtgcaagcaaattaatgattagggaatcagtgaaaaatataaaaatttaaatctcctattgtgtaaacgtttagtaaacaaatacaatgttcttgtaagcgcttaccaatataaagataggagatcaagacagtgaaaaaatttagttctggttttcaagaaaagatgtcctcggcctcacaggctattggtaataatcgatatttattaagtttgcgagacggtttcatggtcgctttcccagctactatgtttgggtcaattatggttattcttcagaatttgccgacgacttttggatttgacaaagttattccaaagggagttaacacatttctgacagattttttggggcctgttagcaatgcgacaatgtcaattactgccctatttattgtttttgggattgcgtatcaattagctggtcattaccatcaacaaaagatatttgcaggggcaattgcactttctagttttatcatgttgttaccaatcggtaatgatagtaagcttggggcatttattccaatttcaaaattaggtgcgcaaggcatgtttgttgggattatcgttgctattatttcaacggaaatttattgcaaaatcagtgcagctaacattacgataaaaatgccgagctcagttcccccgatgattgcgaagtcatttatcgctatcatcccaggggcagcaccactactattctttaatattattcgttacgcatttacttttactaagtggggcaatgcagttgactttgtatatgaaattttacaacagcctctgatgggactaggtagtacgctaccggctgtattgattgcggttgctgcaactcaaattttttggtggtttggtatccatggaacgttacttgttaactctattattgatccaattatgggtgcgttagcgattcaaaattatgaagcatataaagctggtgcaacgcatctaccacatattattaacacgactttcatgggcgtttttgttaatcaagggatgcagttaggatgtgcaattgtttttgcgtttttcttagctaaatcagtccgaatgaagaaaacgatgaagatggttttcgcacctgcaatctttaatgtttctgaaccaatgacttatggattgcccatcgttttaaacccaatcttgtttgtgccatgggttttagcgccattggtttcaacgaccatttcttactttgcgattgccattggattagtaccacgtccgattggtgcgacagttgtttggacgactccaattttcttagccggatggttaggtaccgggtctatcgcaggggctatattgcaattagtagatgtcgttgtgatgacattgatttggattccatttttgaaggccatggatcgtgaatgggtacaggaagaattaaagcctacacctgatgacttaactgaatagggaagagtgatggtattgagaactgacacgctgtcgtataaatatcgctatcgagcactaaaatcggagttatatcgtacgcttatttcagaacaattaaaatattttcaacgaacggataaaagtattcaagttctaacacctggaacgacaatagtggcaaatttacagacaaaaatgcatcaattagtcacacaaaatacgatgaaagtgaatattatgaaggcagatgatacatttcagttggaaacacaacagccctcagggaaaattattcaaacgtataaatttgatacagaacgttccggagcgaaaatcttggtttattcagagcaaaatgtgtttgaaagtaatcgtaatcaaatgaactttatgatttttggtttgatgtataagtatttttataaccgtggtgtcaggaaacggatgcgatatttagatgatttagcgcaaagcgtcgaataataaaccgttcgtataaggagctcatgacattggtttgtgggctccttgtacacactaaatgaatggtttaaaagtagcagaaaagggataactgaaatgatagtaagtggcacgacaaataagatgtttgaaataatcaatggacagacttttcatttatataatcgtaaagttagctatgtgctaacgattatggaaaatggtcaattagggcatttatattatggaaaaagcttaggtcccttgtccattgcggatgtggattatctgaaggctcagaatagtaaatctgctgggactgtcaagttttcaccagatactggcaattttacacttgctgatcgggctcaagaatatccagtatatggttcttcggattttcgtaagggtgctattgatattagttataatcaggaaccttggtatctagattttaagtttgctgattattcgattacgtcagataagccacggaatttgaactgccctgaatcgtacgcagttggcagttttgaggcgacacaattggatatgcaactgatagatgaggaacatcatctagagttggttgagcattttacaatttttgataatcaaagtgcggtggtgcgaagcacaactattaaaaattgttcgagtaaaacgattaatattgaaaatataatgagcgcttcgctggaattaccagatgacaagtttcaaatggttaacctatcaggtgcatggctaaaagagcggcatgtaaagctgcacaacttagatcaaggaactgtttcagtagaatcattaaagggcgcatcaggacatcaacataaccctttcattgcgctgatacgaagtcaggacttaaatcaaggagaggtctatgctagtaatttaatctattctggtaactttgtgagtcaagttgaagtaaatgaatggcacaagacacgtctaatgactgggttgaacccaacctattttgggtggaaattggaaacaaacgaaagcttcaaaacacccgaagccgttatttattatagtaatcaaggaattaacgggttgattgatgcttccacaaactttacaaaaaggcatgtaattgatcgtcgctggaatcaaagagagcggccaattgtgttcaataactgggaagcaacctattatgattttgatgagcaaaagcttttaacactggctcgccaggctaagcatatcggaatggagtgctttgtcgttgatgatggctggttcggtcatagaaacaatgatcgaagttcattaggggattggcgagttgatccgcagaaattcccacatggaattgacctatttgctaagcagattcatgagttgggattgcaaatgggattatggtttgaacctgagatggtatcgcctgataccagtttatacaaagaacatccagactgggttgtgcggcacccttataagtctgtgtcgattggccgtggtcagtacgtattggacttcgcaaatcctgaggtagtcacatcggtttatcaacaaattaaaccagtcatattagcaactaaattggattacatgaagtgggatatgaatcgtaatattacggaagcgtactcaccatacttaaataggtgtaacattccacaaactgaatttttccatcgatatgctcagggcgtcaatatgctataccaattaatactaactgactttccagacatgctaatagaaggttgtgccggtgggggaggtcgctttgaccttggcaccttattttatagcccgcaaatttggccgagtgatgatagtgatgcagttgaacggttatcaatattgactggaaccaccttggcctatcccctatcgtcatttagtaatcatgtttccgccgcacctaatgaccaagtaggaagacaaacttcactcgcttttcgacaaatggtggctgactttgggccactaggatatgaattggatatttccaaattaccgttggatgaattaacacagataaaggagaacattgaattttatcaggtccatcgacaactttttgtgaatgggagattcagacaattgcaatcaattgatccctgcactaatgaggtaatttggagtgtggaaaattctgatgatacagagatttttgttggattttatcgtaagctggctacccccaatgctagtattctgaattatgtcaaattacctatgattaatccaaatctaacttatcaaattgatggtcgtgaaaaggttagtggcgctgtgctacagcagttcgggttgcgacaaccatatcaatttaatggtgttaatcttgacacggcagaattatatggagattttcaatcccatttatatcacattgtcagtattgaatagctaggagtgtgttgcatgaataagttagaactggttaaaggctttttacatggtggtgactacaatcctgatcagtggttaaaacgaccggatattttggaccgggattatcagttgatggatcagtcgaagattaacacggttactgttggtgtttttgcttggggacggcttgaaccggaagaaggtgtttatgattttgcatggcttgatgatgttttcgataaaatgaatagtcgaaatggccacgtgattttagcaacaccaagtggcgcacggccacgatggatgagtcagaaatatcctgaggttaatcgagttgattctgaaggtcgtcgtcatactcatggtttccgacataatcattgctattcgtccccgatttatcgaagaaaggtacatgaaatcaatatgcgcttggcagagcgatatggagacaattcagcgcttgttttgtggcatgtctctaatgaatattctggagagtgttactgccctttgtgtcaacaaaagtggcgggagtgggtccagcacaaatataagacacttgaagcattagatgacgcgtggtgctcgagcgtctggagtggtttatacagtgattggtcacaattgttgccaccatcactattgggtgatagcaaagttcatggcatggatttagactggcaccggtttgtgtcagatatgacgattgatttttatcagcatgagattcagcctttaaagaaagtaacgcccaatattcccgtaacaactaattttatggctgagagcttaaaagaagggcagtatacaccgctgacagggttagattatggtagatttgcaaagtctttagatataattagttgggatagttatcctagttggcataatcgctatgaaattactgcggaaactgccatgaaaaccgcgtatgttcatgatcagttttggtctttaaaacaacaaccatttttggtcatggagtcaacaccaagctgtgttaactggggacagtataataaagccaagcaacctggcatgcatcggctgagttcatttcaacagattgcgcatggctcggatagtacgttatacttccagattagacaggcacaaggtaattcagaaaagtatcatggtgccgtaattggacatgatgatagctcagatagccgcgtttttaaagacgtgcaacaatatggacaagatttggaaaaaattgtagaagttaaaggggctattaagcgtgtaagagttgctatcctctttgactgggatagcaactgggccctgaaccgtggtggcggctttggtcggccaactagattgggaatacaagtacttcaaaaacattatgcaaatttttggcacaaagatattgagtgtaatgttataacgagtgatatggacttttctcaatatgatttgttaattgcaccgatgctttatttaatacgacaagatacgatgaaaaaattgcaaaaatttgttcaaagtggtggcacattggtatctagctatttttcaggtatggttgatagcaatgatcgtgtgaatttagatggctggcctaaaccgctacaggatatttttggaattgagccaaaagaattggatactttattaccaggcgagcactaccatgttagttttaatcaaaaagagtatgaaactaccgattatgatcaaataatgaaagttaaaaacgcatcagtgctgggatactacacagacaacttctatgttggaacaccagcaattacacggcatcagtatggtaaaggaacggcctattatattggtgcacgcttgtctgcggaattcattgaagacttttatgatgacattattcaaagccttaatttagataatagttttgtcgaattgagcaatccggtagtatcagttcaaactcgttataatgaggattatgcctatcactttgttatgaatttttctgaacaagtacaaatggttaattttcgacgtccatcctttgatctgcttacacagcgagaagttacgaaatcagtgcaaattgataagtatggggtcatgattctgaaggaaagacagaacaatacgttgcactagatgaatatcttggtgaactgatttagagttttggaaagatgttcatgattaggggttaagagaatccaaattaaacatgactactagatatagcgtgtaaagtcactaagactgttgaataattcattttactttcgttactagagactctaaattaatcatggcagcataatcaacaatgacttataaggattggttgtgatcaaataagcactgctcacaaaatagtgggcagtgcttatttggcattcattaaattgtttaacaagtacggtacgggttagcgtttcatcggtacttccatgccagtgctggtctttgcccgctgtaacaacaagtagtgggccgtgccaaagacggcaccaactagcgcagggactaaccaatccattccgctgctggcaagtggtaagaagctttggacatgcgccattgcttggccgaaagtactttggctaacaacggcggggaaagcggcaaccatatcaaagacggcggggacgacggtgaagacgacgacccaaacatagacgacacttgacttgtggaagagtggcgaaaggatcgataagaagattagtgccatggctaacgggtaaaggaacatcaggacgggggtggaccaggcaatgatctgatttaatcccacattagcagttaaaaatgaggcgaggcacgtgattcttaaccaggctttgtaactcaagaaaccgaagtgcttatggaagtcctgagcgaaggcggcgacgagcccgatagcggtggtcaaacaagtggtaatgatcaacacggctaaaatggcttgtccgacattacccatgtagtggttaacgatttggtcaaaggcgaccccgccgttatcggataatttgaattgacctaacgattgcgcgcctaacaagattaagagcacgtaaatcaagccttcaaaggccattgagaagaagccagctcgggcggtcacccacgcggctttgttcgggtcggtttggcccatgaaattaacggcagtgacgatagtgacacctaacgccaacccagctaaggcgtccatcgtgttgtagccttgcaagaaaccattggtaaagcctgcggtctgataggcagcagttgcactggtgctaccggcatgagctagcggactgctgaaagctacggcgaagatggcgactaataatagcaaaaataatggatttaataatttgccgacccgagccataattttgctctgttcaacggacaagtagtaggcgagtccgaaaaatgcggcggaaaacagcagtaatgcgagtgattgatactttgctgggaaaaacggtgccagaccaacggtgaatgatacggtggccgtccgtggtgttccaaagaaggggccaattgtaaagtgtatgagaaccatgaagacaacggcaaaggttgcgcctagtggtttaccaatgtcataaacgcccttagatttagtgacacagacggctaaaaccgatagtaagggcaataaaaccgccgtgatgagaaagccggccgcagcaatcccccagtgaccgcccgctagctgacccaagtgaagtggaaaaatgaggttgccagccccgaagaataaggcgaaaatcattgaacttaaggtgacgtaatcacgtttggttaagtttcgcttttgaactcgatttaacatatcaacagcactcccttatttgattgagacaataatcattaaataaaagttgcgattaaccaaaaaacgtcctgatatctgagttagactcagaaaccaggacgtttgaacacgtgttaccaccttagctttgtgactgccttacgacgaatcaccttaaaaagtacggcaagtggccggccacttgcgatacttcggctcaataatgggagcaaccaacagcaactaacatcaagctcgtcactgccactcagaactgattttcaacgatctggtcatgatgtcattgcaccaaactgacactctctaggcatttccagaaggtttactttgttcatcggcgtgtttgttaatcgatttttaatgtggttctaatttacaaccgcgattagtatttgtcaatcttttttcaaaaaaagttagttagctagtgcggattcttaaataaagatggataatagctgtaataaggaaatttgtgaggagggtccgctgatgaccaacaacaatgaggaaaagccccaatggcaagtgaatcagaaccgccatacccgttttcggacgattgtcagtgtcttgcggcgctataacgttttgagcaaccttgcacgtcagaaaaatcctgatcaagtgcgcgcggcgtttgaagaacttggaccgacgtttattaaaattggccagattctttcttcacgtacagatatcgttaagccagaatttgctaacgaattcaaaaaattgcaaaataatgtccgggccgatgattttagtgtggtcaagcaaacgatcgagcagcagacagggaagccaatcaatgaaatgtttgcccagtttgacgagcgaccgtttgcatcagcatcaatgggccagacgcaccatgcgacactgctcaatgggcagaaggtcgtggtgaaggtgcagcatccgggtattgacgccgaggtggccctagatatttcgttatttgagcgggcgttacccctattgcgatatattccggagtcttcagttgttgatttgcgcgaaatggttggtgaaatcaaacggtcactattcaatgaattggataccagtattgaggtaaaaaatggattacggttttaccgattgaataatgcggacgatattattcgggtaccccgggtttatgcgaagtatagtacgcaaaaagtgcttgttaaccagtatatgccgggaacgacgattcagcattttatggcgcaaatgcttgcggccgatgaacacggaaatcaccagtatgatgacgaacgccgctatttggcccatgtcttggtgcaaaatttcttgaagcaggtttttgaagatggcttttttcacgctgatcctcatccagggaatatcttattgcgggaattgcaaccagatgatattgggtatcacgatacggttcccaagcatggcgggaaaattggcaaacggcagttaccaccataccggttagtttatctggattttggcatgatgggtgagatcagtccagctttgatggcaggaattgctaatgttgtcgtggcagtgacaaccgaagatacccatcaagtcggcaaagcaatcttagcgatttcaaaccgaactggcgtggttgatgaagaagcgttctttagtgagttagcaccatttttaagtcagtattataattcgggactgggcgacattgattttcaaggcttgttgtttgaaatggtcaaggtttgtcgcagtaataatattcaaatgaatccagcggttaccatgttaggtaaggcgtttggaacgatcgaaggtattgtggagacgctcgacccaaccttatcaatgatggacgtggcgcggccgtttgcgcgcaagtacatccgcgagaattttaattggcgcaatgaactggaagatggcatgttggctagccttcaaagcctgcgtgatgccccgaagattccgtcacgcttattatcagctctagatacgtttgataatggtcagacgcgggtcaacttggtctttgcacaccgcaagatgtttattgatcggattgattcgatggtcaataagattgtactgtccgttattctggcagcgctgattgttggatcatcactactagttcaaagccatcctgataatagttggattacaaacattggtattttgggctatgtttcagcagttgtcgtcattattggcctattgattggaacgctccattcctggtacacgcattggcgacgcaagtaaaacttggcgtagggttaggctatagggccatgcgtcatgagaagttggcaacgtagattcgtctaattgagactgcctaaaatataagcatacgaaaaacagcggtaccgtgatgattccaagccataaaatcatcacggtaccgctgttttattaatcatgtttcagtatcaaattgatcgtggttaatggtacgactgtcaattgctaactagtcttctgatcccataacccgagcacagaatgcggccaagatggcgccgacttctggtgctaagatgtagacccatagatgtgataaggcgctaccaccagcaaaaatagcggggccgattgaacgggcagggttcaaagaaccgcccgttaagttgagagcgacaataatcaagaatgctaaggtcaccccaatggtcaaaccagcaaagtctgcgttaccatggtcattactagtaacgttcagaataaccattaagaataagaatgtgactagtgcttctacaaagaaggccataccactgccgatttttggaaaatcggtttgaccaagcgatgttgcggataagcctaatgcactgacaaacgacttaactgctgcggaagcaacgatggccccaatgatttgggcgatgatatagccaatggcatcggcggcatcgattcgacggttgattaacatcgcagtcgtaacggcggggttaaagtgaccaccagaaataccaccaaaggcataggccgaaacggtaatcgctaacccgaaggctaacccaatagcgaggacgtcacccttagcaatcacaacggttgcagtccctaagaaaactaacataaatgtgccgagaaattcggcgagatacttgcgcatagttgcacactccctttttgaataattgctaacttaacctattttacaatacctgctcgtgaaaacgacggaatttgtttgatttgtgaatatttctgataagatttttataattatattaattgataagatactggtaaaacgttggtataaaaacgttttatggcagttgtggattgttaaaactataataaataaaaattttatttttgcatagtcactattgatagtagtcagtatgattggtgtgtgatctaacgtgactgtgaacgctaattgtcgataatggtggcttctgttttataatggttaggacaagtaagctgatgtttttgaaaacgaattaaatttgtttcacgtggaacagtaaaggaaggtttaattaatggcgttatcatatcaagctctattaacagcagttccggtcgttttaaaagcggggaacgtaccgaacattgtcggtgaagccgggattggaaagtcggccttggtagccgaggttgctaagcggatgggggcgcaattatacacgaccgttgtgagcctgtccgaaaagggggatttagcgatcccagtcccaccactaacgagcgactcatttattcaaacgaagcgctatggccagttggctgacgtgcaattcggctatgcacacacgttgattgaaattattcagtatgctgagcagcatcctcagcagccaattctgtggtttttagacgaatttaatcgtgggacgcaggctgttcaaagtgaattgatgaatctggtcttgcaacggacgattaacacattgaaattgccagaacaggtgcaattgatcattgctgaaaatccagatgctagtatgactggatttgaaagtagtacgtatggcgttactgccggcgatgcggccatcaaagatcgtaccgtgcgtctagttatgcgagcagatgcggcagactggcttgcttgggccaaacaagtggatgagcacatgaaccgaccaaacattcatccactcgtccagcagtttattagtgaagatgtaacgcggcttaatcaggctgatgtccaggctgatttaacagcgacgccacgtgcgtgggcgcgtgtttcggctaatttatatgagattgaaaaacttcctgtgcatcaacaaacggctgtggcactggatatctttcaaggagatgtgggtactgagctagggcttgtattcgagcaattcttggaacaacaagccattcatctgacaccagcgatgatttatgacagtcaaccagtgggggccgtggtgccggcaccgattcttaagcagtttacggcgatgaatgaaattcaaaagcgaacggttttggcaagctgtttggctctaacaaccacgtatccgttgacggacgatcagcacgctggtcggttcatgcaactcctacaaacactcagtcaagatggtcagtttgcattggttcaacaaatcggccatgaacgcgacttattaaagcaattatatacagcaaatgttgccaagcaaagtccgtatgtgaccgctttgtatcagtatttacaacaggtcgccagttggtcaaatcagtaagaaagcagtgagtcatcatgattaacaatgccaatgagtacacacgttggcaacaagcgatgttagtgacgccaacagcagacacgatccaggcaggtgcgaccatgattgatcgggccattattgagttactagccaccgatcaattttatggcgagttgctgacccgacttcccagacagttaaatacgacgttaacgacgccgtttatcttagcttggcagaataatcagttggtcttacaatatgcgccaacagtaattgctcgagctttttcacagttttcttacttacaagcggggttaaaacacgtggcactacacattgtctggcaacaccccgttcggtatcgtgatcaggtcaagcagcaaccggagttagtgacgttggcgaccgacctggccgttaaccaatatgtcgacggtctgcctaaagatgcggtcagtttaacgactgtccagccgttagtcgatgcccagctaccgcgacgagcagattctggctgttatttgaaattattacagcagcagtcgcggtcgcaacttcagccgaatggcgcgcccaccgccacttcgcgaaataaggaccagcggcagccagcaaaagggtctggcgaccaaaagtcgcaacagttgatcgatgatccaagtggctggtcagcctctgaacagttaacgaatcccaatttggcaactgcccgtttaaaacagttggcgaaagatgcttggcagcaaacaaatgaagctggccgagggttagtggccggcaatgttcgagctcagctcactgtaatgacgcagccggcccagcttgattggcgacaattactagttcggggcctgggtcagattccgagcggtactaaggcctcgcacgcgcgctttaatcgacggcaacccgcgcggatggaaatacccggtcaaattggcgatacgcgcttggacttgcaagtttatgttgataattcaggttctatcagtgatctgatgctgcaacgattactggcacaggtggctactttaacccgattatttgcagcaaccatcaccgttaagccgtttgatgcaatcgtacagcctggtcaaacgtatcaggtgagtttgccacagcagattcgctttacgcgccgtggcggtggtggaaccgtttatcaaagtatttttgatgatttactaacacatcataagacgaatgcgacgaccttggcgctgatcttaacggatggccgtggtgaacggcacgtcgagtcacaccgttttacaaatgtgatttggttgttagcgcgggctgaagatcgattgtcgattgagccagcaatcggtcatgtagttaatttgaacttggaggatgaataatatggggacaccacttaatccagatgatatgcaatccttgttgacccatgaccgtcgttatcagcgggccagtgccatcttaacggatcagtggcaacgaatcatagccgatgaagatttggcttaccgacaacagattacgattgacgatttacagtttgctaaggcgttgctagctagtgagacgctgacaagtcaatttgaatttgaccattacgcgggtgtgcaacggttgcgacaacattatggtagtcaattgacgagctcagcacagcactggttagtgcaaaaatatttataagtcaatcgctagttatgacccaaaagtatgactgtgacttatatatagatgaaaaaataaagcaagcttttcccaaaatgttcgggagaagcttgcttattttatgcgctgattaactgctttaggttcaacgacgtgctagaaaagccatccaggcttgttgctgcgcttgaatatctggctgactgccttgacggagtcgcgtttgaaggccaatgcgggcttctagcagtgcctgagctaatgtcatactggactgattattgataatttgctcgttagcttgacctttgaggatgaccgcagccatgagggtcaggtagtcgtcataaaaccagctgacggcttgctgaacatcagtatcagtagtaccaaattcagcgacggcgttagccattaggtcaccggctgtttgttcggctgtcgttaaatcgtggctaaagagcatactcaggatagctaagggggcggcaccatcctgctctaagcgttgcattgcttgggtacaacgcattaaagtttgttggtgatagcgctggagtgcacgcaggtaaagtgtgtgcttgtccccgatagcgttatataaactttgcttcttgacgccactagttattacgatttcgtccatggaagtatgataatagccttgctgccaaaataagtgcatgattttttcgataacttgatcgtcttgaaatgtctttttagcgggcatgattcgaaccgcctttctggttaaaaataagtgttttaagtataccacagcacacttcattgtttggtaaatgaatattaacgtttgaaattatttgattagggggcttttactgtttttaaagccgattttaattagttgattgtgttgcactttaaaattgataaaagatttccacattaaatcgattacataattttataaattgaagataatttatgtaatagcttgctgttacaacgatattctaaatatatataggatttcaatatttataattatcaaaatttttaacttatgtgtggcctcatcaaagtctaacgataatataatgttgacggtttgtttagttgaacacgccaactagttggacctaatcggataaatgaaagcagtaggaaagcttgccgttaaactgattacagtagtttatattaaaatatttgtaatcactataatattaaaaatggctcagaagtccgttaaaataggaattttaatcaatagttaaggggtgtcatcaattgacagcgattccaaaaccatgatatattttcgttgctgatagggttactcacaacgattcactattggtactaagcgttaataatgatactaagcttaagtcaatatctggaaaggatgtggtcatattaattggatgggcagctttcaagacttaggtattagtcagctagtcaagttaccactagtagctgatacgcaatcaggcacttaccacttaacgatcacttctaattcaggtggcaatgcggcggccgataaaattgcgagcccgctacaaggtgtattaccgcaaatgaatgggacccagcaatggattctgttcggtatcggcgtatgtgaacttagtttattaatattattaattctaatctggtggcgcaaccgtcaaacaataaaggagcaaccaaaatgaaaaaatatctcggaactctcgttgcaggcatgacactaatggcaggattaccacttgttggccaagctgcagatacggagacaacgaccaaagctgaagttgaattaatccaggatgacactaataaagatattaccttggatcaagcacctggtgttagctttgggaccgaaaaaatcactaatgacagtaaaacctatgatgctaagaacgttactggcgacttgaaagtgaccaactctgggaatacggacggatggttagtacaagttaaaggttcgaagttcatgaatgcagatgatactcgtgaattacggggcgccgcgttaacttttgcacaagttaatgcaactgcggatgatgctaataacatctctaaagcaaaagcttataaagtggatatcactgaccaaaatcaaattatcatggacgcagaagctaatgaagggatcggtaagtttacgagtaagtatgcaaccaatgaagttagcctgttgatccctgctggtaacgcggctggcgcttacacttcaaccttgacatggacattaggtaacgcccctagctaaccagttaatgcgccagaggagaactgaggtgtgaccgatgaaaaagggattgttggtaacaggtcggttattaatgactgtgataggttgtctcatcattagtaactggggctggtttatcgcaacgcaagctgcaacgacacagtcacaggtgcaggtagaaatgaccccctcggatgatgacaatgcagtttctccggtcgaccctgatgatcccagtaaaccatacccgggtgacccggtcgatgaagacaatgtcgctggtacgggctcacggggaaagttaaccattgatttcgtcagtaatttgaaattcaatgcaattacgaccgcgggtgggccgtttaagacgactgccaagaatgagcgggcgatgattcaaataactgatcgccgcgccacggctgctggatggacgttacaggtcacgccaagcgggttgcaaagtggtcagcagaccttaacgacgtctttaaaattaggcgcagtccaattacggcccggtgctggcaatgttagtactgcacctaacgttgttaatactggtgaattagttgctggtttagcgaataatgtcgtgattgccccgcctaatactggtctaggtacttggctggtcgttctgaatcgcgggcaggtacccacggaacttgaagtccatgatcgccaattgcgtgctggcgactacacgggtacgctggcttggtcattaacgaacgcacctagttaattaaatggtttgatgtgaagctgctacttgtaaagaatggcagcttcaatcatacatagctcgtcacttaccgttgaataaaggaagggtaaagcctatgaaaaaaatattttggcagttaattgccgttgtgagcatcgttatggcaggtttgacaatgactgctagagcggatgacctcaattacacggtccaggctgatttgcctgataaccaaattaatcaaaaagtgtcctattttgacttgaaggtcacaccagggcaaacgcaaaatctcactttaaccattaaaaatagtgatagtaaagaacatcgatacacggtatcacctaatctggcggttacaaataataacggtatcatcgattacagccaagcaaaggctaaggccgatgactccttgaagtttaacatcaagacagcactttcaaagtcacaggtcgtgaccgttcccgctaagtcaagcaaaaaagtcactattaaattgacggtacccgagaaaaagtttgcgggcgtggcgctgggtggaatcaatatcatccaggaactcagtaccaaggcgaaacaatctagtagtggcatggccatcaataatcaatatgcgtacgtgattggcttgcagttacgtgaatctgatccaagcggaatcaaacctgtgatgaagttgcacgcagtaaaagccaagcaacgtaactatcgtaattacgttacggctaatctgcaaaacaaccagcccgttattatgcatggcttaaagatcaaaagctacgtgactaaagctggttcgtctaaaaaattattgacgacgactaaggaaaacatgtcaatggcgccgaatagtaattttgactttgcagttggtgacgggacgcaacaattgaaggcgggcaagtacactttacatttaacggcaacggctgataagggtaagtggcaatttacaaagaactttaccattactgataaagaagctcagactttaaatgatacagctgttacagaaaaacaatcgaactatttctggtggtttgttgcgttgggcgcactgattgttgtcctattaggcgcaattatctggctactattgaaaaaccgccgtcgtcaggactaactagcgagaggagttttcaacatgtggaagggaccgaaacaaatactagttgcattaactgcattaatgggattatgggccgggaccgcccaaattcaggctgctgacgaagcgacgttggcaacggcaccgtctggcctgaatcagttggataaactctttacgctaccagcggcattcagtagtggcattagtaatagtgcgaatattgggaatgtgaccaatgcaagctcgccaaatacgcaggccgttcaggttattaacggcaagaagcaagtgggtggcttttggtcgaacgacgccaatcgcctagatttaaataaagatgctacgtttaaaatgtgggtgtatttgggaacatccacgagtactagtaaggccggcgatgggatggcttttgtcttacaaaatgatccaaatggtactgccgcatccgcacaagtcagttcgtccagcattattggtgagacactcggtgtttggggtgttgatacggataataaattgaaggacggcgaagaatttgcgaaaacggccatccaaaatagttgggccttagagtttgatacctataccaatacttcaactagctatagtaatgctggtaatggtgattcgtttgatgatggtattaagaaacaacacattgcgaccgggtatcctgggctggctagtcagtatgaaaatcagtctgtcaggagtttagacgttaccgggataatttggtcaacccggtactactttacgcaaaaacataccaacctagtgacgaatatgtcattaggagatagcaagtggcaccacctggtgatggactggcatgcggcgactaaaacgatgacgtacacttataatgacatcaatccagatgggtcggcgacgggtagcggctttactcagagtgaagtgttagatactagccaattcaacagtagtgatggcctggttcgctggggattcatgggggcgactggtagtaattctggtaataacatggtcgtgattgaaagcgcgccgaatttagttgacgtacaggcggcggttaaggttacggataagaccaagaatcgtgaaatcaagacaggcggccagctcaaagctcagcataaagttcagtacgactatcaattgacttaccaaggtggtcaaattgactgggataacattacggctgaactcaatctaccacagcatattacgtttgacagtgccaaggtaacgtatgcggatggtagtgagcagactttgacggcgccaacgagtagtgatactaaagttgactatactctagataaagcagtatcggctagtcaaccgaccgcgacgatcacgctcaatgggacggccgagaatgtcgttgtcaatgaacagacaactgcaacgacggcgacatttaaaaataaggtgtttgaaacaacgacggaagcaccggattatatgattacagtcgatcagccgctataccttaaaattcgtaatagtccgtatactgtcgccaatggggaagacgtgatcatcagagggattgttgcagccgaggattcggaacaattaactaacggtcaagtgacactacacccaacgcttaatggcaaggaaatgccaacggttcaaatgtcggatgatgacgaacaaggttacttctactacaaggtcaaagcagaggatttacacgtcggtgatgacaatgagattgaactatgggcatctgaccgttacgagaacgtctcaccagttgataaagcgcagattattgttactgcaggtgaacttggttttaagacggttgccaaaagcagcacgtttaaaaccattactttagatggttcggctcaaacgacagaccgggaagacgattggcaactagttgtacgggatagtcgtggtaagggctctagttggcaactacaagctagtgcgactaattttaaaacaaccggtggtcagaatttggcgggcgacgtgattttccgcgacggcgagcagacgaccacgctgaattctgcgggtacggtgattgacagtcacacggctactagtgataacgatgattatgatgtcttggcagactggacgaataagtcaggcattttatatcaaagcaatgcgggagctactccgggttcttacacgggggatattacgtggacgttaacagatgcacctaagtaatgatcgggttggtataagagaatcaaaagcactcacacgcaagattgtgagtgcttttgctttctagttattagccataatggttaaagataataataattttaattaccacagttaagtgaatgaataatcagcctgaatgactgagaacgttgtaatcaaggcatttttttatcgtgtgattagtgaagtatttacacttttttacgtgtttttggttgcgttttctttttactttagtacaatgtaattgttaccaaatacatgttgcacaagcatgattgtgaatataaacacatttaaggagcgatttaaaaatgaaagttattgtaattggttgtacccatgccggcactgctgccgttaatcagattttagcatcaaatccagatactgaagtgacgatttatgaaagaaatgacaatgtctcgttcctatcctgtgggatcgcactttaccttggcggccaagttgctgatcctcaaggcctattttattccagtcctgaacagttagctaagttaggcgcaactgttcatatgcaacatgatgtgacggatgtgaatactgacaaacatgaaattacggttactgacttaaagactggtgaatctaagactgatcactatgacaagttagttgtcactactggttcatggcctgttattccaccaattgacggcatcgatagtcccaatgtctacttatgcaagaactggacgcacgctcagaatttatgggaagcagccaaaccagctaagcgggtcattgtgatcggtggcggttatatcggtactgaattagttgaagcttaccagaagcaaggtaaggaagtcacactaattgatggtttaccacggattttaaataaatacttagacaaagaattcactgaccgggttgaacaagactttgttgatcacggtatcaagatggctttgaatcaaatggtgcaaggcttcagtgatgatggtaaagaagttacggtcaagactgacaagggcagctacacagccgacatggcgattctttgtgttggcttccggccaaataccggcttactcaagggtaaggtcgatatgaacgctaatggctcgatcaagaccaatgactacatgcaaacttctgatccagacatttacggtgctggtgactcggttgctgttcactataatccaactaagaaagatgcttatatcccattagcaacgaatgcggttcgccaaggaaccttagttggtttgaacatcttcaagccaacgcggaagtacatggggacacaatcaacttctgggttaatgttgttcggccaaaccatcgtttcatctgggatgaccctagaacatgcacaggccgaaaatgttccggcagccgctgtcacttttgaagacaactaccggccagaatttatgccaaccactaagcctgttttaatgcaattggtttacagtcctgaaactcgcgaaatcctaggtgcacaattcatgagtgaacatgatgtttcacaatcagccaatgtgatttcagtgatgattcaaaatcacaataccattgacgacttagggttcgtagatatgttcttccaaccaatttacgaccggccatttaactatttgaacttacttggtcaagcagcgattgcccatgcggccgaagctgtcactgaataataagttaaaataacgcgatgcttaccttgcttcatgaaggtagcatcgcgttatttgtttattggtgataattgaatgttaagtggtcggtggtactaaagttaaggccagccagtatttgtgccattaggtcatcgtgctttggtaaaatcaatgtgagttggttcaactttaactcaacggtaccaaatgccaccaaccgttctaagatttccctgagcgtagttacttgctgataagtagcagtcaggtcaacactgagagttgcttcatgcttagccgtatcgattggggcaaagccgacctgaccgacgaacgcgttcgtgtctcgatccgttacgccccaaacaagctggtggtcatgaaaaatctcgcgcatggtgtggttaatttgtgcagcggttgtttccatagtggctgtcgcattgctggtctgatataagttgaaaacgtcgataacgcgcacctttgttaaccaatcgaacgtatagtgtggcgttagaatgggatgatacttttcaaattgtgacatagtgcctcctttaaaatgcgtcatgaatatttagtaattcctattgtactagttaaactgttatgaatcatgattaaaacgtgccattttttgagttcaaaatcagccagtttaggttcgctggaaacagttcgagttagcgtaaacttgcttagttagttcgtcctacgccgacttccaggcatttctgccaattgccggaacgcagtggacacagatttaagccgaagaccacgtcttaaatactggtcttccactaaccaagccaaggacgcttgctaagtggaatttcaccgctgagcattggccgaaacgccttccagtcgggacagtattcgaatggcggacatgtgcgtactcagtttttgatggctttgtcgttgtttcttataaacagtaattttgtcaatcaactgttaggctaaaaatgatattgtgatagctcgttattctgaatcgccgtagtaacaactgaacgttttggcaaagtgaagaaggcactctgatatttcacctaaagttccaatatcaaaatagccaacgacaaattgtaccaagttaagtggctgttcatctgccattcgagcggcttaccgaccggaggggttgggtgacaatgctcagtagccaaattattcttagtcggaagtgggttgcttccggcttagaataagactcgtatttgagatgacgcgggctgggcgttagctcaaatcgacgtcggcttacgttccagcaattgtcacccagccccggaggtcggaataggacactcaccggctgacgaacagtaagccaactaaatggcacgttttaatcatagttaatgctagttgttttcgatggttaccagtgtccaaatatgctgatttaagcgtcaagtggactgggattgccttgttgatgaccctcgctgaaaatggcgttaggtcgactaataacgcgtctgctggtgtgatttgcggtgcagtcgtgattgagactgggtcacagtccaataacgatgtaacggcatcagacgacagttctattgtaatatactaacgcgtaatttgaatgaataagacccataatgatggaacagataaaagaccgactaacaagcaatcgcaccgcttgttagtcggtcttagtgttcattgattaaagctttttaccagattttgacccgcttatctggtgccaaatacatggcatcgtcgggttgaatgtcgaaggttgtgtagaaatcatctaagttcttaggttgtacgtttgctcggagcttagctggagcgtggacgtcgattgaaagtaagagttgcatgtattcagtcgtggccttcatacgccaaaccatggcccagttagtgaagaacgcactcaaatcaacgtcatcttcgcccttagcagcttcttccgcgcaacttaagcctcccgcatcggcgatgttttcggatacggtcaacgtcccgttaactttcgcaccagcaaagtctaagccatcgaattcactgatcatggacttggcaagttccttgaagtgggcagaatcttcctcggtccaccaattatgcaagttaccgaattcatcaaatagggcaccattgttgtcaaaagcgtgcgagatttcatgagcaataactgcaccaataccaccatagttagcgctagaagattgttctaagctgtagaaaggtgcttgtaggatagcagctggaaagacaataatgttcataaatgggtggtagtaagcattgacggtgtccgcactcatttcccaacgggtccgatcagtggcttcgccccactttgagaacatgtcttggcgtgccaaacggttaaagtggaggacattgctcaatacgttgccaccttgttcgggcgtgtgcgtcttgaatttcgtgtaaatcgtttctagtttatcagggtaaccgacttgaatgccgagtttatcaagcttggtcacggctttagcacgcgtatctgcgctgagccaagtgttcgcttgcaaccggcgtttgtagacggcaatcatcttttcgaccatctgatgaacgtccgctttggccgcttcaccaaaatacttgtggccgtaatagagtccaacgacttgatcaaaagttccggtagctagatagtaggcactcttagcttggttccgcggttctttttgaccagacaatgcccgtgaataagtcgtggctaatacccgcatttcatcactgaggtaaccactgtaccgttgaacgagtttagctttcatccagttcttcatcagaccgaagttatcaggattgactacttcgttaaagtgatcgaagaaggcgggttctggcaagatgacgaggtcgggattaccatcgatgacggagtaggtgatggcggctaagtctaaataacgactagtgttaacaaaatcgttgaatttgcgaggattatacatcttactgtaatcagccgactcttcagcggatttgatccacggaacgatcaaacgatcgaattgcagcgtgtcatcaacgattttttgtgcttcgtccttttcgtaaccagttttttgcaacagttcggtcatcattttagcgtaaattgctagtaacttagggccggcctggttgccttcgtcgtagtatgtcttgtcgggcaagatagtcccaggtgcttgggcaaataaggcgttgaccttggtatttttcatatcagcgtcgacatccaagctgaatggtaatgggaggccgtcgtagatccaatcgggcatccgttgttgtaagtcagcaaagtcgcttaaactatcaatttgcttgagacacggcagaattggttccgcaccattggcattgcgttggtcgaaatctttagctaagcggtaaaacttaatgaattcggttagctgaggatcgtcgggggtaactgttcccgccgccattgcatcaaagtcatgcattaacgttttttcaatggcatcaactaagtccataaagcccccggttgaagaatggtcatccggaatgacggcggttttgagccactcgccgttgacggcatcgtagagatcttgttttactgctgcttgattaatggttgccattaaatccactccctaataaattttctaatactaagttaattataccttagattattctcagtggtatcatctggtaccgactcagtaaaaaatgatactaatcatcttaatagtcctgaatcagtagctgatgggttgtgaatgttaatgtaaaggtcaagattacttctgaattatcggcatgcaggagctgttagtgcctgtaaatcaccttatgaggcagcgtgatggttgacgtaaaagcccccggatgactaacagtgatttcgctagtcatccgggggaagggataatttaattagtagtcattattcagttaataatagctggtcggcatcgttaatttcgatgaccttgccaggcttttgcgtaattaggccttgacgctcgaataaggcgagcttacggctaatgctttcaggggtggtgccgaggaacgtcgccaggtcctttttctttaatggtagtttaaacgtgtcggttttgagcgctgccgctgtttcagtgatatagttcgctaaacgggcttcgacggattcagtggccgtgctggttgtttgacgctccagttgactgagacgtttgccaaagacgtttaagacgttgatgctgatactgggatatttttgcatcaagtcttgaaagtctgaacggcgaatactgcaaacatccgtcggtactaaggcttcaccgaatgaggttcgccgttgattttcaaataaggcagcttcgccatcgatatcaccagtttgtaatagatatagtaactgctcgcgaccattggcagctagctgatagactttaacctgcccattggcaacaatcatcagtgaatccagtggatcgtcagcaccaaataaagtgctgccggctggatagtggtggtgacgaacgatcgattcgatagtgtctaattgttcactaccgagttcgctaaaaattgggactaactgcacacattcatgttctgccataaggcccacctcctgaataaattcaccctaactataacagattttgcttggtagatagggtttgacgttttaaatttcctactgttttaataactatattgtagcgtaaaacttttttgaatttcttgacggccgtcaagttctggtcaatcaaatccggttatgatagaaccatcaaatgaacgacacggaggtaattgattatgaaaattattatgcaattaggaacgttgacttgcccatcatgcatgaccaagatcgaaaaggccgttgctaaccatgacggcgttgagaatgttaaggtgctattcaatgccagcaaggtcaaggctaactttgatcctgaagtgacgaatgccgatgatttggcacaagttgttaccggacttggttacgaagttgaaaacgtcaaggttaagtaggaggaataaacgatgagtgaactaacgatcgacgaacaatacgcagcggaattaaaacagagtgacattgatcaccatgtcccaacagcgggcgcaatgacgaatcacattttatctaacttaatggttgcttacgttaagttgacccaagtgaagtggtacgttaaaggaccacaatcattggcattgcggacagcatatcaacgtttgttagatcagaatgtccgtcagtttgctgaattaggcgaattactcctagatgaaaaccagaagccatcttccacaacggctgaattaaccaagtattccatgttggaagaaaatggggctttcaagtatcaatctgttgatgaactcgtggccgcaacaatcaaggattttgatacggaaaacctattcgttgaccgggctatcaagcttgctgaaaaagaaaaccggccggcactggcagcttggttagttgcttatcgtggcagtaacaatcgcaatattcgggaattacaagcttatcttggtaacgatgctcgaactggtttggatgaagaagatgaggatgacaacgattaggtcgttgtcgctgaagaattaaacgctctggatagcgattgtgtgggcaaactatccagggcgtttttgctattacaacgggcctgcgctatactaacgacaattaaattatatgggagggcccgagatggcgattagcgatattgtgatgtggacatttgtctttattattgcgactgggttcgtaacggtggtttcaacggcggtactgttgaagcgagcaaaacgagcgcccaaggatgccgagcagtcccacagtgatgacgacgatgactggaaaaaagatgattggaaccatgatgactggaaaaagggcgattggaaagattgactcgataagttgcctgacagatacggtgcttaactgagtcaactggcactaaaaagacggtataaccaactgagattggcgacaccgtcttttttggcgttatttggtttttagcagtagatccaaggagtgttcaagattctgaacatcagccgtggtcatcgcatctacacaattattaatattacgggcgatgacgagtttcatggccttgtcgatacttgatttcactgctgaaagttgaactaagacatcttcgcaaggacgattttcgtccatcatacgtaaaacgccgtccagttgaccagccgagcgtttcagccgggtcttgatctgcttgctagtgacatattcttcagtagttgccatgattcatgatgcccccttcgtaattaggcaagtacttttttgagttcggcttcaaaatcaggcttaggacgtgctccgaccatgtgactgacgacttggccatctttcttaatcaggaaggttggaattccttgaacttggaattgactggccgtagcttggtcatggtcaatgttcaatgaaacgaagttgacctggtccttgtaagcggggtcttcagaaagggacttaagaattgggtccatcatgcgacatggtgggcaccagtccgcgcgaaaatcaataacggcgataccagtatctgtttctttggcaaaatcttgatcatgtatttctttaatcattttagttgactcctttagtaagtatttgtcactaaacaatatacccccataggtatacacgagcaagtattctgcttctggccgtggagggatttaaaaaggactgatgtattgggtaattagataataacgatttgttgtggaagctagcgtcacctgagaatcttctagttgtgatcgcgagcattaacgttgaagatctcatgttgacgcgagcgtgttatactagcgcttcataattatacaacccagggtatctggtagaattatgttgaattattagaaaccgcttatttaagcaaaataaagcgtttacataaacggttttatctggtatcttcaaattatcatagatgctcggtaccttacgaggaggatttacagatgacaggttcatgggaagcacgctacgccgctgaattttttggcacgctgatcctagtactactaggtaatggtgctgtcgctaacgcattcctgaagaacacgactggtaacgatgatccaggactcgccaatggaggatggctcctggttgcatcgggatatggactgggggtcatgctcccagccatgatgtttggctcgatttctggtaaccatttaaaccccgcgattacgattgggcaagccgtgattggaatctttccctggacgcacgttgcgccttacttacaatttctaggagcaattgcaggccaatgcttgattttggcactgtactggccccattatcggcaaacgactgataatgaggcagtcttagggacgtttgcaactagtgatcatgcgaacagtcagttaaacggttttgttacggaaatggtaggaaccgcagtcctgatttttggtgccatgggattatatcgcgggatgttttttcatcaaaatatcgatatcgccaatattggcgttggacttttgattgctgccatggttatttcgttaggcggtccaaccggtccgaccctaaatccggcccgtgacttgggaccacggctagtacacgcgttattcccagtaccgaacaagggtagttctcactgggaatatagttgggttcccgtggttgccccaattgttggtgccgttattggaatttggatttataagatcttttttggtttataatcgcaattaattaaccgagcgtatttatgaaattattattggtctatcatttttgattgcaatatgataaaacggtccgccgactagctggggaagactagtcggcggaccgttattggttgctaggcctgtaaccaagttggggagacttgattaagctgtggctgcttgaatggttttagttggttggtgtttgtcgaacttggtttggaaattgattaaccgcatagcgttgaagataacgactaagatactagcttcatggacaaacatcccactggccatgtagatataaccgaagattagcccaatcagtaggaaggccacggtggcaatggcgatgaagatgttttcacgagtgttcaagacagtcttcttggcgagaccgtgggcgtgtactaatgcggggaagcttgattgcatcaagacgacatcggatgtgtcgatggcaacgtcagtcccactacccattgcgattccgatatcggcgttagcgattgaaggactgtcgttgatgccatctccaataaaggcgaccgtgttaccggctgcttttagtttcttaacgtattcgactttttcttctggtaagaggttggcgtgaacttcatctaggttcaattcgttggcaacggcttgagcggtgagttcattgtccccagttaacataacgagtttcttgattccttgggcttttaatgcggcgagggaatccttcacgcctggacgaatcgtatcggcaatcccgaagatgagttgaacttgtccgtcgactgccatgataacggttgattgaccaccagcttgtaaaccattgagatctttgagttgggtaggatttagtttgatattatgagccgtcaacattttttgattaccaatgacaacttcttgttgaccgacttgtgcacagattccttgacccttaacggtttcagtgtcatctaggacgggagagacccccgctgactgctggtcggcataactgacgattgcttggcctaacggatggtcggaaacgccctcaatagcggcagcgagagctagttgattatccgcgttgtttgtgtaagtgtgcatggttgtaacggcagtgttaccttccgttaaagtaccggtcttatcgaagaccagggtatcgactttggcaaaagtatcgacgacttcaccacccttgatcaggatgccgcgcttggcaccattcccgattccggcaacgtttgacactggggcgccgataactaaggcacctgggcaaccgagaaccagtaccgtgattgctaagcggaagtcacgggagaaggcgaagactaagactgctaaaacgaggacggcaggcgtataatattgagcaaagcggtcgatgaacttttcagctttggacttggtatcttgagcttcttcaaccaattcaataattttggcaaaagtcgtgtcgtcgccaacctgagtcgctttgatcttcagatagccattttcaaccattgttcctgaataaaccgaatcatcgagttgcttgttgatttggcgtgcttcacccgtaattgaggcttcgttaaggtaaccgttaccttcaacgacgatcccgtcaacgggaacctggctcccggttttaactaggacaacgtcaccttcgtccacatcatcaacgtcgacttcttcggtgccatcatcagtaactaaagttgcggtagttggtgacatgtcagtcaagcctttgattgcggtccgcgtcttctgcaaggtcttgctttcgagataggagccaaacaagaagaggaaagtaacgattgcggattcgttgaattcaccaataatgaatgccccaatcactgcgatactaactaacagttcaatactgaaaactttgttccgaagtgcgctccaagcacgaaccgcaatcggaatgacggcaataattgaagcaactgctaaaatgacttggtaaccgagcgtaaattgtaagagatatttactgagcatcccaaggacaatcagaatccccgtaactaatgtaatttgattcgtatgtttagtgagaaataattggaatttcataatttgcaactccttatttgatttgatgaccctagtatagtgagttcagcttgatggcaacttgataggcgtcaagttttgcaaaataacagtattaattctggattgctggcagtgattatgattaaaacatgccattttttaaattcaaaagcagccagcttagacccactggaaacagttcgggttagcgtaaacctgcttagttcgttcgtcctacgccgacctccaggcatttctgccaattgccggaacgtggtgggcacagattcgagccgaaaaaacacgtcttaaatactggcctttcactaaccaagcaaaggacgcttgctaagtgaaatttcaccactgggcattgtcagaaacgccttccagtcgggacagtattcgaatggcagacggagatgtacccaacttttattggactcatcatttttctttataaacagtaattttgtcgagcaactgtcaggtagaaggtaacattttgatagctcactatttcgaaatcactatagtaataatcgaacgtctcgacaaagtggttaatgtaaccttaaagtctcgtttaaaattccattatcaaaatagtcaacgaccaattgtaccaagttaagtggccgttcatctgccattcgagcggcttcccgactggaggggctggatgacaatgctcagtagccaaattattcttagtcggaagtgcctttcttccggcttagaataagactcgtatttgagatgacgcggtttgtgcgttaactcaaatcgacgtcggctgcgttccagcaattgtcatccagccccggaggtcggaatagaacgctcaccggctgacgaacagtaagccaactaaatggcatgttttaatcatgtttcatgacaagttaacggaagaataggtaggatgatcaagtttgagtaaacaagaggtataggagggaaaaacgtggattatcaaataacgcaggcaaatcagcccttgatgccggcatactttcaggggcgttgggcggtcaagcaaattgcggatcgagacgtgatgtatagcactaatttgggtgctgaaatcgattttcaagtcactgatgctagttttgtgcggttgacattcttgccgttggcgtatgagctaccgagttgggtggcgattcagattgatggcttgccttttcaacggcaggcggtgacgaatgaccccctatggttgacactggatggtcggccccacgtggtacgggtagttttgagtggtaatactgatgaggaccgtgtgtgggatggcaatcaaggttttgcagtgaaagccctgacgacagatggtgagttacagccagttcagttaggccgacacagcgtgacgtggattggggattcactgacggccggctgctgggtcatgggtaagcaacctgccgaagattatcgcgcggaagctaactatgcggcggttgcgagtgacttgttgaatgcacggaatgtccgcattgcttatagtgccgttggtctcagtaaaccaggaactggtggcgtaccggtactgccggaggttttaacagccgtggatagtaaaacgacgtggcaaccagtacccacggatttagttgtgattaatgtcggtactaatgatcggcatacggatgatacgacgttcacggtagttttgcgccgcttccttaatcaggtgcaggcgctttacccgaatagccggcttgctgtaatgatcccgtttaatcagaattttgcagcgattattcgtgcggtcgtggccgaatttatgcaattgcaactcattgaaacggctacttggcaactcagtaccacggacggggtgcatttagatttagctggctcccggatggcgggcgaattaacagcacaagcgttgcggacacagtatccagatgtttttaaatcgtgatcaacccatcttataaaaatcccgttttactgtagcaatgttctgctgcagtgaaacgggattttttggtggcactactagattttaaaaataaacgttaacgctggcggtgtagtgattgcgactgtaaataccgggccgcagcgagcacttcttcgggaatatccacatgggcgatgaagccctgaccacggggaccataaccggtgggggtatccactaggcgttgaaattcaccgagtaagagttcagtaaaataagcgggttgccagccagctactattgtgtttggcgtaaagtgcattggttgtagccggtttaattgcaaggtcgccggcgcatagcgaataaagttggcattgggccaattggctgagaacgttagggtagtccgccgcgcgagtaacgggtcttgtacgagtagaacgtggcgccaatcggtgggggctaacgcgcgggcatgcgtggcattgctaccggtattggtagaagtcttgtcgaggcggatactaccttgatagccagtctttcgaacaagcgtcgccatcaactcagcctcactaacttgagattttggcaggtttaagttttgccgcaaatacttagtggcgtggccgataccgcccgcaataatgagtagtggtaattgatagtcttgggctaactggcccgctgcagtggctgttgctgggaggctgttgccacaaaggaccaggccatcgaggtgctcaggcaaggcggtggtgtgtgtcaaccaagccagacattgattgaaagcggtcagttcgtccaattacttggcctccttagtcccaaagtgagccgctgcggccccaaagttgaaccgttggaagtgaacattttgaaagcctgcttgctgaaacatcgttgctaattgttgatagcttgcaaagtgacgagtggtttcctgtaaataagaatattcctgatattgatgggcgaataagcgcccgaatagtgggactacttttgtgaaataccactgccagactggtttaatcaatggttgatcgggttgagacgtctctaagcagaccaagcgagcccccggttttagtacgcgataaatttcagttaaagcttgggctttatcaggcaagttgcggagtccgaagccaatcgtgacgaggtcaaaggtgttgtccttaaacggaagatgcatcgcattgccgcggcgcaaccagacccgatcggcaaccggttgctgggtcacttttttttgtgccagttttaacattggggctgaaaagtctaatccgatgacttcaccgggtgcctgtaattctttagccagcgcgatcgtccaatcacccgtaccacaacagaggtcgagaacatgggcgttaggcgctaaatggatttgggccatcgtttgcttgcgccaatgacgatgcgttccgagactgatgatgttattcatccgatcatagttcggcgcgatggtgtcgaacaaaccttggacattatgtaaatagcgatttgccataaatgatacctcctgatagttgctttacttactactatagcagatgttagttgccagttaccgtgaaaaggaatgataatcaatataaagctacgatattgatttcgttgctgttaatattgttcgtgaataaaccgttaaactaaagttaaaataacataaaggcagtctcgattggtatttattaagtaccaagcaagactgccttttttgacagcgcgttcctaatcgaagccttaacgtcaaaacgagtacgctagtaatagcttaaaaatcatcatctgcaatttgagctaacaggtcacgtgatggaatgaagaacgcttgtccggatagtaaggtggagaaagttagtaaaaagtcactttggtcgaccatgttttgcagcatgcctttggtaaccgtccagtgacgggcataaccaatgaagtacgtccctgtgttaccagctgctggattggagtacgggacattcatccgaacgattttttgttcgacaccatcaatttccaattttgaagcaacgttgtgagcattcttaaacttgtctgcgtcttctaactcgaagtcgctgaatttttcacggcccacggctttttcctgatcctcggtgtgcatatgttcccacacgggcatatcatgttgccatttctgtgcaaaggcgtaagaaccgttgatgaattggggatcttcgtcaccaactaaggcataatcagcggcatcttctacggccggcgcttccgtaccgtcgataaagccaatgatggcccggccctcgaagtaacgaaagcccttcgtctcatcgaggacggtcgtgattggcgctaaaacccgctggaactgcgtttggcattcgtagacgaccgcttcgttgcttgcgcgaatgtggaagaagaggtcgccgggtgttgctggcatagtgtatttgggtccacttaaggtggtgtaagtttctaattctttaggtttgggtgccagtttcaggtttggcgtctcggatgcgtaacgagcgaatgatggcttgtgaccgatctgcaaattcttgaaagacttcacggtcgtgttgctgatcctgacgatttaattgaagaacggtaaattgaacgtgttcaccgacatctttccagacatcttgggcgcgatttggattgatttgcatggtatatttcctccataaattgtttgatattgttagtgtacatggtggtacggttagcgtcaaataaaggcaaacggtgggtgtggataatgacgacattcgccagcatcaggggtaggcggccaaactaacgtggtattaaaacatgagtaataatgattatcaaataagcgcaaagctagtttcaaatttgaaactgtattagtgggtcctgtgagctatagctcacaggacccactaataatttaacaaaaatgaaactttatctgtcctaattgcggataattgtaattaaatatctgtgtaattactaagtaacttgtaattcatcgtttttagtaagggatagtttgagacatttagacggctattacaagtatattaataactaaacggattagtcagttggaattgttggtgcttgtaagacattaggaattaattgaataaatagccggtaagtctcaattctgctgagtgttggctgcgtggtcgcaagttgccaagctaactggtgaagacagttgccaagataggttgccataaaatgccgttgcttaggatggatggctaagctagttagcagctgttgggcaaaaccaacttctaatgggatgacccgatcgcgacactgtgcccatgacacgagtaaggggagatccagatgtgcgcgaagcgtcgtgacgattacaccagcaatggttgcgtaagatgtggtcgttaagtcatttaacgcttgtcctaactgttgtaaggcaattaagtattcaatcacgatgatatcttcaatatcctggtgatgacgataaaaagtggcacgtccaacgtgggcatccagacaaagttgtttgacagtcaactcgttgaaggtcttttgagccttgaaattcgcttgcagggcagtaatcaatttacgatgagtttgatgagttcgctgatcaatatgcaattgattgttcataattaattttgtcatatgtcaatgatacaccaacttgtgatatgtctcaaaacgtcccttttttagcatgtgaaagcgtctataatagctgtcacagttagatatagctgaccaattaaggagattgtcgactaatgaaattaattaccgttgaagagcattttgaatcggcagctgtgactgccgcaatgcgtcaagctgttggtaacgctgcgttaccaacagttagtccagcgctacgccagtacatgcgtgacaatttaccgagtcctgcaattatgcaagacacccagcatgaacgactggcatttatggctcagtacgcctgtcgttcatctgaatggtaataaggcatacgtggaactaccaactacgacgcatatgcgcatgatggtcaatggtactttagcggaattagaatcatatcggcgactgatttaccgtgtcgaacgccgtgatactaagtggaagattagtcgattgacctcaattaacgaaagtgataatttacgaccagtcattgcgggacagaatttacacgtgatacctcaagattttaacggtttacggccctcgtatcaattcctggcctatgtccgacaagctgccggtggtcaaattagtcaggacttattagggacggatcgaccagaagaagttgagcgattgtacaaggaaacgagtgcgtggttgcgagctggagtatagttgaaggtaaaataaaaaaagcgatatcatgtaaaatcaaatacttttagcaccttgtaaccagcaataaaaataatttagtacattcgttaaaacaacagaccgttactttgataaacacaagtaaatgatggtccaaaaaataaggtgtgttgtaatcaatttcgattgcaacacaccttaattttcgacgtctattaatatggaccctaccggatttgaaccgacgacctcctgcatgcgaagcaggcgctctcccaactgagctaagggcccaatacaacttttagtataccgcaaaatgctagtcgtgcaagtctagtttcgttatcaatggcggctagcacgatgattttgattaccacgaattttatgcactcgtcgtttgtactgtgctttttggttgctgacaaacttgaagtgttgcattttgccgccgaaaacttgcccattcagccttaattttagccaatcttgcatgacggccatcattgaattaatttgggtgatacgtaatttgtcgtgttgttgttgtgctagtggtaataaattagtagctaactggttaactaatttctgatggtaggccattaattcgggtgttaatggggcatcagtataagtattaaataatttttgaattgtttgaagcgcatctttgatgtcggttggttgataataacgatcgtctgtattcgtcaagttaatttcccctttgtcattttagtatagcaaattttatttaaaaagcatggtttagcgtggtcaaagtcagcgatggcggttacaatagggataaatttaggaggtgcgcatcatgaccacagtaaccgcattggaaactcaagcaggccaagtcttggatcagtcctacgcccagtttaaacaagcccagttggcgctgggcaaagagcagatatttgctaacgctgctcagatttttactgttggtgaaattgctgctgcgacacggcaatatttatttgacgaagagatcgcacagcaagtgatcaagttgcaagaccaggtattaccgaccatgtatcaacagggacaaagtggcgaattcttgaagttgaactttacgggtaatgatattcgatggctattaggattaccgcgaacgcatcatcgccaacgaatatctaaatagtccaaattaaccgaacgtttggtcgtaattaaattgaaatttaaccgaatttccaggaattgtcactggaaattcggctttttaaaataaaaataactttttttcgtcaaagttgctaaatggtctcaaattttagtaataaaacgatgccgatatgatagggtttcagcgcggaaatgttacgatggctaattattgttacggttttgtaactttcgtaacatattgttattttgctggtattggtatgtaacacaaattgagtagtatagacgttggcttgaagtacatacgtgacattctttttggagtgatcattattaaagtgaaagtaaatattaaacaagtgatgttaggaactgctgctttagctggtatgttagttactagtcaagcagttgccaatgccgattcaatgacaatcaaagcaggggacactgtttgggcatacgcacaaaagtacaatgtttctgttgacaagattgctgaagctaatggtttaagcaatcctaatatgattattgctggtaagaccatcaatattcctggtgttaagaccggtgaaaaggttacggctaagaagaccgctgctagtgcaagcagtgccaagtcgactagtgctgcaacttcaacgagttcacaagctgctagttcaactactagtgctgctgcaaccagctcatcaactactagtgcaagtagtacgagccaagcagtatcaagtagctcagtagctgcgcaatcgagtagtacttcaactgctagtgcaagcagtgtaacttcaagtgcttcaacgagttcagtagtttcacaagctagttcaagtgctgtaactagttcagcaacttcacaaagctctgctagccaaagttcagcttcacaagcatcacaaagctcaacttcagtagcatcgtctactagcacgcaatcagctgctacttcaacgagttcacaagctagctcaactgcaagtaacacaacaacgaacagttcatcaacaacgactgctgctgcaacagcctaccgtgcttcagcaacaactagttcaactgcatcatacagttcagtaattgctgctggcaagactttcattggcacaccttacgaacaaatggattgctctgcattcacgcaagctgcctttgctaaggttggtcgttcaattggtcggactacttatgcccaagcaacgattggtactcacgtatcattcagccaagcacaagctggcgacttggtcttctggggttctgattcagcaccttaccacgttgggatttacttaggcggtggccaatacatcgcatcaccaacttaccgcgaatctgtttcaattaagagcactgcttactatacaccaagctttgctatccacatgtaattaacgttccttaaatggacaaatagcatcatcttagttcgtcagaattaggatgatgctatttttgtatgcgtgagcgatattaattgttttctggagtttggctactttattcaaaataacgtgatgatttagtgtgtgaatccgtatttcttaggtgccgcgtcatgatgatagacaatgtgggcttggtttaagtcatggacagccttggtcaggtcatccatgaaatcgtgggccatattcatgccaaagtcagcccgaacgacgattcgttggatgacttgttgttccaggttagcaggtaaaggatacgttggtacttgccaaccgttcattaataggcgatccgataaatcataaagggtccattcgcgatcttcgcgcggggctagttggtaacaaatcagagggagttggtgtccgttattgatcatcttaaactcaccaactttatccagagcggctgccaggtagcgggcaacatcgtgagtctttgtttgaatctcgcggtaaccgtccataccgaagcgaatgaaattatagtattgtccaatgagctgggctgcgctatgtgagaagttgatcgccattgtcggcaactccccacctaaataactaactttgaagactaattctggcggtaaaaactgacgatcacgccaaacgacccagccgaccccgggataaactaaaccgtacttgtgcccggaggcgttgatcgaaacgacgttagccaaccggaagtcccagatgagttgcggctcaataaatggggtatagaagccacctgacgctgcgtcaacgtgaatgtagactggtaatttgggatgctgatgattgtagtgagtaacgaccttatcgagtgcggctaggtcgtcatattgaccggtataagtgatgcccatgataccgacgataccaattgtgtattcgtccacgtagtctaagacgtggttaacgtcaagggccatgtgttgctcatccattgggaccacgtgtatgtcaacgtcccagtagacacaaaacttttcccagcaaacttgatagccagccgaaataacgaggttaggtcgatgggcattcagatctaaacctgccgcttgagcgcgtttacgccaggcgaatttcattgctaaaccgcctaacatacaagcttcagaggagccaatcgtagaggtacccgtaaagtgttcgtcatcaggtgcgtgccacagattggcaataatgttcacacaccgattttcaatctcggccgtgcgggggtactcagatttgtcgatggcattcttagccagcgtatccttcatcaattcaacggcttcgggttccatataggtctgacaaaaagttgccaggttcagtcgtgaattgccttcatctaataattcatcacgaactaagcgatcggcttctcgaggggataatgaatgctttggtaaccgatacttaggaagatcatgttgttcagaaggcgcaccaaagactggttccaagtattcttcagcttcatgattgtgtttaccgtataacattgccatgttggtcacccttatctttataagttgtgccgagtatagcacgaggtgataacagggtaaattaaaatgcaatctggatggtaggtaacaaaaaaactggtcgaatggacgaccagtttttagtgaggatctttgccccaattaggctttatcgctgaactagcagttaagctttggctttgctattcatgaatttcttcaacagttgcaattcttcctgagttggcgttgcttcaccagatttaatgttgtgaatccgttcaactgataattgactgccaaacgcaaggtcgttatctgtaagatggtgctcgcgttcaaaactgatgagcttttctgataattgacttaatggtagttccatgctcctcaccccgatttttagaattcgtaaaagttcagtgccatatacctgctacttttattataaccttaattggtctgaagcggggaacgaataccatcctattttgtaattggttgttttaattgatcttgtaggtggactagaatatcagtaatctcatggggaagctggtcatgattgttgtgttgatattgatcaatgaagttagcccgaattcctaaacgagtggcgaccaagttacggtagtctgcattggcataatcaactgggaaatcagctaactttaggttttgcatgtgctccaagcctgcgaatgactcccacttggtcgtatcattgacaatggcttccagcgcacccaaggtaatttccttaggaatcttcttatcgccaaagaagccagtattcaataggtaacaatctaaatggcgttcttcgaagagtgccttgaaatcatggtaatcttctgatagtggatagaccctaaatgggtttgcaaatggttcgatcactagggcgttacggtcgacattaccaataatattttcggccgagctccgtttggtcgctaaagtggcgccgaatgtcgctgctaatacgggatcatctactttaatcacgggtggtaagctatcatctttcataatccagaagattgcattgatgggagcggcttccttatcaacccggttagtcgaagcgtaccgtgacttgatcgtccggccgttaccgttgcgtaggtcttcagtgacaaggaccttgcgaccctgatcgtctaaggtgacgccgacgttttggatcgtcataaaatacttggtctcatcggacgtcatcggatagtcattggttttgtcaaagtaagaaggctcgagggccacggaactaccatccttgcgattgatgacaaaggcgtcgtcgtggagaacggtgatatcgtatttatagccgtgtttagcgtgggttagtgttgacttaccggaacctgataacccgaacatggcgaagacttggtcttgcttgttcttgaagtggaaggccttcaagccaccgtgacaagcaacgaagccgtgacgatgggcgatcgaccaagctaaggtcaaagtcgatttcttcaactcaccaaagtatggcattcctagaatggcagccgtattatgttgcggatcaaaaatagccaggccgtctggataatctggatcatggtaagtagggtcagcgtaaatgtaaatatcgccttctggataggcaacggaccgatcgaacatttcttgataagcagtggtgatgggctggaagttaagcatgtaagaaagtagattattggcaaagccgtccggaatcgcgaggtgggcccgcacgatgaaatcttcgtctaaaccgactagaacgtccgtcgtgatgaagtccttgtgagcactagcaaatagtgcttggcgtaggcgtccggccatatcggcttcactaacgcccgggttgcctagaatccggcgcgcttgtgcggttcggccaacaaccttacctgtattggcaattaacatttttgcatcagctggtaagcctaaatccgttgcgcgatagattgggaggtccgtaataacggttccggggtccttggtggcgcggtggtaggcggcggcgacatcatcaacgtggtgcatattgttaccgtaaaaggccgtttcaacggtagaacggatctgtgaaaagatcggattatgacgaccgatatcggctaattgataagaatttttagtgctcatattgtagcctccctgcaagttgataagttaattttagcacaaactttcacataagaaagcgttttcttttttggctgatgaatagctgctagtgcgtttagacgattaagacgttaagccgcagtggttgttaactaacttgtagttggaagtactcgcggattttattgataagtaatgatcattttgatagttgaggctgttattaattaactttccaattaaattatcacttgcgttcaaagctatattagtatagtttattaaaagagaatgattgaaaatcagtgatagggaggcacctttcttgccacgaagaaggaacacgcaacggcgaatggagattgttaatacagcgtttcgcttgtttgccgagcaggggtatgcgaacgttcagatgaaggacattgccattgcctgtgatatcagtaagtcgttgctacaacactatttcccgaagaaaatcgttttattaagtacgatgttaaatgagttgacgcttagtgcttttatctatagtaatgaacagctgaccatgctgtcttcgtatcagcgaacaatgattcaaatgagctttgttttgcggatgttagatgaaaatccgaccatggaacactttattcaggacatcttcgagagtccggaactgacgactgagatggtgctagtgacactagactggctagaagctatcggcgtagaaggtgaagctgctatgattagatacgcgttgaacttcgcgttatctggtggtatggctgtttttttcaagcgtaaaattctaagagctagtgttggcatgattgcagaaaatatcgaccaagcgttttacttgttattaggtgagaatactgagaaaattgatcaaatttatttgagcacagccaagtataatactgactattattatcagcaattcatcacgtatctgcataaacacgcgacccttgacttgagtactgaaataaaaatttaatattaaagtaatctaaattacttgtatttcgtaaaatatactagtacactttaaagcggggaaatgataaacgacgcttactaatttatgaaaaaagtatggggcgaattatgattgggaatttaatgataattcgactagtgaaagggagacttgaataatgaatgaagatatggaattttttaatcgctttagccatatgtatttacatggctttaaaaacttatcagatatgtttgctgaacctgcaacggaacatgggattactttggatgaattttacattttatatgatattgctgaagcaaaaggtaagatccgtctgatggatattgccgaaagtcacggtgtgacgcgttcagcaatctcacgcttaattggtcgcttattacggaaagattacttatatcaagaagctgaagaccatgaccgtcgtaacaaagttttaaagttaacaccagaaggcgctcggattgaacatgaagtctttactgaattgattcaacgcaaccgggaatggcgtcaaagcttcagtttagctaaacaatatcagactttgaacttggttgaagagtttatggacaagtttgttaatgaagatgctagcaagcaaactaaaaagacaacgtatgctgatactgatttgaagcgggctgaagcttaattgggtgtcagttacaattaaagataattacaaaaacaaccctgttggcgtcttttggtgctaacagggttgtttttataatcattaatgaccactgatcgtgattcggaaatgatcaagacgataggtgctatgaagtctcgatggtaataggtgtcaagctggttgtttgcgctatcagatataatccgtgcttgtacttaaaataagacttattagtaattatttttggaaaaagtgagcgcttactgtttgtatagtagtcacattgattgggtgatttgtataaataagacgagcggacaaatactcgtcttactcatatgaactttggttgccttttaacctaatagcgcgttcaaggtttggttaggagcttgcttgatattgcagaattaatatcaagtttaagagtgattaaacttatatgcgaattttaaaacacaaaaaaatattttattgtacaaagtaaatatcctatttattcttctttataaaaaatttgattcaactcgcgatatttactcggagtaatatcgaattctttttgaaactggcgtgcaaattcggcgctattgtagaagttgattctttctgcaatttcacctataggaagatgggtattaattaataattgctttgctcgctgtaatttagcgtggcgaatgtagaagttgatggtaaaccctagttctttacgaaatttacgcttagtgtattcaggatctaacgtcagttcttctaagatggtatttgctcttaatggctcatcacaatgattatcaatataatagacaactagcgcgacttgcttagagaggcgggtaccatcaattggaatatcaagtgtatcaagattgctaaaataattgttgacgattgactctaaaagtggcataaaatcatcattcgttagtgttgttgttgtgaggtaatgcaaaatgtcctttcttaagttaacgaatgtgatcatgttcaaataatgataaaagctgacacttgctagatcacaggttagtgaaattaaggcttcttttagaatgagtgggcggacgttgtataagttatccttgattttgtgattaaatctattgatatgttccaaggcgtagtcaagacaacgcttttcgaaaaaataacttaaatcatgttccaatatagcaaaatcaaaattgaaatcgcgttctgtttgagaaagtttgagctctggaaaattcaatggacagttcctcccccataagttacaaaaatagtgaattttatacaaatagtaaacgtacataatagtgtacttgattaactttaattagttcaaggataatgactgatttaagttatccagtatagacatataaatattcttcgtcaattagtttgctaaaagtttattaataaaggtgaatttataatattgatttaaatattaatatgtttgtacaaaaaggtattacgcgctattgatgaagaagattaatatgctaattaaattttagggggaattgacttatgacaaagtcacgtacgctcaaagcagctatgctggtttcagtagccagtattgcttgtttatcattcaataatttaggagcttccgcggacaccttgccttcaactggaaagtctcaagcagatgtttcgtttacgtctaacggtggttcgactaatcctgttgatccagacaatccggataatcctggcggcggtggtactgggaacaacgggccactttcgttagatgcggtaccaacgtatcttaattttgggacgcatacgcaacctaatgttgatacggcctacactttactttcaaaagatgctagtcaggagagccttgcgacagctaatgatgataagacccaaaatgtgacgactagtggtaagaaaaatggtaatgatatcatttacacgcaagtttctgactcacgggggactggtgctggctggcaattaaaggcacagctttctgatattacggcttctgacggccaagtgttaacgaacgcgtcagttgttttaagtggtgggacaccacaatatctgacaggggaagctaatcaacaatcttgggtcactgcggcggatgcgaaccaggcaaccgttgcaacaccaattgtgctcaatgccggcgcttcatcgacaaccgatgttgcaacagccacggcagggtctaaagttggtgacggtcgaggtatgggggtcaaccaacaatactggaatattaataatgtgcaattacatgttaaaggtggtcacgcagccgctaagaattattcagggaatattgtttggacattgaactcgacaccaacggcttaatgaacgaaaacgagtggctatgttgaatagttaactcgtttttttgaagggaggcccttttatgaacggctggaataagaagctattattagggatgttaaccctaataatgactttgttggctggtatgactgtgattggccatgctgctgacacggccaataatgcggtaacttttgatgttcagccaatgcttaatgaaaagcaacaattatcaaaggacgcttattattgggattttaaaattcaaccgaagagaacatattcgttagcgatgcgtgttaataatcgctcaaatcatgaaattaaagtcaaaaatcaattcctacaatcgtatactaatgcgaaaggtgttattgattatggtgctgctaatctgaatgatgatactagtttaaaagtaaaactagctgatattattaccgtaccggatgaggaaacgacgatcccagctaataaatcacggatcgtgcgggcacagttaaaaacgccaacgaaattgaacaaagggattattttaggaagttggcaagttaaaattgcagatcaacatcttaaaaccaagggggcgacgttaactagcgaatatgcctacaatgtggggatcaaactaacgtcaaatcgtgatccattgccaaaattacgcttggctgatgttcaattaaaaaagcggagtggcatcaagacagttatcggtaatattcaaaattactacgcttcaattctaggcaaagggactgtcactgcctacgttagcaaagctgggcagaccaaaaagctcgcggtggctgatctaaaaagtagttcgatggctcctaattctaactttgacttaccgttaaagtggcgtactaatcgggggatcattttacctgggacttacactctatacgtcaagtatcgaactacggatgaaaagttcgctaagccgcatgtctggtcgctaaagcaagattttgtagttggcgctacggatgctgttaacgtcacgtctccaactacttggggttggttgattggtatcgtgttgttagtattattgctcattgctttaatcatattctgggtaattaaacggcgtcaaaataagcgctaaggggtgatactatcaaaaagctaagagcaattgttgtcatattgatggtattgttacaagtcatagccgctggtgcaacggtaagcttaggcgccgatatgaccgctcaagcagctacgttaccacagttaacttttgcaaaatcaacggctagcgataatattttaacgaatcaacattttgatgttgaactacaggttggtgatacggcctctaaaataaatacgattgatttaccgaacgaggttaatttagatgggccagaggagtttaagcaaataaaacgggttttcgatgatagtcagtacacaacgggggataatggtgcctttacaattacggctaagcatctgacagttgcgtacaatcctgataagcgcaggataacggttcagtggtcagatgaatatccgcaaacgaaggtaccaattagattaacagctgttaaagcagaaaaactggcgttagttgctgtagccgatgatcaaaaagggccggcgttgaatgtcgagattaagcaaccacaaacgcaggctgatcaggccagtacgagttcagctagttcttcagcggcaaccgatacaaatagttcgacggcatcgtcaagtcgacaagcgacatcatcagcagcaagtttggacagttcacgttcagctgcaacgacgctttcaagtcaggcggtaaaccaaacgagtgctagcagtagcgagccttcacaagaaactgctgctaatcaatcgtcagcggtcacggaatctgcgggtgagacaactgatagttcggccagcatctcgtcgtcatccactgctagtcaagtgttctcatcagcaccaactaagcaagcaacggcgagtgccaaatctagtccattaataccagtcactcggttagctcagctgagttcgaatgtggttgatgttagtacatggtctcaattagtcgatgcttggaagaatgtgagtgttgatgaaattaatattacggctgatattagtaatccgactgccgctgcagggtctttggactcacgactatccggtaatattattgtgaatgggaatggacatagcgttaatactggatctgctgggtttcacactaggtacaacggtgctaccagtagtacgaaatatacagcgacctttatgaattttgcatcattaatcggatcttttggaaatgatgcggggttgattggctcatccaccggtggcgatggtgccggaggggctttgaattggacatttaatgttagtaatattacggtcccaagtgggactagttataccaatacaagtcggcgatttgttagtgcgcaagggaaccaagtcaatattaccggcaattgccgagtaacaacggttcgagaaaacatcttatgtggtggctttgatgtagctgctggacagacattcactggatcgaaaatagccaatggtgatgataattcatttatctggtttgtttatgactatcaaggaactggtaatcggcaagttaatgttgaagaaggcgcgacgctaaattgtattcgacgacctgctagttctacgtcaaccgcctatactacctatccggttatttttgatgcgtatgaaagtattaatgtgggtaaaaatgccacgtttaatgctagcgtgccaggaaatgcatactctaacaagtacttttatgggtcacaatatcatcgtaatttttacgcggatactggtagcaccgttaatctaacgtcactagctagaagtcaatcgccaatctctttttctgataatgcaacttcgacgattcaaagtagtagtggtgccaatatttatgtaattgctgctacgggagcaccgcttatttcgggaaattacgcgcgtttggctactgttcgatttattaatccgaacaacttggatttacgtaatagctcaactggaacgactgcagcggctagttcgattaaccaagataatgtgggcacttttgaaatccaagatagtaatattagcttgtggaaattagcatcatcggttacgggcggtgcggattattcgtatagtaacgtatctcagttattacaacagggttcagcagtgacggccacggatagtaatttgcaaagtaattatttatcttctaaaatgcgtcggattagtgccactaaccagaagccacaattagcatttaataatccgtatgatgggacaaccaagctaacagatgcggatcagaagctgcggacgcgagtcattgtggcgatggttcctgatactaatggtgttcaagatgacggaacggttaattatattccacagtatgctagtgcagggcaattaaccgtgagttatagcgttaatggtaagacaatcactgcccaaactgatagtaatggctacgcaacagctaatgtcgggacctttttaaaagctggaacgacggtcacagcatcgactagcaataccagtggaacgacggtcacggctaccgggacggtggttgatgtgacgccgcctaatccggccacaatggtatcaccggaccccattagagtttcaacaggaacggtgagtggtcaaaatggagaaccaggtgcgcaggtcacattagcattgaatgggcagattcaaactaatgtcaaaacggttgtcaatgccaatgggacttggtcactgaacttaaccggattatcgttaaaaattggtgacaagattattatttatatggctgatagtctaggaaatcgtaatcctgatcctaatagttatccaaatgggcagcagtatcatgatgcgactttccaaccagcaccgatatttacagtagctaaggatttaatcgtcaatccaattgatcctgatgatcctagcaagcctgggactggcgggacgaacaatttaggcccattatcgttggacgctgtacctacacatttgaactttggacagcacagcattccaacaatggatacagcgtacccattgttgtcaccatcagccgctgaagaccaattggctactgctactgatggacagaagtatgcaacagttggtggtcagaaaaatgggcaggatagtgtgtatacacaagtgactgatacacgggacaccccaagtggttggcaattgacggcccaattatcagcgttgacagctactgatgggacgaccatgacgggtagttacgtgacgttaacatcaggaacggcgcaatatttgaatgccagtactagtaaatgggttacggcaactgaccaaaatcaggcaactttaccagccgtgattaagttaaccccaggtgctacccaacaaacgtcaatagctgggacgactagtcaacaaggcgtcgggactaatcaacaaatttggaatgttaataacgttgcgttgcacgtcaagggtggtcgtgtgatggctaaaaattattctggaactatcacttggcaattgaatagtttgccaagccagtgatcgttatttaatggtatgcttcaaggcttaaaaagaatcggacgacaaaactgattgcagttttgtcgtccgattttgagtatccgagattaataattagccaaagattgatttgaaaatagagctgaagaagttaacaatcgcgctccacattttttggagcaagttttgattttctttagtattgagtttgctgaagacacccttggcatttgattgaatgttcttcatcaacgagttggcttgagtcttaaagcttgaagaatctaatgcacctgaatcacggatcttgactaacaaattaataatttcagtcttttgattattagtaatgacatttgttaaattgttattggtaatttgttgattgacaatggtcgtgatttcgtttttagtgatgttacttcctttttgggccatttcctttttggcaccagccacagcgttgttcaactgggaatcagtataaccatccttgctcttatttgcttgagtgatgccactgagagtacttaactcatcttgggcggcggttacttgcttcgtgtttaagctgttaccagattttgcgtacgccgcgtaaacaccggctagtgcgcccgaaccgtcgattggagtagctgatgtgacgtaaatattagcatcggtaatcccagccgttagggcggcgtttttatactggttagccgtaatagtggtgatgttattactaccattataatttaaaattttgacattaattccagaaccagaacttgttttttgaatcatcgcactggaccacacacctgagctacttgtgaaactttcaccggctgggttgaggtatttaactagagtatcgccgttaacagttagcgtctgataatcggcaccgttcaagctagccgttaacgtgttgatcgtcccagtcttttgactgctagtcaggctactgcctaatgtgacaattggttcatcgctgctactgtcagcgtgcgcaaggacttgccagctgccaagcccaacgatcagggtggcaacgagggcaacccatttaaatttgaaactcattcgtttcgtcattttcttttcctccgcatcttaactaatgcacctaaatcctaacatgaaccgttcgctcccgggttgtacagtggcaactagcgattgcaaggttaggttatgtcattattatagcagaccgtggtcgtaagttaacattcggcgcgtaaccttgggagagtcctaagtattttaacaatttgtttattatttgccgaagtaccagactttcgctatactcgaaataaatatcgggggaggttataacaatgacacaaaatcgggtgattaacgcgttgagctatttaagcattttattcttaccagttttatttccattaattgtttggttgctgacgagtactaatccagaagcacatcgggttgcaggacgggctttttggttacatttgttgccgacaattttaggaattacactgctcgttattttaggcgttagcggtatttatatggacagtatcgttaatagtggctggttggccgtggttcttttagcggtatttggattagtcgcagtggctagctacttatggtcgattattcgcggaattcagtatttaattgctgattaatgtagtagcgttaggttcaggagggtttagcatggttgttaaggacgcatcagtggttgaaacagcaatgatgattcaattttggcagcgtggttattatcaaacgacagttgacgacttgctcaccgttagccagttgtcacgaacgcagttttatcgccagtatcacagtaagcgggttgcgttacgccgttcacttgaacgctatcaaataacgttagatgaacaacttgatcaattgattcaacgtgagcgggcgcggcaaacaccattgcccgctttaattgcggcttgtttgcgactgccgtttcagagtgaacggtggccagcaggatgtttgatggtgaacctgatggccgaaattgggtcgcaggatgcgtccttgatggcccaactgcaaacgatctatgctgatttacagacccgactcgtcggtttactttcacctcaggctaaaaccttaccgaccacggtcgctgaggctgcagcaagtttaatgcaggttcgcagcggcattcagttattggcaaaacaggatcctagtggggcacagctaaaacaacaggcccaaacgagtgttaatctgattatgggggcagtttaagatggttgagattaaagtcattcacggtgatattaccaaaatgaccgttgatgcaattgttaatgcggccaatacgagtttgcttggtggtggcggcgtcgatggtgccattcatcgggcagctgggccagcattgctggctgcctgtcgcccattacacggttgtgcaactggtgaagccaaaattacgccgggctttcgactaccggcgaagtatgtgattcacacgccgggtcccgtttggcaaggtggccagcataatgaattacaattgttagcgaacagttatcgcaacagtctgaatttggccgctgagaatcattgtcaaacggttgcttttccgtctatcagtaccggcgtctatcactttccgctatcaattgcggcaccgttagcgttaaaaacgttacaagcaaccgcgcagacaacggcccacacggttcagacaatcacgattgtttgttttgatgaccaaacgcaaaatgtatttagtacggcgttggcagcgctgacaaattaatctttaccaaaaaaatacacatggacgctactatcttgagtagctgcttgctataatgttgatataccggccatcggggatggtcgtaaatctttatgtattgggattatcaagcgataatcattgccaacaagaaaggaatccattgtgttagatatttttaaagcggtaatcttggggattgttgaagggattactgaattcttaccaattagttcaacagggcatttagtcctagttgacgaatttatcaagatgcaacagtccacgcagtttacggatatgttcaacgttgtgattcaattaggggcgatcatggcggtcgttgtcctgtatttccataaactaaatccgttgtcaccacgcaaggataccacggaaaagcgaaatacttgggttctctggagtaaggtgttattagcggtcattccatcagtgatcgtggggttaccgttaaatgattggatggacgaacatttaatgaattgggcggtcgtttctgccacgttgattatttatggggtcctattcattgtgattgaaaatcataataagcgcttaacaccccgattcgctaatctacaaacgttaccttatacgacggcattgttcattgggtgcttccagttgctctcgttgattccagggacttcacgttccggtgcaaccattttaggggctatcttgattggaacttcacgctacgtcgcaactgagttttcattcttcatggcaattccaacaatgtttggggcgtcattattgaagcttgtgaaattctttgctcacggtggttctttagctggtttgcaaggagcagtcttagccgttggggtgatcgtgtccttcgtagtcgcttacttgtcgattcgtttcttgttggattacatcaagaaaaacgacttcaaggcgttcggttggtaccgaattgtcctgggggtacttgtgattggctactttacgttgattcattaaatactagaagcgtaacttttggctaagcttgttgccgcaaatatcatgaataaataaagtcagcgactataaattagttgctgactttttagattatatcattctagtaatggatggaccgtcataacgattggataagtgataaaccaatcgttatgacggcttttttgaagtaatcgtgttaccgatgaactaatttatagttggttacgccgtacctttgattgaatgtgattctgacaatttgtccgcgtttgaatggggctggatcagcagcaactgtattaaaatgaagatactttttttcgcccttagaattagttgctagtccttggtattgatacccagtagctgggatattgaccggtagtgtaatgggggaagttccggtactactcgatattttcatgtagtagtaatgaccgccatatcgaaaaataaaccaaccaacatttatcagaattgagattattaataataaggtgagcagccattcgatgagatgattagacttagtattcattgtaatattctcctcgtatactactttttaaggcttcgcaatcacattgaaattgcagctgtagaatcgtaattaggcagtattttaattgaatttacagttttgaaaaatattaatgaaggtcataattttatgccaatcttaccaagggtatttttctttttctctaagcttattttgtcagtatctaaataataaattgagcttttctccctccaagttagaaaatctcgggttaaatacaattattattgtaaatgttgcaggcttataagcccacaatttgaactatattagacctattaacttacttttattgtaagtacttagtaaaaggcgttatctattttttgctaatcatttaagaagtctaacagctgaaaatcaagataacgtggtgtcattttgctaaccgacaaagatgcactagctgatttttctgattaaacaaagtgtaaagtaatgtgattgataaattcagcgacgagaaagccaattgcaatcacgccagcaataatgacaacttgtacaaagtactggtaggccaagtctggttgaccagtgaccaagttacgaacgactcgataagactggccaccaggaaccagtgggaccagactagggatattaaagatgatcatcggcattcgtttgtagcgtgcggccataccgctagcgacgccaatcacgatagctgcgacgagattaccaatcgcaagtttggcgtcgattcctaatggcaggatgtgatagaggacctcatacgtaaaccagccagcagcaccgacccaaccactgaggttaacggcgcgacgcggaatattgagaagtaccccaaaaccagccgtagctaagtaagctaagataatttgaaataaaccggttgttaagagccaatgtagcatgtcacgcctcctttagtagaaaaatgaagtcagtgcgataccaacaccaatcgcacacgcggataaaacggcctctacagcgcgggcaggaccactcagcaagttacccgtcattgtgtcacggacggcattagtaatggcgacacccggcactaatggcattacagcgccaataatgatggcgtcgggatgataatgaccgttagtgagataaaagccgagtagggtaattagaccaataataaaagcgcccataaattcgctgagaaaccgaattgaccccagccgattgatccaataaaaggcagcaaaaccagccaacccggctagcccacaagtgatcaagtcggcaggagttgtccgcccagtaaaggcgaccatcaacggcacactaacgacaacggccgctagacataaccagctgaatgggaaggtcggtacggcttgattgacccgttcgagggctgcggcaaattcagttaaatcaatatcgtgattagcaaactgccgtgacaggctgttgacctgatccactttttcgaggtccataccccgattatggattgctcgcacttcgctagtggcattttccggcaaggagacggtaatccctgttaacagtacgaagacctgcgcgtcagggtagcccgcgttggttgcaattcgttgcatcgtgtcttcaactcgtttgatttcagccccattttctagcaaaatggcgccggccaataacgtggtttttaacataactgccgtatcgctcatcaaaacccctcccacatcagaatgtttatattttctcacgaattttgcgtatcgtcattagtttggaacagaatgtttgccggaagtggtcggttatgggtagaattatcttaacaaataaattcttggaggcatttttgatgactgcattgactaaactcaccgatacgtacacgttaaataacggcactaagattccgattgttggttttggaacgtggcaaacacctgatggtcaggttgcttacgattccgtattagccgcattaaaggcgggttaccggcacattgacacggcggcggcctatggtaacgaggaaagtgtcggtaaagctattgccgatagtggtgtggcacgtgaagacctattcgtcacgaccaaattatggaatgccgaccatggctatgacgctgccaagaaggcgctggatacctcgttggctaagttaggtttggactatgttgacctctacttgatccactggccaaacccagccgcaatgcgcgacaattgggaacaattgaacgccgatacttggcgggcaatggaagaagcttacacggcacgtaaagcacgggctatcggggtttctaacttccggcctaagcatttagacgcgctgcttaagacagccaaggttgtgccagccgttaaccaaatcttcctcaatcctagtgatatggaagatgaagttgtggcctacaaccgcaaacatgacattttatcagaagcttatagtccattaggtactggtaagatcttcagtatcccagaattaaagacgttggctgataagtatgataagagcgttgcccaagttgtgctacgttggtcattacaacacggtttcttaccattaccaaaatcagttcatgcggatcggattaaacaaaatacggaattatttgatttcgaactcagcgatgatgatatgaaggtcattgatggtttccacggtgttgccgggttagctaatgatcctgatcaagttaatttctaagtttcatcgttattaaggatgcagccactggcagcatcctttttatttggctaatcacctaattgtcggagtcagctagttaaattagaaaattcgttgttatcgtaaaaagtgtggcgcggccgcttaataatatgaggtaggccccctaattagactaatgaaacgtcataagatgtccgattgttgactagcaacctgactatcacagcgattggactatggtacactcagttttaattattaagtctgggggcctgtgaatgttactgatattagcaattttaccaattgttgtgacggtgggattaggcgtgtttgcggggctacggcaccaatttgcgccaacgaccagtgatattttgattcagttggtcatgcattacgccttgccgttaagtcttttcggaggaatcttgtcattaaagcgcgctaccattattcaaaactcctcggtcgcgctgtggttggcgctaggcatgctaggtggcatggtcatcgtcattgtgagccaatgctgtttccatcagcaactagaaacggggacgttacgagcgctagtgatcgccagtccttcaattccattcatgggtgtttccgtcttactggtggtttttggtaaaatcagtgttttattggtcgcgttaggcggcctgtacatgaatttggtacaagtgccagtgagcgtgttgctgttaacgctagcgggcggttcgacacctgagcaacgttggcgagccggttggcagaaactgtgtcgtgcgagtcggcaaccagtcgtgtgggcgccaatcagtgcttttctcttgaatttggccggattgcggttgcccagtgcttggctaacgaattttacggagttgggacaagcagctgggggcgtggcgttatttgcgctggggcttctgttaacgaccagaccgtggcgactgacgcgcatggttgtcttaaacgtgctactgaaaaatttaggcttaccggtgctcatttgggggattatggctagtctaggtgtgtcattaggtaaccaacaattagttgtcttgacactcgcaatccccactgcaaccatcgcgaccatgttggccgtccaaaaccacttggcaccagatgagtatgtggcgacgcaaatgttaagtacggtcattgcgccgctgaccatgggattcttaatgtggggattgcagctcgtatgacgggcaccttttgattaccatgctgggtttgtgaggtgctcacaaaggagggcacgacttgcggtcagtgctgttatgattcccgattgacaaaggttaattggcacggtttaacgacgatgctaaaccaaacgttgtgaacgtcagtatagacaaacccgctcaaatagggcatatttgagcgggtttgtcgcgttagtcttaatagtgaacttgaaaattagtcggttgcgttgcgttgacgacgggatgttgcgcaaagtagtcggcaattaatacggtcatatcagtaggtaagcgccggataatcttagccgtttgatacattgggtaattcccaccgccaccagcgcggtaatgattcagagtgaccgttaatttttggtcagcggtgactggggccccatgataatcgagttggacgacacgttgaccaaagggtttggtaaggtcgaaagtatagtcgatgccactgtaaatatcatagacatagtggcgcaacttagggtgcatgaactcgggattgacccgaacgtgtccgtcttggaggaaaaagtaactcgcacaacgttcaagagcggcgcgtaaatcagcaccagtaatggcttcaacggcaagtttgtttgggtagacgtaactgttcatgacttcccgcatcgtcacgtgttgtttgaggcctggtacgtcgtcattaaataatgctgttgcggcaatatcggtaccggttgcggccatttcaacgcgattaataaaatcgatgtaaggatgattatgcagccgtgcttgaagatgatcgtgtacgagcatattgccgttaatttggccaagtggtgtgtctaaccagtcttccatctggtcattgattggtccaactagttgcattacctgggtattgggggtggcatctgcgaccggatagatttccggatgactggtcgtcacttgatgattgcggtcgagctcaagggtaatcatagcaacattagtacctttcataccaggttgtgtcacgggaacaccgtgaaccgtaacggctaattgtcgatgctggtggccagtaatcatggcatcaatgccgggtacttcagctaatagtgcggatcctcggttttcaccattcatgcgttcggttggacgatcagtttggggatcgcgttcaagaccaccgtggtaggcgatgacaacgacgtcagccagttggcgcaatttgggcacccaatgtttagcagttgcaaccacctcctcaaagtgcaggccggcaatgtgatgtggttgttcccagtgggcaacgaattgtgtcgttagtcccaaaattgccactttaactccggcgcgttccagaattgtgtatggtttggagaataaggtgcggtgcaggtcatcatgaatattggcggccagcatcggatattggcggcttgattcacacaggtcgaggtagtcgagcccgtagttgaattcatggttaccaaaaataccggcttgaacgtggttgcaatttgcaaggcgcgagtataacggtgcagcttcttggtggtggcgagcaatgaaataggtcaacggtgatccctgtacgtagtcgccattatcaatcacgattggccagacatcagccgtatcttcacgtgacagttgatgaataacagtagcggcacgactaagactaaatggtgcgatgttatcacgacgactgtagtcagttggcgcgaggtaaccgtgcacatcactagttgagattaatttgattttcataacgtgcctccaaggaatatttgtgttctattataacaatattcatggctggtaacttgattttagtcataaattgaacagttttttgatgatgacctgtggttaatgtttaatggctgctttaattgtacgttctaatcttcacgactttttcacaatttgtacgtaaaacgacaaaatgtttccgctatcattaatagtgacgaatgacaacgataatcgaattacggaggaataaacgatgcagaattatcagaatgcaccattcaaacctacccccgagtccggtttaacgaccacagcggtgacgacccagctaactaaattcggcaaaaatgaattagtggctgcgcgccccgtaccgttatggcgtaaaatttggcaacatatgagcgacgtttcatcgctagtattattatttgcagttggtttagccacgtacttggctcttgcccagaatgggggctggacaaagaccattgtgattggcgccattttagttattaatgtctgtattggtttgtaccaagaagcttccgcagaaaagtcgttggcggcactgaagtcaatgagtttacccacagctaatgttcgacgggatgggaaggtacaaacgattgcggcaccagaaatcgttcccggtgatttagtgctactaaaagcgggtgaccaggttccagccgatgcggtcgtgttagaggccacgaacttagccgttgatgaggcagtcttgacaggtgaaagtgaagctgttgaaaaaagtatttatcaggacaccggtgagttggatgataactgtcaagtgtatgcgggaacggccgtcacagccggtactgcattgattcaggtcttaacgaccggaatggccacagagttaggtcaaattgcaggtttgttgaacaagacgaagcaacgggccacgccattacaggggcggcttaatcggctatcaagctggttaacgacatttgccgtcttaggtggtattacgatttttgcgctgagtgtttgggtgcaaaaccaaggtttggccgatagcttgatgattggggtttcattagcggtcgcggccgtgccagagactctgccgatcatcgtgaccattagtctttcacacggtgttcgacggatggcagacagaaatgccatcatgcgccgagttagtgccgttgaaacgattgggagtgtcgatgtaatcgcgtctgacaagaccggaaccttgacgcaaaatcgaatgacaattacaaagtattggacgccgaccacgggcattatgacgaccgaacagcccttgccatcagcgggacaaacattgatgcgttacttaggattagcgacgaatgccgagatcaaccacgttgacggtgaagaacaagctattggggacgcaacggaattagccgttattcgttggctggctcagtatgatttagatcggcccagcttggaggcgcagaccccacgaattgcggaagacccgtttgactcaactaagaagatgatgacgacggtgcatgaattagcgcatggtcgacggttagttatcgtcaaaggggcttgggatcggttaccactgaagcctgaccaagctagcctagctgctggacaagtggcccatgatgaatttgggcaggcggcgcttcgcgttttagctgttggctatcgcatcattcccgcggatgtccaaactactgactgggacgacctgacagctgacctccaattggcaggattgattggtttgattgatccaccacgaccagaagtgattccggccattcgagcagccaaacaggcgggtatttttccagttatgatcacgggagatcatttggttactgcgaaggctatcgctgaggaaattggcattttaacccctgagctgcaagcaattagcggtgatgagttacgccaattgagcgatgaagaattgacggctcaaatcgatcagattgcagtgtacgcccgagtgtcgccgagtgacaaaattagaatcgttcaggcttggcaaagtcttggtaagacggttgcgatgaccggtgatggtgtcaacgatgcgccggcattgaaagcggcggatgttggcattgcaatgggaattacgggtaccgaagtatctaaagaagccgctgacatggtgttaacggatgataattttgcgacgatcatggcagcagttaaggaaggtcggacagtttatcagaatatcattaaagccgttgaattcttggtaggtgtcaactttgcacaaatcttcttgatggttggtgcagtcctcttcggttggggggcgccactgttagcagaacaattgctgattattaacgtacttgctgatgggattccaggattctttattagccaagagccaggtgaaccccaagccatgcaacaaccaccagtagccaatgacgaaagtattttagctcggggccttggtcaacggttgtttatccgggcagctacttttaccgtactaaccctcggaatttacgcgtttggccgctttggcttaacaaatggtcaagccccagtcgggatgacgatggtctttctagtattggcattaggatcaatgatcgacatctatgcaattaaggatcgccgaccactcagctggtcaagcatgacgcgtaatccaatgctgaaccgaggattgctgttaggaattctggtggtcttggcaattgcagtgataccaccgttccgtagtttctttagcttagtgacactaccagcgttaggatggttaacggtgctagtagctacgctgattccaacattcgtgctggaattgaataagcgctggcaggcgcggcgacagtcacgattagtcgtgaatactgctgaataaggatgatcaattcaagttagttaaaatgctgcttacaaacgttattcgtttgcaagcagcattttttcgtgtcattaagttgtgtgcctaaaatactggccggtgagcgggcttagaacgtaagtcatcacaattgtaggcagataattctttcagaccatctttactagcatcgaaataggccgttaatccttgggcaatcattaagttgagttctttattcgcatcaaactgaacgacgatgacgggtgtcttttcagccacggccgcaccgatttcaaacattgtgcccgaatctggctcattggttgcactagtcatgtcgaagtcaagaatggcaacaacgacatcggcccgatgaacttgacgcatatcggatgcgtagacgtattgttgccaagcacggctaccaaaaggttcttcttcaaattgatgttcttctgggatgaagataccatcggggttgatcgtcgggttagccaacagcgccgacttcacttgttggatgcgttccttctgagcctcgtcaaaaaacggtgcagctaggtaaacgttattcataatgatttcctttctggataacaaaatttggataagcctattttagcggaaatatggggtggctttcaagccttgatttggcgtgaatcattattaaaagatccttattttgaaagttcaaaaatagccagcttaggcccgctggaaaaagttcgaatcagcgtaaacttgtttagttggttggtcctacaccgacttccaggcatttctgccaattgccggaacgtggtgggcacagacttgagccgaaaaatcacgtctcaaatactggcctttcaataaccaagcacaggacacttgctaagtgaaatttcaccactgggcattgtcagaaacgccttccagtcgggagagtattcgaatggcagacgaagctgtacttaacttttgatgaatttgccgttgctttttgtaaacagtaattttgttaatcaactgtcaaactgaaaatgatattgaggtagctcattaatcctgaatcggcatagtaagattcaaacttctgacagagtgcctagtgcaccctaaccctttgtctttgtttaatatcaaaatagtcaacgataaattgtgctaagttaagtggccgttcatcagccattcgagcggcttaccgaaaggtgttcggtgccactaaagcctgtgcttgctacgccaatggactaatgccaaaaccgcattaatccgttggcaggcaatgctcggcttcaacccgtggcccctcgcaagcttgagactggaggggctgggtgacaatactcagtagccaaattattcttagtcggaagtggtctgcttccggcttagaataagactcgtatttgagaccgggcgggttttgcacgggctcaaatcgacgtcggcttacgttccagcaattgtcacccagccccggaggtcggaataggacgatcattgctgacgaacagcaatccaaaaataagcaccttttaataatttttgaggcgaataataattagcagagtggatatatagattataattctatttataacaaggtgatgattagatattgttgaattaaaatctaaattgggctaaattaaatagggtagtgaggaggattggatgatggaggaatttggatcaactagtaactatttactttcgtgggaagagttgcccgcggtgcccgtttatatggaacagttgttgcaacttgttaatgaaacaattcagccgctggggttacctgccgtaacgaagacgatgattaatagttacgtgaaacaacattttttcagtcggccggttggacatcggtatacccggaatcagattgtggcggtactagtcgtttcaattttgaagactgatttttcattaccagtaattagtaaagcgattttgcaaattcgtgattcgcgtcagattgagccgcggtaccagcaatttcggcaagcattcgagtctacgcttgctggacaaccggtcgtcttgtcgacggttgacccgttagcacgggcaattcaattagcagctcaaacggtggcggcacatttattaacgatccgagcgcttaacgaattggtagattgagttgagataggcacataattgagaatagcgtttgataatatcgctatggctgcttgtagcgtattcgaattaaagcgaattaggcttagcagatatgattaggtatgaaagagagaaagagaatatgacaacacgcaaaaaatggacaattgcgctcattgcattcttgaccgtgatcgtcattggggtcgcgggcggtagtttttatttatatcactttgcatttgaacccaccccgaaagttttgaaccatagttctagtaagagtaaaagtaagttgaagcagaaccaagcgtggctgaaacgggtcaacaagcagacctggcatgagacgtccgcaacggatcatttgaagttagttgcggactatgtaccagctgcgcaccgaaccaccaaaacgattattgtggcgcatggttacatgggtaacaaggagcagatggcgagctatattcgattgtggcatcgccaaggatataatgtgctggcgccggatgatcgtggcaatggtcagagtcagggggattactatggttttggttggcctgaccggttggactatctaaagtggacgcgacaggtgattcgccgcgtaggccaaaatagtcagattggactctttggcgtttcaatgggtggtgcgactgtcatgatgatgagtggcgagaaacttccatcacaagttaaagcgattattgaagattgtggctataccagtgttggtgatgaattgggatatgagctgaatcaactatatcacttaccgaagtttccactgctgtatacggcaagctgggtagctcaagcgaaggcccacttcaactttatgacggcgagttcagtaaaccagctcaagaagaataagttgccaatcttctttattcatggtgctaaggatacttttgtccccacgaagatggtatatcagaactaccgcgctacgacggtcaagtcaaagcaattatgggtggctccaggagctggtcacgcggaatcatacacgcgttatccgcaactatatcaacaaaaagtaagccagttcatggcaaaatatttgaagtaagagctaacggaatagaataactaataaaggtcaccaagcagcgattgctgattggtgacctttattatggttaaaatatgctagtcggattagtgtttgtcagccggtccgcgtcctggtccgatctccgggactaagctgatagcttttgaacttgataaatagcgcggttaatcaaccgagtgttttgcaaatgggtgccgcatacttggtataaagatcagtacgccgatgaagttaagcagtaatgacaaggcggtgaagataaagacaccgttgtaatcgaaccagccggagacggcgccaccaagtaaggagccgagcatgctgccagctgcttggaaagattgattccaactgaaaatagtgcctgttaactcgcggggtgtatttttggataataatgtttgcaccgttggaaagagggccccgtcagagatcccaatcatgaagcgcaatagccctaatgtccacacactggagacgaagccttgtggaaagtacatcaggatggcaaagacgaaaccaaagacaaggatacggtcagcccccccggtgatcaccgagccgtccgagtcgcggcgccgataatagcgtcgaaattccgggtagagcggcaatgattccagcaacgacggtgattgggccgacgttatgcatcagttctttgacatatagactaataatgggcgtgatggaattattccccatttgaataatcatcgtggagacgagcagtgtgataatcaacgttggatttttaaattggctgagtagactgccgtcacgtttagcaatcggcgcgtcgctgggtttaaagctttcgtggacgagtgtcagactcaatacgaagacgatcagtagcaaaattccggtgataatgaaagtcaaacgaatagagaaaacttgggcgagtacgccaccgagaatcgggccgatcaagttaccagacacgtagccagttgttaggataccgattgcggtcccactactttccttgggagtttcggtggcgattagggcgctagcattgggaatgtagccggcacacaggccttgtaagaaccgaagtagaatgagtatccaaatgttatggacaaatcccatcgcaccgataacaaaggccatcccaagcgaagaacgcagcagcatgattttgcgaccacgccggtcagcgagtttaccccataatggtgagacaacagcgacgacaaaaaaagtcactgcgtatgtaataccactatacatcgtgagttcgtttttggagaaatcccccatttgaccaacgtataatgataagaatggcatgacttcagaaaatcccattccggcgataaatgttcctagccagagaacagcgagattccggcgccagcctgtcaatgcgcccttcacaatctgtcacttccttaattaacttattaagattattttaatgcgaatttaagttttgtgcaattaactaacttagttaaataggattgaatggcgactgacaatgaaccacaatgagacttaaaatagcccgtatagcagccttttattaatttttgagtgtaataagacacaatagggcacaaataaaatgcaccacaagtgcaccaaaaatgcaccacaaaattagattctcataattcactcatataacgagctagtttagaagcagtctcgttcttttgttttttggtgacgtgtaaataaatttgttcagtgattttaaggtcagcatgtcctaacgtcttagacacttcgttaattcccgcatgagcttcaaaagctagtgtgcagaatgtatgtctgaacgcatgaatctttatatggcgcaaaccgtattttttacagatactccaattaaaatagttaactgtactaggtgacatcagtttgttttgttggttagtaaataccagttgactaggatcattagcgttgaatccaagttcaaaacattgtctggcttgggtcatcttccacttgtgcaaccattgtgcagtgtctgggtcaagtacgatagtgcgataactggtattggtttttggtgtctgtatgatcgtacgccaacgtttacctactgcttgggttttattaaccgttagttcgttagtttcaaagttaatatcgctccattgcaatgctaatgcttcgcctcgccgtaagcccgtaaaggccagcagacgaaagaacataaatgcttgggggttctcgtgttttgacgcacaatcaagaaaatgcagtagctccgatttttcgtagaaatcaacgtgtggcgcttgtggctttattttttgtttaggaatactagttttagccattgggttacgggtggttaattccatccgtacaccaaaatcaaaaacactaatagcgtacgtcctaaaccgacggtacgttttgaatccctgattaagccacttatgcacgattgattgacattgggcgacagtgatacgtttaacccgttgagagcctaattcgggcaaaatatgcaacctaaagatgtcgtctgttatcatgtacgttgattctttgacttgttccttgtaatcctcgttgaaccatttagtatagagttcggcaaaggtgatattatcgtttgctatgaaaccattcttagtaaaatctgtctgaacattggaagtccataattgggcttctttttttgtcttaaaaccacgcttgtgcatccgtttggctttgccgttggtatctttacccacggatgtaaaagcctcccagaaagcaccggatttagttttatactgcttgaatgtagccatattgattattcctttcataccggctggcgggcaagtatgtaaggagaaaatacaatctattttataaaattaagtcttttgacatttaatcttttggaatagtctccccatggaagtcgtacaagtacggacacttcatttttgtttaagctcaatagataatcagttaccgatttacgctttttatgattcttaaaatcagcatctcttgtttcgtaggtgtattcccgcaatgcatcagaaattttgtttaatatcatattcgttacttcgtttttaaaaactacaggtaactcattaaaaatatttatgatttctttatcattagaattttcctcttctatatcaacgtataaatcaaaagtatccaatggtgccaattcatcaaaccagagactatcaataataaatacaggctttagttgatacatttgttctgttctaccttttaatacatcaaatagaatcatcttttcattagcatacgattctgcaaaacccaatcgaaatttataaggactaaaagaaaagaaatcagacggagtgacttcgagatagcggcataaagtatcaatagtttctgttgagatatttgaattaatattattagtgatattcgagatagtattgcgtgagatttttgtttcgtccacgacttgcttaattgtaagttgtctttcagcaagtaaaacgctaagcctatttgctaacataaaaactcctccttgataaatctgcattaattatatcatttatcaattacattgtgtatttaaacattgaaataatccaagaaccgtgttagtctatatttgcacttgggaatttaaaagtacaaatacacattacgaggtgtaaatatgaataatttatctataatcttaggagaacgacttctaactattggttatgtttcaaaaaaaacgggtttgagtcgtggaacaatctctactatttatcatcgcagagctgattcagttcggttggatacgttaaaaaaaatttgtgactgtttacagattccattaagtgagctaattgagtacacaccaaaggggggcgactaatgaacaatatagtcacactgacatcacagcgattggacgcggaagcatatacgactggcgatgtgattgcggagtatgcgggaattacccaccatgctgttaatgtaacgatcaatcagcagtatgagcggttggcgcgtgcaggtaatggcaaggtgtcatttaaaatgaagcctatgctaagtggtcaaaaagctaaggtctatttactcaacgagcaacaggctaccttgctgatcacgttcttaaagaacacaccacgggtagctgatttcaaggaggaacttgttagacagtttacagttatgaaacgtgaattgattttgcgtcaggctaagtttgaactaggtaaggatttttctaagtcattgcatgaaacgattaaagaaagtccggcgctgggtgagcatggtcacttatacgtgaatattaacaagttagtgtataagcaggcgttaggggtcaacgtgaatgagttacgcaaagctcgcgatattcctaagaccgaggctattactcactatttaagttctagtgaggcggatgcagtcaagcggattaaacagcaaattagaacgctgcttgaaatgaaactggactaccagcaaatcaagcaagctttgcagattcaaggcgtgatttaccgtattgagttgcaattgccagctaaagcatccgtcaaatagatgaaattagtgccgctgacaatggaatcttattgataaggattgaaaggcgcttcggttaacttgcccgataatcggatgaattagctgggaatgcgattcacaccttttatgcgggtgctacaagtcattgataggtggtgaggacgattacagaaccgattaaggtgttattaagtgatgaacaggcgcaggcactacgcgacttcgtataccagctgactacggattcaatcagtcaggccaagcgtgatgtgggtgctagtcagcagtggttacgcaagaagaaagcggcggcgtatgcggatgtatcagagggaacgtttgcaggctggacgaagcaaggattagtaggtcacgtcattaatggatcagtgctatttaataagcacgacatagacttctatatcaatcacaatggaaaaatgaagtaataaaatccggctggcgggcaattgcggttgatgaacacataataaattggattggagtggtaactatgattggaacactattgatgagtttagttaagtttatgattatttcagcggttggcaacgtgtcatttaaattgattgctaatccgggtaagtatttcggttaggtagattaaggagctagaacatgaatgagcgtacaaaaaaagtccgtgtctttactttggcgagtaacacggacagcctgaaaacactactgttatgggctttttgtatactcattttactacaaaatgaggagtaaacacaatgggtaagccaatttatgaactatcaaagttaaatgatattacagatacatgcaagcgggcaaacattaccatagaacgggctaaccgtgatattagtagcatcctagcgattagtgatttaatcgtacctaccctaaaaaatatcgttgaacatgcttcaagttattttgaactagacgccgataagctacgagaagtaattaatagtcgtgaaacaactatttacagcgtgatgtgcgtactaactgaaatgggtacactagcaatgaatattgatgaggagacagctagtttaaatggggttattgatgacattaatagcactgtaaacgggattaatgacggtattaactccgttttgaatggtggtaactcggattacaacgatgataactcacagggggcgactgatcatgaataacgtgcaaacccggctaaaccatgctaggacgaccttacaaggaactttattgcaactggactacttacaagagctagtcaatcaaacggtaatgcgtgatagtcaacgggctaaaattagtcagcaaatccataacattgaagtgaacaaccaaggcgcattgaaacaacttgcatccgtctatgaagtcccgttagtcgggatagcaaaatagggtggtgagcgaatgaaagcaaacgacagactaacgagagcgctgcagcttgctcgtgatggcgttgcggtttatcccttagcaagtaacagcaaagtgccgttaaaaggcacacagggctataaggacgctaccacggatgtagaaacgattaaaggttggtttgagcatgtcccaagggcgaaccttggcatccgtttagaccaagctaagttaatcgtggtggatattgaccgacatggtgatattgatggcacggaaacattgagaaaacttaatcagcaaggcaaacccttaccgagtgacacttatattgagcagaccccgaatgatggcttacattacttctttaagttgccggttaagctagatatgaaacggcgaacgggtctatatccgggtattgatgtgctggctgacttcgtattagtagcaccgagcgtgattaatggtagtgcttatagggcgattgaaccaactaacgatattgctacggtgccccagtggttacttgatgatctgttacccaatcaacggatgaacaaggcaccgcagcacgcctcacagattcaaaagacatgggcgggacggatgcttgatgacttagtggctggtactggcgagggtagtcgtaacagctacctgacttcgttattaggcaagttactacgaactggctgtaatgggatgacggcctatgagctactgcaatatgctaacgagcgattgcaaccgccactaccggataaagaggttaataccatttttaaatctattattaaacggacgtaggaggtgtcaatgtgtcagaggataagaacttaaagcaagccatccaagagcatgacaagcggattaataacgtcacagctttaaagggtgatgattggcaagaccaactccgattaacgacccaaggggctattcggcggagttcgctatacaatattttactgtttattgaaaatgacccgaatttaaaaggtgtgttggcctataacgagttctcggatcgagtggtgaaattacgttctaatgataaaacgggactaaaaaaaggcgattggcgagatacggatgattccttactacggttttattttgacgcacaatataacattttgctgtcaaaggataacttgctggatagcattgttaaagcgtcacaggaacatggctttgacccgatgaaagaacggattgaaacggtgaagtgggacggccatccaagggcggaaacctttttcattgattaccttggtgccgaggataatcactatacacggatggtaactcgcaagtggttagctggggcgattgcacgggtttatcttcccggagtgaaatttgatattatcccaatcttagagggtgttcaaggacttggaaagagtaccttggtgcgccagttagcgcccgattactttagtgatgatatgaagagcatgaaagataaagacgactatcaaaagctaatggggagctggattattgaacttgctgaactgtcggccatgaataagactgatattgagagcattaagaactttactagcgcccagtcggactattaccgcaacacttatgcacgccggccagaacaacatccgcgccggaatgtctttatcggttcaactaaccatcgcgactatttaaaagacgctactggtgagcggcgcttttatccgattaaatgtgggatacagcccgttactaagaacccactaaaggcgaagcaagctgatatgttacaaatccttgccgaagctaagacatggtttgacgctggcgaaaagctttattttgaccaacagacacttaatgaggccaaagcctaccaacaagaagcccaagtcattgatcccatgagagacgctgttaacgattatttaaaaatgctagtgccgactaattgggacaagttatctgtaagtgtaaagcatacctactatcgtgacttagttaatagtatgcggttatctaacgaaattgaaagtcaattaagtaaggaacgtgagccactacagcaaacctcagtacgagagatattgtcagttgtctttaatcaacaagtagatgattatttggccgtgcgaactaatagcaattctaaacgcgttaagttgttgttggataatttagaagggtgggaatatggacgcttgcgattaaatggaaagcaggttcgtggctatcatcgaatcctttaacacaaactttttgtggaatttactgtcacactgtcacaaagtcttttaaacgttgatatagaagcctttttaaacaaaatttactgtcacattactgtcacaagctgtcacacactgtcacagtctaagctaaaggtgtgacagtaaatgacagtgatgtgacagcgttgtgacagtagaaacgttgctatggcggtgcttatagcgattgtgacagtgtgacagtaaatttgaactaaactttaaagaattgcatttaagatgaaacagaaaaggtaggtgccattaaaatgacgttatcaatgactgaatttaaagtattaaacatgttgcctcgtggtgctggttacccaatgacaacaccgaatatctgcaaggtaaccgggcttaaagaacgggatgtcagagaagccattagtatcttaattaatcaacacggcgtgccaattgtcgctaaccggagtggtcgcaatactggaatgtttattgctacggatgaagccgagttaaatatcggggtcacttcatttaagaaccaagttactacaatgaatgcgcgtattagagccatagagcaagccgacttgaatggctgggaacaagccctaagaccagagataaaacgcctagacgcaaaagtaagccacaataaggaggcgaactagtatgcgagtgctttaccctaagttagttgaagaagcctataattacattgctaaggctgaaccagccgttaagaatgcgcctaacgctgttaagtcagagatatacagtaagatggttaatgacgggataattgatgagaatggcgagccaacacagacagctattgatcggggcttcgttgatggtgatagcgagctagattatgaacctgatacgctggccgagtttaaagcaatgcacccatgctataaggagtatgatgatagccatttcagccatacgaagcaaggctgggtgattgacagctatgtgatgaagtcgttatcacttaaagcactgcatgatccggacagtagcgaagaacaacgcgcattcgcccgtcatgcgctacaagagattgaacggtttagttaataagcataaacgagtatcgtgctaaaaagtacgatgctttttttagttgagcgaagttgtcccgttagttatttatatgaaaatggattgttatatcaatggttaaaaggctttgatggcaatataaaatattggaaaataatggaatcaaaatgttagaaaatgttagaaatcaaaaacgggataatgctaacaattgctaacctaaaagccgaataggggtttacagaagtttacaaaatgagcagtattgtgcagatcgaactaccttataaaatcttatgtggaactacctattaaaacctattattgctttgctatgtaaactgcttgtttctgctaatgcgtggaatgctcgttggattgattgtaggtcgaaaatttcgacttaccctgtacatagttggttacagagttaaaaaaagtgatcgctataattgatgcacgtctacaacctgacaaaacatgacattgttttgcaatttaatcgtattcaacatgtcatgatctggttgctacttaacaaaacttaacattggaaatatagtgacgcttgaaaacctgcaaaaacctgcatattaacatagctatcctgacagttctgacagttctgacaccctaaaaaagaggcgggcaaataattatctaatgaatatagtcagtggcattacaaaacaactcatagggtgcactccataacaccgatatttcgacaatatggtgcaaccctatgctggtaaatgctagtattattcgtacaaaacggacaccatataataagcgacaagtaacccgacacagttagatggtatatttggccggagtgctgttatatcaacgcttgacggctaatgagaactcgtaaaatgtcggattatgtcggattttttacttgaaaatactggaaattgaacatcgctagttagttaatagcttgaatgcttgttatgactggccttagagctgttttaaataaatgaaaatgttggaaaatgtaggaatgtaaaaacggatgagtatgtcagctggcttagatggcgttgggttactggttgggttactggttgggttactggttgggctactggttgggttatttgtgtgcatataatgcagacagctgttcggacagtcagacgtgctataattaactttgtgggaattagtcgtagttgtagtcagcgatgacagcacacgcaaagagagacgttcgcaaggggtggctgaacgtctctctttattgtgttgaggagtgatcgataatggagcagtggtatcgggacgcacggagttacttaaaacagtaccgcttttaccacagtgttgttagccaaccatttgaggactggctgggtatcggtaaacctaagaggctgcaacaaatggagttgtattgtcagcgggttactaatgcaattgatagcatccgtgatgaacgtcaagccaatctattgcgtaatgagttcgtagtggcggatggtagccaacgggtggcctatgaactatcgggactaagtaagtcgcaatattatgtcatccgcaagcaagctatgcgtgaatggttgcagttaatcaatcaacacaaataagttagagaaaactggagctttagcgtgttttggattaatcgtaaacactgatatagcaatgccattgaaccctgttatcatagccatagcattgttattttattaacaaccgtacagagagtacgcctgttgtaccgatcctaaaatgttaggaaatgttagggtgcaagtgtaaccggagttacggttgtaaataacggcgcaacaaaaaagccatcctagaattaatcaaggacgactgatgttatagaatgattaacaggtcaggcttacgccaagtaatatgccaaccttagcaaaagtctatcaaaaaatttaatcacaagctaaagaaacgcgatagctacctagcaattaaaacgtcaccatttggcaaggtatactgtccgcctatttcaccaagttcaatggttgtgccgttgagctgagtaaacggtgaatttagtataataatctgcggatgaagtggattaagaaaatcaaactcaaattgtgctttgccagttattacctcgccagtgctaagtgtatgcttaaatagtaaaacgccagcgtcttcgtaagacggaaatttaacatgaatacttttagtggtcaaaggctatcactcctaacaaatttgtcttttcaattctattgtgccagttgtaggccaattgtttgatctggttaacaataaatttaccaatacttaaatttataaaacatcagccgcacttattatatgtattgcccgccagcatgattaatcggtaaatttatgtgttttgaagataaaatgcaccaaaaagtgcaccacaagctatttttattgttgaaaacggcctattatcgttgatatataagcattcttaaaaaatcactgttcaaactaaatagacttgaccaagcgtcactaaaaaaactacaatggaaaacattgtagaaagggtgaacgatgtgcagcaagagtcaaagtatcaaatagaagtggtggcgcctaagcaccgacacatgtctaattgggacatgtttgcaacttggattggcgccaatgccaataatggcacgtggtacgttggtggtgtattggctgcgtgtggtttattgacggcgcttaaagtgattgtagcatcgtccacgctatcgtatttatgtttatcgttagtcggcttcatggggtataagaccggggcggcgacgatgagcttgattcgtggttcctttggtgtgcggggcagttacgttccgtcctttgtgaacttgacccagtatattggctggacagcggtaaacacgttcattgcagcaacttctgtcagctatttattacacgatctagttggctggccagtctatggtaaacccggtggggctaaaggactgatcctcggaattattgtcatgagtgtgttgcatttattgagtgtttcggtcggtcaacggtcggttcagatgattgaacgtttaggtattattcttgtcatcttatttgttttatgggagacggtcgtcgtgttccagacggtctcagtgcatgatttgttaacgtggcaggcgccgacacatttacatatgacggcgggggctgggatggatacgctagcggcgttcaatttgtcttgggtgacagcgggtgctgattttacgcggtttacgcgcaaaaagagtggcgcgactggcatgccatttttaggggcctttaccggcttgttctggttcgcctttatcgggcttgccgcgacgatcagtatcgcgattacttctggaacttatgatcctaataactctgacccgagtaccattgcgagtcgactaggcttgggggtattagcactactggtgattgtcttaacgagtatgacggcgaacgcggtaaacttattggcggctggttcggcgctgtcgaatatcttcccacggattcggttacgaccagcactgtgggccgtgacaatcattgccacgttagtcacactgattccattaatcatggggagttttttagctgcattcacggcgttcctagattatattgggatggtgcttggaccgatgatcagcgtgatgttagtcgattactattggcggcatcgtcagcactatgatatcaacgaactggcgagctctaaggggcagtattggtatcatcatggggtgaattggattgcgctattatgttgggtactaggtgtggccatcttcttgttattgaagcacattgcttggattgcgacggtgactggtgcaaccttcattgacatggcgcttatcggggtcatttacgtggctttaatgcgaattttctacccgttacctgccaaacgtgtctaattggattacaatagataagtaaacgaaattagaacgaggggtgtcatgatgtttaaattaactgagatcgatgacgtattaaataatttaggtgaccacgcagactttgccacgattgccaaaaaagaagccgatttgggcgttcaacattttcaatatgatgttgctactggtgccacaacttactttggtgagaacggttatctcgtggaacggcggacgaatggcttagcagtccgggtcgctcgtgaagaagatgccgcggcagttgaacaaatcgcgaagcaatatattgctggccagctggctctaacagacgctgtcaagcagtttgccaaggctgggtgtcaagcttggactgctaacttaaaacgccacattgtcgattttagcggcgatgaaggtaaaataatggcagctgtaacattctaaatcaataataaagtgcaaaaatgcagactatccacttttaaccgggtagcctgcatttttgcgttccattaagtttaatagccagcttgatgatattgcttgcttaactggcgttctaagctaagtaaagtcagcggacttagccgccgtaactgatcagagtgatagcgcatgactaattgttcgggactattgattgtaatactagtgacgccgtttaggccttgaaaagcgctttgaatggcctgctggagctcgggatgttggggccagacaggggaggtcagcataactagaccatgttcaggatgttgatacgtaatctgatatttgttgagataacgttgaaacatgtcttctgggttcatgagcaattcctcctcggattggttactagtaacggtgagccgcagtttagtttataacccaaaccagacgacccaaacaaaaaagccagccaggcacaatagcgcaataccaatgagtgcccagatcgtaccgttcagctttttggtgtggtgatagtagtaaatactgagtatgccacacagtatggcaagaatgatgctggtgccaataattaaaccaattgtcaattccataaattactttcgactcctcatattatcactttaattgtgcattaaaatgcgataaagtgcaattatttatcaggattcttagtatggtaagaacgctaagcattgcatggtgactgagtagtcttgggtggcttgctgatgagaagccacccaagactacttcaatgataatcgatcgtaaaataaaaaaactaggctgcttatgattaacagcgctagttttgattaatgacagttagttagtcgtttttttagacaaaagggttgcaagcaacaaaccggcgagcgctaaaataaacgtaaagtagaacccgtaatgggcaccgttgacgaacgcgctagcagcttgatgacccccattggcgtagtaagaagcttggccaatgcctaataagctcgttgcaatcgcggttgaaatggcaccaacgacttgctgtagtgtgttcatgattgtactaccatcggcggcaattggtcccgttaaggaatttaaaccatgcgtctgtgaaggggacatcgctaatggcgccccaatcattaagataacgtgggccaaaataacgtaccacgttgcactctgcgtggttgtcagtgccaacatgagggcaccaaccattgaaatcaagaaccccagcattgctggagtgcgggcgccaatcgagtcatataagcgacccgagacggccgacacaattgcgttcatcaagccaccgggtaacatgatgaccccagtcaaggcaacgggaatcaacagccccttttgaatgtacattgggagtaaatacatggctgataagataatcccaaagttaatcataacgaggcatgcgccaacccgaaaaccagagatagcaaatgtcttaaggttcagaattggcgattccatggtgagttgtcgatgggcataccaagccagaataaccagtcccaaaattaaggcacctagtacagcgggcgacccccaaccttgatcactagcaagactaacgccaacaacaaggctaccaaagccaaccattgaaagtaaaatggataagaagtccactttcggccgggttactttcgcaatgtttttaagtgaagtgacggcaaagataaaggcaataatcaagaatgggataaagagccaaaaaatccaccgccatgaagctagtcctaagatggctccagcaatcgttggacccacggccggtgcgaacatgatgactaaaccgaccatccccatagctgcccctaatttgtagggtggaaaaatctgcatagccacggtaaacatgagtggtaagatcaggccagttgcgataccttgaatcattcgaccgaataataacacgccaaagccaggcgctgaagccgaaataatcgcaccaacggcgaagtcaatcagggcaaataaaatcacttggcgggtcgtaaaccatttggtaattaagcttgaaagtggaaggacaatcccaatcataagcatgtaaccggttactagccattgcacagttgccgttgacacgtgtagctgagccatcaattgggggagggcaatgttcagtgatgtttcactaaacatcccaacaaaaccaccaattaacatccccatcatggctagcatgggatgggcaacgggaacgcgggcccgttgtttagcttgcgggctactttgtactgaatccattatattgttcacactcactttcctgaatacaatgggttagcataccagaaaattatttttttcgtaagtgttttttctgaaaaaagaggattgatttacggtagtttgaaaaccatcactcaactagtgcgtctgtgactgcaattgtcggcagtttcattgagcgagaaaggtagcacgtaatggttgttaaaatagtgtttttgtatgtaaataggccacctcagtgtcaaactaaggtggcctattataggtggttgctaagcaaaatcaggtctgcaggcggatcagttatgttcaacaatcgttatgttttcatccaagcacgatggttacactttagcttcgaattggtgtccacattgggggcaagttatccgaacgcgaccatgatgacgcggaatccgaatccgttggtgacactgtgaacagcggaaaaagcggtattgccaatgctgcttgacctggtattttaaacggctgaatgggcgaataatcggtgaccaaaagcgctgaaagccgcgattgatcgcaacttgctgataaatctttttagagaacaaacgccagtaactaataccgatgagcatcacggcaattaagagtagccacccggtgcgaatgaaaaaactgatgacgatcaatagtaaagcgagattgtttaaaaagcggtttaacgtatcgttttgaccgtaccgcccacgcatccatgatcgtagtcgctgtaatagttttgagtttggtttcaaatgctgaacccccgtcactaaaataattaatatttagtagcataacatagtttttcaacagataaataatacctgtttgtgccactaacggtgtatacttaagcatattacagtaaatagagggaaaaacatgtcaacacaatcacaaatcacgcaaacgcaggttctcgatgctatcagccgtgcggcactgatgttggagcgccaagacgcagcgcaaagcgggttacaactgttgctcaatgaatttcggcggagtttattgcagacgagcggacaggccgccacgacggtattgtatcacggcaaaatcaagagttacctattacaacatccgagcaattatccagatagcgtcgcggcgttatcatcattattagatcattttgttgcggctcagtaattagggccgtttttttgcgccaatcaagttattaacctaactagtgatgatttgggtagtggttaatggcagtcaatgttgttattagaaagaaaattgcgctatgctagatggtgaaccatgcgagagtgatagttgcttttttacgtttacggttgtaaactacagttaatttaattcgaagggtggtcaaaccattggaagcacaaactaaaattgaaatcagtgatgccgaatgggaagtcatgcgggttgcttggacgttgggcaatgtcacgagtagtcaggtcgctgagatcatggcggataagatgggatggaagacagcaacggtcaagacactgcttggacggctcgtcaaaaaaggtgcgttacgtgctgaaaagaatggtcgagcgttcaattattatccaatggttgaggaacagccatcgatggatgaggccgtgggcaccctcttcggtcatttatgtcagatgcgcgttggtcaaacgttggtggaccttgttaaccaaacggaattgagtcaaacggatatcgccgctttacaggcagtattggctgaaaaagccaaggatgcgccagaaatggtggactgcgattgtgtgccggggacgcggtgttaatgtggttataaacgaatattgaaataacactgaatgtcatgtttggattttcttaatctgaacatgacattttttgagggaaatgatcttaaagatacttggctaactgaacatggggcattcgtgcaggccttaatcggaaccatcagttatagtgcgcctaatggaagggacttactttcaagataggatactcagaaaacagatgaatggcgacaaaaagtcaagaaagtgtttttcttgacttttatcgtctacaattgtaaactttagccataaattacagatgtagacaatccgactaggggaggtcgctattatgaaagacatggatatgcaacacatggcgcaccatgattcaaatgacatgggcgatatggatatgggtaacggtgagatgatgcacatgggcaatctcaagttgaagttttgggtagcgttagttctgacgattccgattatcattatgagtccgatgatgggggtcaatttaccatttcaaatcgtttttcggccatggtccgattatatcgtcgcaattttaggcacaatcctgtttctatacggtgggcaaccgtttttcagcggtgccaaggcggaggtcaaaaatcataagcctgccatgatgacgttgattacaatgggtatcagtgtggcgtacgtttacagtatctatgctgtggttgccaatgacttgttaaatgcaaaaccaatggtgaccgatttcttctgggaactagcgactttgatcgtcatcatgttgttaggccactggatcgagatgaatacggtcatgaatgcgggatcggcggtagataaactagcaaaactgttaccaagtacggcacataagttagttgatgggcaggtccatgacgtggcaattgctgatctagctaatggtgatcaagttcaggtccgggctggtgaacaaattccagctgacggcacagtgttaaatggtgcgactagtgtgaatgaagcgatggttactggtgaagctaagttagttgaaaaacgcgctaaggatcaagttgtgggtggttcagtcaatggtgatgggacgtttgagatgaaagtcaccgggactggtgaatccggatacttagcccaagtcatgaagttagtcagtgacgcacaggcggccaaatcgtcgcaagaaaatatggcggataaagtggccggactcttgttctacgctgccttgaccgttgcaatcgttgcctttatcgtctggttactcgtgggcaatctggcgttagcactatcaattgcggtgacagtgctcgtgattgcttgtcctcacgctttaggattggcaattccattggtagtggcacggagtacggcgattgcggccagccacgggttactgattcgtaatcgggatgcgatggaacaagtcaaaaagttgaactacgcgttgatggataagaccgggacattgacagctggtaactttaaggtcgctgattatcaaagtatcgccgaccggctaactgcggacgcagtcttggcgatgatggccggtttggaaaatggctctagtcatcccttagctgtcggaattcttgctgccgctaaggaacatcagttaacccctaaggttagtcaggatgttcatcagattactggtgtcgggttaagcggcacgattgatgggcagacgtatcagatcgtttcggcagcttacttggataaacaaaatttagcctatgaccagcaaacgttcaatcgactggcaagtgccggtaactcagtcagttttttgattcaggagcagacagtcttaggttttgtcgctcagggtgaccagatcaagccggaagccaagaacttgatcgatagtttgaaggcccaaaacattaccccagtaatgctaaccggtgataatccgcagagcgcccaagtcgttgctaagcagctcggaattacagaagtgcatgcgggtttattgcccgaagataaggctaagctcgttcaacagtatcaggctgatggtagccacgttatgatgattggcgatggtgttaacgatgcccctagtctggcccgggcagatattggcgttgccattgggtctgggactgacgttgctattgattctgctgatatcgttctcgttaagagtaatccaaatgatgtggtcgatttcttggctctggcccggcgaacgacccggaagatggcgcaaaatttatggtggggtgctggatacaatgtcatcacaatccccttggctgctggtattctcgcaccactcggctttattttgaacccgatgtttggtgcggtagtgatgtcattaagcacggtaatcgtggcaattaatgcgatgacgttacgattaaaagactaaggtaaactgattggcgtaaattaatttgtgcaaatgtgtgtttataatgggtttagatgctagaataatagtatttaaatcaaggatgtgaaacccatgtgtactagtttaacgattcaaaccacggcgggtgatcagtttttagcacgcaccatggactttgcttttgaacttggtggtcgaccagtggcaatcccacggaatcaccactttgacagtgttaccaatgcggacggttttgatagcccgtatagctttgttggaacgggccgtgacttaaatggctatatctttgtcgatggtgtcaatgagcacggggtcagtgctgctgcactctatttctcgggacaagctcactttactcagcagactaaggctggcaaggttaacttggcaccccacgaagttttaatgtggattttaggaaacgtgaagagcaccgctgaattaggcgaacggattgctgacttgaacgtgatggaagccgccgcaccactattgaatattgtggtaccactacactggatcattagtgacaagagtggttctacttacgtcttagaattggaaaatgacggtgttcactacatgaagaatccggtgggcgtcatgacgaacacaccagattttgaatggcatctcaagaatttgagtaattacgtcaacttacaacccggccctcatcctagccgtcaatacggtgacatgacggtgaatcctttcggtcctggaactggggcgttgggaatgcctggtgactatacgtcagttgcacgcttcgttcggacggtcttcatgcgtgaacatacggatgcagtaacgactgatgcagaagctgtcaacgcattatcacacatgctgaactcagtggagattcctaagggcgttaagatgcaagataacgggacgccagattatacccagtaccgcgcctatatgagcatgaatgaaccagcattttacatgcaaccatacgcggatcagacgattacgcgggtcgaattgacaccagctttaatgacggccgcgcaaccgactgaatttgaattaaagacaacccaacagttccggttagcaaactaagttggaatatattagggtcaaaatatgaaagcagcaccgttagcattttatgctaacggtgctgctttttttgattctaggcagaatagcactttcaatgacctataataattattcaaattaactttaataattaaatggtggtacactatattatagtttagggatacgtaacttatactcgataatgattacaaataagccttgcattttctttctgaaagatataacatttactaggtaataatgattataaagtatctacggaggcggcaaacatgaaaaaaagaatgtctttggcacagcgggttaatattttgcgagcaagtgtcatgggagcgaatgatggaattctatcagttgccggcattgttgttggcgttgcgggggcaaccaccaatagtttttcgattttaatatctggactagccgggatgttggctgggacgatttcaatggccatgggtgaatacgtctccgtgaatacgcaaaaagattcacaaaaaatggcgattactaagcagaaggcagcacttgccgatgattatgaagcagaagcgtcgctagtcgtacaaaaatatgtcgatcaaggaatcagtaaaccgttggcgcaacaagcaacccgggaaatgatggcggaagatgcgctgactacgacggtgcgtgaacgctatggtttcaatccgaaccagttcatcagtccgtatgcggctggtattgcgtcgatgattgcctttcccactggctcaattttgccattagtttcgatcacctttttcccaccacgggtgaaggtgttagcaacggtgttggctgtcggaattgcattaatgattacgggatacgttgcggcgatgctgggtaatgctaatcgtcggcgcggaatggttcgtaacgtcgttgccgggttattgacgatgatcgtaacgtactttattggtcacttatttgcttaattaaagggtcaaggggagcgagcttatgcaactgacaaggacaaagtctgagaagaccaaacaaacgatggatgagaagttaaactcattacgagcaggtgtcttaggttctaatgatggtattttaaccgttgtgggggtgctgtttagtgtggcggccgccacgactaatcagttcacgatttttattgctggattatctgatttattagcctgtgctttttcgatggcgtcaggagaatatgcttcggtcagcacgcagaaggacactgaaaaagccgtggttgaaaaggagcggcaattgctgaagacggattttgagggtgaattgcatgctgttcaacgccactatatgactcttggcgtgacggaagagacggcgatggcgattgcacgcgatttattaactaaaaaaccattggcaaccgttgtcagcatcaaatatgatatgcaactaggacactatatgaatccttgggatgcagcgtttgcatcgctattctcagcgtcagcaggaggcgtcttcccgttgctcgcgatgacgtttgcaccggctcattggcagtggccggcaacaattatcgcggtgtccgttgccgtggccttaacaggatatttatcggccgtattaggtaagggcaatgtgaagacggcggtgattcgcaacgtgctcgttgggatcgtgacgatgttcattcactactacgttgggacgctcttttaagtacttctgtcttggtcagttcggactagggattgtcaacagtgaaacaatagctaaccaaacggcacttgaagtacggtgtgctggaaacggcatcagtatgggcgcaaattgttaggatcggtacgaacttaaatagcactggggcgggcaattactgtagttacctgccccagtgctatttagttgagggcggtttccgtgtaattgcgcacaattagtaataaaagttcggatttatcgttgcttatagatgatagaacttgattatgataaagattactgaatcttcctaaaaaacaacgctcgattttcagtgagttttaattaagtctcggtataatattgccattaattaaattgaggtagagcgaaattgaaaaatatgacaactaaccgttatatgaagggcatcatgtgggcgatgttggcctcgaccctgtggggagtctcaggtacagtgatgcagttcgtatcacaaaaccaagccatcccggctgattggttcttatctgtaaggacgttatctgctggaatcattctgttagcgattggatttgtgcaacagggtaccaacatcttcaaagtctttagatcttgggcgtcggttggacaattagtggcatacgcgacagtgggattgatggcgaatatgtatactttttacatcagtattgagcgcggaacagccgctgccgccactattttacaatacttaagtcctttgtttattgtactaggaacgttgctgtttaaacgggaactgcctttacggactgatttaattgcgtttgcggtctccttgttgggggtgtttttagcaatcactaagggtaatattcatgagttggcgattccgatggatgcactcgtctggggaatcctttcgggggtaacagcggccttgtacgtagtcttgccgcgaaagattgtagccgaaaattcaccggtcgtgattcttggttgggggacattgattgcgggaatcctatttaatttatatcacccaatttggatcggtgcaccaaaaattacaccaacgctagtgacttcaattggcgccatcgttttaatcgggacgatttttgctttcttatcgttgctacatagtctacagtacgcgccgtctgcggtggtcagtattgttgatgccgtccaaccagtagtgacttttgtactaagtattattttcttaggcttacaagtgacatgggtcgaaatcctcggctcgttattggtgattgtcgcgatttatatcttgcagcagtatcggagtgatccggctagtgattagttgtaatgatagttatcatttttgtttagtgagggcccttgaataagggctcagcaggacttgaccatttgtgaaatgaccaaaaataaaagctgcgtgtcagaattttaacattctgatgcgcagctttaatcataatttgagtagattaaagttatcttgggggacgatggttggtaagttgtgctacgccaacaccagtttccgggcgggggcgtgcattttaataacttcggcacccaggtcaatataaggctgaccttccgcaatcaatccgaacttctcgtaaaacttctgggcgtgcgtttgggcatcgatttcaatggtggcggcgctgtaatgcactttaagaattgccatgacgtgattcatgagttgcttgccaaggcccgtcccacgatagcaactgtcagtcgttatccggccgaacgaaacgaccccagcatgttcgtaaattcgtgcataagcgacgagttgcccctgatcgtaggcgaagacgtgacgcgcgtccaagtcagtatcatcagggtcttggtaagaccgatcttgttctttaataaaggtcttggcacgaagttgataaatatcgtgcagttgggtggtggttagaccattaaattgcttaacgtaccatttcaaattcaagtgaaagcctccttgaaaactgaagaatatcgccagttattttcaaattgagtctataatttaacacttgtatttttgaccgtcaattgcaaagacccgcgatttatcaatggttacaggtattacttttgatgaaaaaaacatgagaacggattgctggttataccagtgaattgatagcttgattatcagtcatcgttagttaactgtctagatattatcatttttctcataatttgatggataataaaagaaccaccacgcattgcctattgtggtgattctggttgatctttaaattgtttttttgacggcctggtaattaattaataccaagcaggtttgtcaccatcggtattaggtttgttaacacctaaagacgtgcgaatgttacttgtgggatcttgggttaatttaacgacgagtgccgcaatgctcttacgagaaacttcagttcccttaaacggatcgtgtcgctgggttatttcgtagtcgatttcgtccttattagtcaaccacgcagggcgaatgattgtgtagtcgagatcggaattttctaggacttcagccgcggcgtagtagcgcgtcaggtagctacccaacgttgcgttgttccattgaccgaacttgccgggaacttcgtcatagatccctaaagttgagatccaaatgagccgtttgaggccgctggtatgcatggcttttaacacggtttcagcctgctgtttgatgttttgaccagccaaattagcataaacgacatcttgtcccgtcatcgcctgggttaatttggcttcatcagtcgtatcaccatcgataatcgtcacccggtcagattgttggtctgcgacccggctactattacgtaagtaaagtgtcaaattatcagttgtgttggctaaaaattgctgttcggctaaacgagcaatttggcccgcagcccctaagatcaatacatttgtcatataatcccctcctgaacatattaactgtaaacttaattattacagaattcaagtaagcaatttcaaaaaagttaagcaaatttgtgccactttttgaatttagacttataatgaacatgtagcgaagttgtacttcgctgtccaagataaaagaggcgataatcatggcacaaaagcttagcaaggaacaaaaaaaggctatgattcaaaaagccgaagaagaacgtgcaaagcatccaaagaagaagagtggcgtttccggtttcgaaacgatcgatgaagatgctaaaaagttatctaataactaataattagcgtgattcttcagttagggcgagacattggtcgcgcccttttattttgtccaaaatgagtgcacgggatcgcctggtgatgattgactggttcgagcaaaattgcagttggcacggagactgatggtcggttgttagcagtgctatgacagccatccatttgaatagctgtcacagcagtcttgcagtataatagcggtaattaatgatgggggtgacgcaaatggatcaatttacagtgtttatggcgcagcttgataagacgttggcacaagagcaattatcgtctactgatctggtgtacgtgccagtaacctttagcttccataatcagcgcttacaggttgccattaatatgctccaaacttcatttaatcagggtaataatgtatttggggtgcctgatattctggatcgaatcagaatgttggtcggtttggaattagctgattgcccgcagtctcgctggcctacgaagataacgacccagcaactaacaatcacgccacataaaatggtcagggtgatcccagttgatatgcgggcatatcaagtggagtgatttagcactctaatacggagagtgctaaattgttgcaatcttgatgaaagtgcttattattaatgatgtaaacaaattgaaagggtgatttcataatggctaacgatatgatgaattggcacaatgatttatttgatcggttgaatgactggactaagatggacgatttggttaatggattcggtcggacattcttaaatgctggtagtcatgggtcggtcctaaagactgatattaaagaaaatgacgatcagtacacgatgaaagtcgatgttcctggaatcgataaacagaatattgccttgaagtatcgggatggcacattatcgattgctgtaaaacgcgatagtattagtgatgaaagcgataaagatggtaatattatcgcgagcgaacgtcaaactggtcgctttggccggcagtattctttacccgacgttgatgttgacaagatcgaagcacgatatgaaaatggggtgttgcagttaactttgccaaagaaggcagctgcggatacccatcatattgaaattcagtaatggtttatatgacgacttgccgcgattggtggcagggcgtctttttattgtatttatagtggatgaaacggttacaaaaatttgtaaatttttgatgaaatctggagtcagatactcacatctttgctggatttctggtacaatttaatcctatcgatatatcaattgaactgaatattgataatgataggatatgtttgttgtcggatttgtaagaaagtaggaatgcgtgatgacggaaggttttagaccgagtcaccctaagattgagattgacgatgatcctggaatacgggctcaaatcgaagctttgactggtgaactctcacaacaacaattggctaaatgggcgttaattatcgccaagaaagccttgcagtatgttgataaccaacagaaatatgatcgacaattgcgactcgcaattgatgctaatgaattgtggcaagttaatcttgttagtggctaccaggtacggcaggcactggcacgattgactaagttaagtgcaacgacgacgagttccattggtgcggcggcactggactgcgttcgctgggccgtagcttccgcagatgcggatgaaaatgcgctgcgggcctcggaccaagcaattaaattggttaatttaacgcaaccaaatgacatggttgcggtcactgccgagcgtcagtggcagtacgatcagttagctggattagcagctaacattcagcaggggttacgccgtatgctataatcttcacagagattaaattaggtggggatattttatggcaacggtacatgcagaagcaaaggcggagttgttacgtcagtatcaagaaattgtaacgaagtatttaacgaatatttcggaaacagtggacgtgaaggcgcattttgaattaaaaaacgaaccaggatttaattattttgtggattatttgtttttagccaatgtttgttaccaagcgagtctggatattttgaataatgaagatcaaaaatatccagatattaataagcggctagcagaggtcatcttaaaataccccgagtatttgacattggccgttttcaatgccgatttccaggatgaaagtgtgacggatcactacgaaaaaacactcgtagatttggctaacactttggattaatttgtaaataaggtggtcacgaacttcggatagacgaagcctcgtggccttttttggagggttagtaatgattgaatgggatgcggcaacaattaaagattttcagacgacgctattagattggtttgatcacgaaggccgcgatttaccatggcgacatgaccatgagccttaccacgtctgggtctctgaaattatgttacagcagacgcaggttcaaactgtgattccttattatcagcgctttatggcactttttccaacggtagcggacctagctgccgcacctgagtcacagttgttaaaggcgtgggagggcctgggttattattcacgtgtccgcaatatgcaacggtgtgccaaacaattgttaaccgattacgatggacagtggcctcaaactgccgctgagctgacggagttgattgggattggcccgtacactgcaggagcgattgccagcattgcgttcaatgaaccagttccagctgtggatggtaatgcctatcgcgtctttagccggttgctcaagattgacgcggatattgcgaagccccagacccgcgctgtttttgaacgggtaatcagtcagattatttcacaagagcgacctggagattttaaccaggcgattatggacctcggttcaagctacatgacagcgcggcaaccagatacggctcattcgccggtcaaacgctttaatcaagcttatttggatggggatgagttagcctatccggtcaagacgaagaaaccgcggcccaagccggttgcttacgtggcggtattagctaagatgcaggatcagtggttgatgacgaagcgaccgagtaacgggatgttggctaatttatggacggttcccttgattccgattgcagatttagacttagatgatgattaccaacctgaagaactagttacggcggtagaaaattattttaaacgtgaatatcagctccagctaacggcccattatctgaccgggcagcctgtgacccatacgtttacgcatcagaagtggaccattcaaggtttgagtggtcaagttgggttaagtgacttagcctactttgctggtcagacctttacgttgattgagcggcagaaacttccaatgcctaaggttcaagaaaaaatttttgcacgctattcaattgattaattcagtcaacattaaatacttttcacccttcagatgtgctatggttgtggtagaatatagcaaatcaatattgtgacggagggtcgcgcatgttaaatgtatttgatatcgttaagttaacaaagatagaccataaagaagtcgacagtaatcaagtggttgttacagatggtaacggtaagcccaatgcgattttgacagaattattgaatgatgttgtgggaaatatgcggatctttattaacatggaagatgtttattcggtcgatgacttaatgcgcgcattggccgcccatacgccattgccacaagatgtcttagaagaatatgaaaaggtattgcgggaaccgatttataacattaattttgtgccgaaaaggggccaagttgaagttgtgatcggtgaaggctaacgtgattgtcataatcatgataagatgttagtcaactcattgtgatgaaaatcagggccattcgtgggacctgatttttttgtgctgaattgatgatagtggctgtcacgaggactgatcaatatgtggttgcgggaaagtgttggttcgatttaacgataccggcacctgcgttataatggagtcaacttatggtcatgaaatgtgataggttattgtaaatggtcatagattgtttaccgcatcgtacgataggaggagtgctcattatgcaattaaaattagaacggatttacacgaaaccagttgatacggatggttatcgggtgttggtagatcgcttgtggccccggggtatttcgaaggttaacgctcagttggacaattgggtaaaggaaattggcccgtcgaccacgttacgtaagtggttcaatcatgaaccggcgaaatatcccgaatttgtcgatcgttaccgggctgaattggatgagaatcccctgacggccagctttattagtcaagttgctgaacaactgacgaagacgaatgtgatcttattgttcggtgccaaggacgaacaacataatcaggcagtggtactgcgtgattacctgaaggatagtggtcaattaccaaccgcttaatataaattgcgtaatattggtatagatgaaattgggattaggcctgcaataaactgcgctcatcaaattattttaattattttttgaaaacgctagcaattagctgcgaattttgctatgattatgttgttaattaatggcgtcaactattacagtgcacaataatgggggctgcattgttaggcaagcaagattggggataattttatgataaacttatgtgtgttaccaagtaccgcaagttgtcgcaaggcccaccggtggttactcgaacaccggatcccgtttcatgaacgtaatatgaatgcacagccgttaacggagactgaaatcaagcacctgctacagtacacgtacaatggcattgatgatttgatcagtactaagtccaatgcttatcaccaactgagtaagacgacaccgattgaagatatgccattaagcgaagctgttcgggtattaagccaaacaccgcaattattgcggcggccaattatttttgacgatcaccgacttctgtgcggctttaaccaagatgagattcggatgtttattccacgtgaacagcgcgtactcaagatgcaagcaatgtcagaacatcagatggcttaaaatgatcggcttatgagttgatgccgtgtttttggggcgaaacattataaaacagtactacttacttgccagcataaactgattgacacagttaagcggtactgttttgtgtgtaaattgacaaattatagctatttagttagtatactaactaaatagcggaggatgaaatggataatattggttatttactaatgcagttttccaaacagttacgttatcagctaaatcaacggctaattgctaacggattgacgattcaacaatgggctgtgatgcaacaaatcagtctttgggtcgaaagaacggcgcaacagccgactgccaaccagctgtgccacgttctcgatatggaccggccgacgatgtcaggaattcttcgacgcttagctgccaagcaattggttgaacaggacgttaatccagcggatcagcgagcaaagctactacgcttgacccaagttggcatacaagaattgcaggccggtcagcgtattagcgatcaggtcgttgcgacggggcttcagaaattgacggctgctgaaaaacagtctttaagacaactgttaaaaaaactagggagcaattaataaaatgaaaatactggtgataggtgggacgggaaatattggcttaccgttaattcaatatctagatcaacaggtgggggtgcaagttgttgctggtgcccacaatttgcataaagacgagcaactattggctgcgtattcggatgttgaaattcgacgctttgattttttggacgagacgacctttgatgcggggttacggggaatccaaaaggtttttttcgtgcggccaccacaacttgctaaacccaagcaagatatgtggcccttcctaaaatgcttacaagcacaccacattgagcaggtcgtatttgtttcgttgatgggtgttgagcataatccaatgacgccacatcatcaaatcgagcagatgatcgaacagttacagttaccgtacacattcattcgaccgagcttctttatgcaaaatttgaataccacgcatcgcgtcgacattcagcaaaatcacgatttgtttatcccagccgggcggtcgaagacgagttttattgatacacgtgatattggtgagattgcgggcgtggcgttactagatacacaatatttacaacagaaattgactgtgactggtccagaagcgttgacttatcagcaaattgcggcgctaatgactgaatcctgtggtcacccggtaacgtatcatcgaccgagcttatggcggtttcgccgcgtgatgttgaagcggggaatcaagaaggactatgttaatgttatggtaatgctgtatttgattacccagttgggcaatgctaaacgcgtgaccgatacggctgaaaaagtgctgggtcacgccccgcatacgatgacaacttacttacgagattatgcagatcagttacagtagttaggtcgaggagtaggcatgtcatttggcagttgtgggttaatttagtggtgagcatggtcaacaaaaaaacagttacctcattttgaagtaactggtttttagcggacatatccagtacagactagctaattcaagcaaacaggcattgaagtaggatgtctgctgatttttataagcgataacgactagcaaatacaatgcttaggcatacttatgtgcaattttagccgcaacggccgccgcaatcgcaccaactaggtcatcaataaacgtgttaacaacgcctgacttatcagtatctaacttcttaatgacgccttctttaactttatccacgtaaccataattagtgacgccgatggtgccgtaaatattcgccatattaagtgctaagccttcatcaacaccgaagacgccggcgtcactggcaatgatagattggagcggctcgtttagctggccttctgtggcaagtcggtcgagttctaacgcaaccatcgcattgttcaatagttcgcgcttgtgcagtacttcttgcgtctccatttcgcactcttcgatcgttaagttagggacgtattttgtttgtaagttataagtgatatgcgcaatttcatgataagtaatcccttttgaggctaaggcttgaatgacgaactcatacgcagccttatcaggatatttaaacgttggtttttccatagttaccctccagaaataaacaatttgagtaggttagttatttaacctagtaagtccattataacgagatggggggctaaagaatatgatttgggttcaatattcgttggtgcgggttaaaaaggcgattgttgaaaacgatgactggttattttaattgaaacgcgtaaaataagactgttaaacataatgaagggtaagataattttgatgaaacgttggcgaacggtgattcaattgttattgattgtttttgttatcggtgcggctgtgattttagttggggcccggaatcatgataccaagattacgaaagtaacgagtcaattgacaccgcgttctgcacgaatattaaagaatcaatatgaccagtcaaagacagcgacggtctttttacatggctacaatggtggggcgtattcgacgaactatctgattcgtaaagccgaaaaagcgggggctgcccaaaaagcgttagtggtgcacgtgtacaagaatggtgtgatggcctttaagggttattggcaaaagtcaatcaagaatccgatggttcaagttgtttttcaagataatcacgcttcacaaaaagcccagatttattggttacaccaagtcttagtccaactaaaagcgaagtatggcgtcaaagcttataatgcggttggtcattccctcggggccaatgatattgtcaatcaggcattgaagtatgggcatgacaaacgcttaccaacgttgaataaaatcgtgacgattggcggaccgttcgatggcctgaccgggtttctgagcacgcagacggaagcaacggtccggcgcttggatgttaaaccaagtcgtttcacgaagcatttttcagaaatgctcaagtatcgccacaattttccagacaacgtgaaactactcaatgtctatggagatacaaacacggggtataacaatgatggttttgtgggtgtcgcttcagcgcgctcaattcggtacttgttgcgcggaaaattaacacagtatcaagaagctttctacagtggggaacaggcggcgcattgcgcgttgaatcagaatccaagtgtcgctcacaagatgattgcctttttgtggtaagtgttattgtgtcaggatgggtgcattaaataaatgaggtcgttcgggtaaatgctcgggcggcttttttcgtagcgccaaattaggcggtcaaacgcagaaactacagctttggtgacgttttcaataaggaagacagctttagaaaacaaagtattgcgacctattcgtcgttaaaaacaggggttaacagttaaaaatcgcaattaagtgaaagctagagcgtgctataatgacacaacattaaattttaacaacaaagtcattaaaatttgtggaggggtcttatgaaaataactaatgctgatggcacgatccgggcgcttagtaaccggcatgtccaaatgattgcaattggtggcacgattgggacaggattatttcttggttcagggagtacgatttcaaagacgggaccgtcagtcatgtgggtgtacttggtgttgggcttcttcttctttttaatgatgcgggcaattggtgagatgttctattctgatcctacccaacacacattcgtggcgtttatttcccgctatttgggaccgagtgttggtcattttacagggtggacctattggatcggtttgatttttgtctgtatggctgagctgacggctacggcaacgtacgtcaaattttggttaccaaatgtccccgcctggctaattgagattagcttcctgttaattttggcgggcgttaatttaacggctgcacggttatttggcgaagcagagttctggtttgcgatgattaagatcgtcgcaatcgttgcactgattatcactggtattttcatgatggtgggacatcacccaaccccattaggccaggcttcaatcggcaatttgttccataattatcaggtctttcccaatgggctagctaactttatctcggcatttccaatggtcttctttgcttttcagggcattgaatttgtcagtataacgattggtgaggccaagaaccctcaccgcgttatcaaaaaggcggtcaatgaaactttgttgcggatcttgttgttttatattggtgcgttaattgtcattatgggcattattccgtggacatcactgtcacccgatagcagtccgtttgtgcaagtcttcaagttggcaggatacccagcagcggccgccatcattaactttgtcgtcttaacatcggcagcctcatcgctaaatagttgtttgttctcagctggacgtcacttctatcagctagccactgaaatgccagttacgagtcgcatgcaccaaatctttggtcagatttcgaaaagtggtgtgccagcagcagcaatcgtgttgtccgcgatactagtgctagtgacccccatcatgagtttaagtgctgcaacaacggcagtttttaccgtcgtgaccgggatctctagtgatatgtacctgattgtttacacgctggcgatgctggcccaccggaagtaccggctatctaatgactatctggcggatgggtttaagatgccggcgtaccgaatcacgagcccactgacgattgccttttttgttctcatttttgccagtctattcttcattcaagctgatattgtcggtgcaatcggtgcgattatttggacgttactatttggtggcatcacttttgcccaccaagcgcgcttgcgagctgtaacacggtcgtaatcttaaaatgagaattatattataaaatggcttgacgatgataaaaaatggtggtattgttaatcacaagttaataactgtacgataacgttacatcaagtagacatagtggtaggtgtcaggaagccggtggttgctgcgaaccggtcagctactatgattgaaatacggtaaccgagtttcgactgaacggataataactagaaccgttatcttctagtgagtggtggattaagtgtcaataatccgcaacctgggtggtaccgcgactagtctaatcgtccctgttgttcatatgaacaatggggacgatttttttgatgaagaggatgagaataatgacaaatcaacgctgtggtgggattgcacgatattaaaattttgatgatgaatatgcgtcactggaattttatcaatcgaaggggtaataaattatgaacaaaacaaaagcaccacaaattagtaccttagaagcagtcattgtcttactggtcgtcctcggaattatgagtgcgggtgtgattggttggggattatcgccccaagttcccgtattactcgcaatgggcgttgtcactgcttgggcgatgttgcgcggttttccatggtcagcagttaatgccgggattaaagagggcattgataaaggaatcgtgccaatcttcatctttattctcattggtgcgatgatttcaacttggattgcggcgggaacgattcccacactcatggtgattggattcaaaatcattaatattcagtggtttttgccatcagtctttattgtttgtaccctagtcggtgcggcggtcggcagtgcctttacggtaacatcgacggtcggaattgcctttttcggcatgggcgtgaccatgaatctgaatccagccttagttgccggtgcaattatcagtggtggaatcttcggcgataaattatcaccattatcagaaaccaataatttagcttcagccgtagtggatactgatctttttacgcacattaaacatatcttatggagcacgctaccggccgggctcatttcattaggcttgtttgctatgctggggcacagtaatacggagacaagcttagccaagatcaatcaaacagttgcggttttaaatggtcatttcagtatctcagccttggcattattaccaatcgtcttagtcttcatttgtgccgggtttaaaatgccagccattccaacgatgcttttaaatatttttatttcggcgggcttgattctatttgaacagcctgagttatcactggcgaagttaaccgccattattaacacgggatttgtttcgaagacggggaatacgagtgttgatacgttgctttcacggggcggaatcgtcagcatgatgagtatggtcgcgttaattgtggttacgctatccttaggaggattgttggtcaagtttggactgatcaatcaaattatgactccggttgctaagcacttgaatagcgatggcaagttagtattgtcgggtgtattaacttgtattggtgtcaacgtgtttgttggtgaacaatttctttcgattatcttaccagggcgcgcttttcgccaggcattcaatgatggtggcttatccggaaatgcactggggcgggtccttgaagatggcggtacggtaatcaattacctagtcccgtggggcgttggcggcgtcttcctgacgacgacgctgggagtaccaaccgtccaatacttaccatttgttttcttcagtttactttgtccagttatctcggtaatcagcggtttcactggtgttggtatggcgcacttgaatcagcgaactgcagtgaaaactaagcatgtgactgcaacggaggtttaatcgttggtcgatcagttcactttagggaaggttgacgaatggctgttaaaatagttactttatgtgggtctagaaaatatgcggcagtatttgaaacggttgagctggctctgagtaaacaaggtgttattgttttaaagccagctttcagtgatgaagtattaacaccgattgagcttcagaatttacgccagacacatttgaaaaaaatcgacttggcagatgaagtagtagtcattaatgtcgctggctacattggtgagcggactaggcaagaaattggctatgcacagcgtcaacataagagaattcggtattacgcagttacggaaaacgagcattaattaaaatgaccagtatcgaagaatatcgatactggtcattttgcgttgatttagtaatctttacttgagtttagtagccgcttgaaaatctgcgtacatgggatggttcaaattgatcccgcgtgatttggcaatgaaccaagctaagacttggaacgggataatcgcaagtagtggggctttatacggatcagcaacggcttcgagctggagggtttgatcatcattgatggtcggctggtcaccagtgagactgatggtataaatgtggggcgttaatcgcgattcgtacgtcttgacggcctgtaattgggttatgacagctggatctgtattgatttcaagatagaactgacagtgatcttcatgcgtccccataaagccaccgtgggtaaatgaggctaatgagtaaccatgcgttggtacccggaggatttcggtgaatttggcttgcatttcagttagtgttccagctaggacgttagcaccgatagctgtaaattgaggggcgttagtgaaatcaatagtgaacttacggtagaagtcgttcgcccgttgaacagttggattcatgctttcaatcagaaaactgaactcgtctaattcttgattgattgctaattcggttaaccgtgcttgaagggcagcactgcggacggcaagcaacattaaagtgagcacgatggcttgaaagcttagtgtaatatagggcactgattctttgccagttagtaagtcacaagttgcatcggccattgcggtcagagcagtcgatttttgattagtcacgataatgacatgagcttgactggccgtgtgggctttttcgattgccgcttgcatggttggatcatcatcttttagagaaatcccgataacaacatcgacactgggatcagcttcctcataagtgacgtagaggtcggccgcagcaatggtcacttggagggcggccgtcttttgcatgtataagcgggcggtgttggcggcgttgagtcttgaaccagttgcgaggatcaaccagtgttgtggatgatcaggggtggcagtcaaggccgccgtaatctgtttgggataattggttaacaaccgctctagtactggctgttcccgacgaatgtatgagagcatggtcggattattcatcatcatcaaaatcatcagctcctaaaaaatagttatgtatattaatattaatttagctttattgtaaacgtaaatgaacttatagtcagcaaaagaatgtttaaaaatatgactgttgattaatcgtagcgggtccgctttaaatcaaaggcgactgctcgcaaatcattataaaagacgacttaacggccgacggttttattcacgggcttgccattatcggaacatgttgcgtttcaatgtacgcagaacaacatcctaatcagcattctggttagatggcgtcaccagtaagggaccttgtcgcaaatcgtatgccgttcatttaaaatgccagcgctgtttgtggcagacccgacattgatttaggtgaatattcatgtctagttctaagttcattgtaccaatcatttatgataattagggcttgcatgtaactgaaaaggctggtaaagtaaggaacaatttatcaatacaactaattgcctatataatgccatgatatggatggcgagtttctacccagtgccgtaaacactggactataagcgaattgagtcgatgggtctacactgcttaatttgccgtgtggacccgtttgctttctccgtaggcagactgactagtgaggagaaaataacgatgacgaagacagttgaaatggtgattactggtgcacaagtgttaaacgtttatacccgtgaatttgaagccaccagtttgtggatcgatcacggccggattattagtaacttgcgtgacgagccgtacatagcggcccagcatgtcgatgcgaccggtcagtggatcgttcccggcatgatcgatgcacatgtgcatatggagagttcgatggtggcacctagcgagttgggaaaagtcttactacagcacggcgtcacgacaattgcgactgatccacatgaacttgccaatgttgcgggtattgctggcattcagtacctaattgatgatgcgcgccaaacaccactagatgtctgttttatgctaccgtcatcggtaccgtgtgttccctttgatgataacggggcaacgctacatgctgctgacttgcgcccactttaccaacagtcggaggttcggggactggcggaagtaatggactatggggccgttgcgcgtggtgatactgacaccctggctaaaattagtgatgcctatgcgtatggctatcatgcggatggtcacgctgccggtttgaatgcgcaccagctcaatgtgatgcgcaatgcgggactggatactgatcatgaatgtatgacagtggcggaagcacaggatcgtgtgcgggctggtatggctgttttcttgcgtgaagggacggttgaacgcgatgttttgccgacgattggtgcagtgaccgaagctaatgctagccggtttgctttttgtacggatgataagacgattagtgacttgctcacagaagggtcgattgattataatgtgcgcctagctatgcagagcgggatgcgtcctgaactagcctacacattggctagtctcaacggcgcgatggcgcatcgtttaagtgatcggggtagtctgtcagccgggcagttggcagatttagtggtcttagatgatctcgaacacgttaggattgcgcggacgatgaagcggggacagtggatattaccaagcacgacaaaaccattgccgtttactgcaacgcgtgttcagcaccatgcacaactagccgacttccaattaccactagcgaccgggttggcaaatgtaattggtgtgcagccgaaccatatcgagacggatcacttaacactcccgattgatgcaacgcagaattttgaagcggattgccaacgtgatattctcaaaatggttgtcatcgagcgccatcataacacgggcaaggtgggcgtcggcttagttcatggcttcgcacttaaacagggagctatcgctggtacggtggcacatgatgctcataatattgttgcggtcggaacgtcggatgccgcaatcttacgggcggtagcccagattacccaagataacgggggaattgcggtcgttgacgatgaacaagtgctagcgaccatgccgcttgccattgggggcttgctgtctgcagcgagctatcaaaaagttgctgaacagttggccgaacttaaacgagcgtatgaggtcattagcgagcggccacttagctttgatccgttcattacgctatcgtttttgacattacccgtgattccaacgttgaagttaacggcacgggggttattcgattacgcgacctttgactttattccagttgcgattcaggataaccagcgtcaaacagtttaagtgcaatcgttcggtgactgaaattaggctatgatgtgtctgctactgaacaacgatgtagtttaaggtttgtgccgaaatatgtttaaagccccgcaatagctaaacgttttagttagctgctgcggggcttttactgtggttttaatgggctaaatggctgctactgtgaagcgtcattaatgcgggggtagctaatgggattgccactctcataagcgggaagatcagcgattccgcggtaaacggctcgttcaatctgctgcagcccgccgccatcagcaatcgtcattttaataccgtaatgcttgacagctttattcagtgttttggaagtggcgtgtttattctgattctgaatcatgaccacgaggtctgcttgaccgatttgccggtaatagaagttggtgctattactgtgtttaaaagcatcaatcaataaggtgtgcccgttgtgctcatcaatgagttgcgtgatctgtgttcggcgcgtaccaacgtcgcccatgacgatggcaactgttttttcgtgcagatcaaagtctaaggtgcgcagcgtcactggcacggtggttgtgtggatagtggcctttttagctggtttggctgctttattcgaggtcggttgactcgagctatgatgaacgtaacgaataaccaccttctcaggccgctccttataccaagccaggtcgactaattgaccattactgatgcgctgatattgcgcttcttgactagtgaacgtaacatcgttcattgccggattgagcgacgataaggttgtgccgttataatcttgttcgatgtgataagtatcatcggtgtcttgataatgaacaacgaaaaatggtgcgacagtaatcggatccgctgtagtagcgtgactaacgattttatcaatataaggttgtcgatgttgccgtaaattttgttctaacaggacctgatcatcgtggtgaatcaccagttgtcgggccaaaatttcatcgtagtggtagcgtggtgtgccggtcggatcattggggtcgactaaatcaaacccctttaaatcgcgctttacttgcatgattgtttgcccattggattgtgcagaagttgttttgacggatgatgatgaatcttccgcgtttgcttgcgtagcgtggccgctggtctcattgtgtgagttactagtggctagtctagctatgcgtgcattatccgaatctacgatggtatcaggatcaagcgccaggtttaagatttcctgaatcgctttggcacccttggcgaggccttcatcggtaggtcgaatcatggtcaatgttcgggcaatggcggtacgataatcgcgatattttttcaaattaggacctccgttattatttagtaaattggtcagcgcagacatggttctgtgctggctaaaaagatatttggtacagggtcaggtcataaccaacgatatgtatgtgttaataccacgagccaaaatgattgtgttatgctggtttaaagaaccaagtaggtcatcaattgccagtacttatcaactattgtgccatagattgtggctggacgggtataaaaaaacaataaaaacgagttagtgaagtcttttcaagattagctgagctttagcgcaagtattggctgattgggacaatggcaattgttgtgaaaggtcggcttactaacacagcaatggtcaattgaattggccttacgggtgattacttataaaatgatatagcggctatcagacgacaacgagtgcgttgacttgtttgtggattgcaatagtcgagcatcacattcaggataagtgggaatgaagttggaggcgcagcagatggcaagagttagatttgagaataaacgggtcaatatgagcaaactcagtcagtttggatttgaacccaatcagaatggtcagtatcagttccgaactttaattatgcaaggccaatttgaaatgataatcgagttgaacactgatggcagtctgaacacgacattaacggatacgacgactagtgaagtatatgttttacacctgacatcccaagcccatggtcagtttgtaggtcaagtagcgcaggcttatcaagatgttttatacaacatcgaacagcattgttacgataatgacgtcttccaatcgaccccggagcgtaagctgattgcgcaagtcaaagctgtttatggtgacgatcttgagttcttgtggcctaaatttccacaaaacgcggtttggcgacgctcagacacgcacaaatggtatggcgcattattgacggtaacttccgataaactggcgttgccgggcgcaacacatgttgtgacggtattagatttgcgagcgcgcccagaagacttatctatgctgattgatggacaacattatttaccgggctatcatatgaataagaaacattggtattcaattttgcttgatgatgtggtaccacttgccacgattatggacgacgtaaaagttagttatatgttggccaagtaaggcttgaatgtaagtggacggtctcaccctaaaccgaagcattgagcattaactaaaaaaatcgttcccaagaagacatctgggaacgatttttttgattaatgattggtaaaaccatcgttagtgactattagattgaataattagcgcgaggcatggtgccgactgcggtaccaatcgaaggcgagcgttaatagcatgtaagcaaaatcaacgagaattgcttcttttagtggtacgttgagtaaaacgactgaaacgaacgttaaaacaacgacaaaagtcagtgccgattgtgcccatcgtaagagccattctggcatggttagctcacatcctttgttatgggagttgtggttgttgatgagactgatgattgtggccgatcccgtaatgcacgtagcgcccaaagaattgagaccgtatcaacaacttcttgaagcatagcgccaaagagtgccggaatgataccagtgctggcaatcaacatcaagatcgtacagatagcaatcccaatccaaacggcttgtttagccacttgcatggtatctttagcaatgcgcaccgccgtgaccacgcgactgagatcgtcttttaagatgacgacgtcggccgattcactagcagcagttgagccatgggcgcccatggcaatgccgacgtcagcaacagccaaggaaggcgcgtcattaacaccatcaccaaccatgataacggggcgttcggccgctggtacagcctttaagtgggcaatcttatctgcgggtaggaggtcggcagcaacggtatcgataccgacatcggcggcaatatgatcagcaattgcctgttggtcaccagtaagcatcatgacgttttgaacgccctcagcgtggagtgcttgaagcgtggcggctgcttcggggcggacattgtcgataaacgtgatgtaacccgcgtactggtcatcgatgccgacgtagatagcagtagtagcaagtggcttggcggttgtagtcggtgcgacgaatttaagtttgcccactttgacctgttgctgctcaatcgttgccgtgaccccattacccgttacttctgctaattgtgttgccgggctgaggctagtggcactcgcatacttgacgagtgagcgggccaggatatgacttgagttttgttcagcgctcgctgcgaggtgcaagatttgttcggcagtaaaaccaggctgaggaacaatttggttgactgttaattgaccactggtaatggtccccgtcttatcaaacgcggcggacttagccgtagataacttctccaacatgtccccagtcttgaccacgattccgttccgactagttcggctcatccctgagacgagtgcaacgggtgcggcgagaatcagcgggcaaggtgaagccactacgaggacttctgcaaatcggtggggatcaccgctgaatgcccaagctactccggcaatgacgtatgctaccaaggtgaatgggactgcatagcgatcggccagccgtacgaatttggctggtcgtgattcggattctttaaccaatttgactaactgttggtattgactatcaatggctaatttatcaacaaccattgtaacggcactatcgccgttgaccgcaccagacataatgtcatcgccaacgtgcttgtcgactggtttagattcacccgtcaatgaagattcatcaaagagtgccgttccttgaataaggtgaccgtctactggaactagctcaccaggtttgacgactagctgatcaccaatttggacatcttcaacggcaatatctgttaattggccggcgactgagcggtgggcaatacgtggtgaattatcgagcaaggctttcaattcggtattcgctcgtttggccgcataatcttctaacgagtcacccccagtgagcataattagaacgacaaggctagcccaatattcgccgacagctagtgttgccacaatcgccgtaattgctaataaatcaaccccgtacttacctgaacgtaaggttttgatcatctcaactaacattgataaggccataagtgaccccattaatgtaatgatgatttgtgctgccaattggtagtgcaaaccaaactgtaaaataaccgcaatgataccgacgctgaccgttaaaattaatttatagtagtgccgcatgcagttcccctccttttagatgataacgtttttttacttgttacaagaataacatgaaatcggtttaattgaaacagataagaatgattctaaactaaaaactaattattacgaaaacttttaaaaagtttcagaaaaaatatgggtgtaaaactcgtctaatccttgacgggttaggcctcgacggctcaaaatggttgattttacttctgatttaatactagtatacttataaacgaacatcagatatcagaaaatactgaaatcagcatttgtataagccaacgtgcgctgtgcaggtggtaacttgttacccggtactaagcgcttttttggtgcaccaagcaattaatctaacagttgtgcggtgggcttatctggtgattcaagggggttatctattagcaagagcagtgtaaccattaatcgttacgtggtgtgacgacggtcgtgtgctaaaggcacgatggtaatagaaacactagctaaacaagatgaacaccaacgtcgattaagcaattaaaaatcatttgtcagtatggcgttgtccggattcaaccaacggaaagaaggaaattctgctactgattttgagttagcacaaacagaatgcggatgacaatgccggtcaaacctgatacagtcagggtgctgagtgctccgaggattaactcggaggggtgtaccgattgctagtcggaaatttacgcgtggggactaccattgctggtaggaagaaccacgaatttgatctaaatatagagagtatatgctcagtagcaggtttattattttaaaaagtaagaatattgattggtgggtctatttaccaacaattgggctctttgcggcggcttccgttgttttattaatggggggccattcgctggagacgagtttaagtggcatcttgaactggctcacaaataacatgagctggctttatatgtcggtatatgtgatcacttttatctttttcatttacttagggtttagtaagttagggaaaaccaaacttggtgatcctgatgacaaaccagaattttcaacgtatcactggggcagtatggtttacgcgaccgggatcgatgccagcattttaatgttgagcatggttgacccgttacggtacctccaaagcccttcattcggcgtcaagccgttttcaacttctgcatataattatgcgcacatgctgggacaatttaattggggaccaatggcgtggatgatgtttgcgccagccacgattgcaattgcctatgcaatgtatgttaaacacatcaaggttcagcggctcagtgccgcaatttcagtactacaaggtcctggtaagggtaagcaaattgcccggaacacgattgattttctcgttattattgggattatgggtggtgttggtacttcagtcgggatggaaatccccgtcatttcaaaagttttgagtgccgttaccgggattgccgatacgatgactttaaagttagggttatttgccttattattcgtaattttcgccatggctgtttttaatggcttgaagaagggaatcggtcggctaagtgctgcccatgtttggttagcgattggcttcctaatcgttgttttaattgttggcccaactttgtatattttaaactcggaaactaatagtattggcttgtttgtcaataagtttattacgttgagcacgaatactgcaccaaatggtcacgcaacggccatgcaacggcagacgatcttctactggggctggtggttatcctttatgccagtcatgggcttattcattgcccggatttctcggggccggacgattcgtcaggtactcggtggtatgttgctatggggctcattaggttgtgtcagtttctacgccatcttgggtggttatgccttatacttgcaacggatgggcatcgttaacttagttcatatcttaaatacgcaaggacaagccgctgtgattgcagcagtattgtcgaccttaccattgaagatgattatgctggctttgtactgcctatcttgctttattttcttagcaacgacggtatcttcatttgccttcattacctcgtcatttactagtaaaaagttggccgcgggggaacaaccaagtcgtttcaatcggatgagctgggtcgttatcttcctagtcttctcattggggcttgtcacggtcggtggctttgaatcgattcagtccatctgtgcgatgtctggcttcccattaacgattgtcgcgctcgtcttactgtactcgatccatcacgacttaacgactgatccagtcaaggaagctgcgaaagccaatgccaaagcagctgaattagcacgccggaaacggctagcacgtgacgttgaaatcacaactaaaactgactacgcacgcgaacggcgtactgcacggaaacgtgaaacggaagccgattagcgctactcagttgaactaaatatatcaattaaactaggctcgtattatggatttccataatacgagccttttaagcttggcccacctgtttgaaataatggtagaaagatgccttttagggttggttttctgttcgtcagccagtgagcgtcctattccgacctccggggctgggtgacaattgctggaacgcagccgacatcgatttgagctaacgaataacccgcgtcatctcaaatacgagtcttattctaagccggaaggaaatcacttccgactaagaataatttggctactgagcattgtcacccagcccctccagtctcaagccacgggttgaagccgagcattgtctagccaacggattaatgcggtttgggcatttgtccgttggcatagcaagcacagactttagtggcaccgaacacgtttcaggaagccgctcgaatggctgatgaacggccacttaactcggcacaattggtcgttggttattttgatacaggaactttaaacgagacgttagggttaccctaaccactttgttgaggtgttctattattactatagtaattccgaaatagcgagctatcccaatatcttttcgacctaacagttgattaacaaaattactgtttatggagaacaatgacaaattcatcaaaagttgggtacatcttcgtccgccattcgaatactgtcccgactggaaggcgtttcggccaatgctcagcggtgaaattccacttagcaagcgtccttggcttggttagtggaagaccagtatttaagacgtggtcttcggcttaaatctgtgtccaccgcgttccagcaattggcagaaatgcctggagggcggcgtaggacgaacgaactaagcaggtttacgctaaccggaactgtttccagcgggcctaagctggtggctgttgactttaaataaaggcatctttataccataattcaggtgggatggattagaatgatagcgatgatagtaaagggaggattggctatggcgattagtaatgggcatgttagttttaagcggccggcgtggttgggagattcgattacggcgaataatgggttggcgacggtgcattatcatgatattttggcggctgattgggatgtcgagcggagcgataatttgggaatctctggttcaacgattgggagtcgctacgatgcgatggcggcgcgctatcaagctattcctgaagatgctgattttattgctgtctttgggggcgtcaatgactatggtcggaatcagccgttagggcaatacggtgattgcgatatgacgacattttatggcgcgttaatggtgttactgacgggattacagacgaattggccgaccgtgccgaagttatttatttcagcaattcatattggctctgattttggcggcagttttagtgcggtgactaatggtctcgggtatcgtcagtcagattatgaagcagcgattgcccagatgactgcggactatggcgtcccacatttgagcttgtaccgtgatgcgggaatgacgtttgcgattcccgctcaagcggctatttattcggtggatactttgcatccgaacaatgccggtcatcgcgtgattgcacgcaagctgcagtcgtttttggatagccacttttaggttggcctagtcagtaatgaatggcacagttgatcgtaaataaaagcagcagcacgctaatgggcgtactgctgcttatctgaatctaggtgtcaaaacgggctacttggcttttttcttagtcttgggcccttgtttatgcttctgctcgcgcagcaagtctttgaaggtttcgatttccgtagtgtgcttagccatccattccttgtagttagaatgggagtcggtatcgctgattttaaggccggtttctaaccagaataaagcttcggttagggaaccgaaattatgaaaccagagtgtgtggccgttgtcagagtccatggcaacgtaagacttgtagtggggcgttaaaaaggtatgtttaacaattttgaatgcggcccggcgacgagttaatttgtaatccggcaagatatagcggccaggatgggccagatgtgggacagagttcttacgttgttctttatattcagtcaacatcgctttagcgcgttcgggactgatgagggtgatatcaaattttggcatagcagggctccccttggtgaatagcagtatggtcaattatagtagtcaaataataatacttatactataatgatagcgcaattttatgaaaattcgaaatataaaaacctgaaaattagggattttccctttcttacagtaaatttaagtaaaactaatcggaggtttgattatgagtacagcacccctcagttcatttgaaaaaaatattccggcggtaaccgaattgttagcggttgatgctgaattgcaaacgttctttgtggctttgacacctggttatcagcgcgaatgggcccgctttatttttggaactaaggcacaagcaactaaggaacggcacattgaagttatgaagacggtttttcgagctggctataaatctaagcgagcgtatgatagtcggtcggataaataggtggattttggcaatttgaaatacggtgacggattgcgattaagaattggggtgtagccaccaagatctaagcgggtctgggtcctgatttggtctaattgctgtcaattctgtggctagcaggccttgtgagtgcctctaaagcctgcaattctgcttcccgagcattaagcgtggcctcaattgctacgctgagcgtgcgctttaaccggcttaaacggggaatgtctagactgacatcatcaccataaattgtttccagcggtgtccaccagacgggaccggggttgggcgtatcaccgttatggcgaggaaataagtgccaatgaacatgcgcgtcaccattcccgagtagttcaatgttcattttgtctgcatgaaaggcctgcgcacaagcttcctggacgatactcatctcctcaaggtatcgtaacttctcgtgtgccggtaaatgatgtaattcggtaacgtgatgtttggctaaaaagagcgtgtagccttcaaagtactggctatcagcaaggaccacgtagcccgttgtgagttcgtaaacgaaataaggattctgatgtgcctgaattagtttgattcgttcacagatcgtgcaagtggatgtcattcgctcgcctcctgagtcttgataagattaagtatacgcgtagatgtggtgagtacatcaaaaatgttagtgaaacgtctaaaaaacgacgacctgaaaatcaatcctgatttggggtcgtcgttttgattgtaaaaactaatcgtcaattctgttaggtcgatcgtgattaaggtaaatcgttgccagctgcaaagtaaatgtcgtaccattcttgccgagaaagcgtaacgtctgctccagcagcattttgagctagatgttccggattcatcgtaccaaggatgacttggaagtgggctgggtgccggagaatccatgcggtcgcaatagctgatttagtgacctgtttctcatcggcgagtgcttgcatggcattattaagttctggaaacttcggattgtctaagaagatacccgcgaagttaccgtattgataaggcgaccaagcttgaatcgtcatcttatggagccgtgagtattcgatcatctcgccgtcgtggttaagactacgttcgtcctgcatgttcgtgtgcaagccaaagtcgatcgcaccggtatgcatgataccaaattggagttggttgatgatgagccgttggtttagtgccgcttgaagcatgtcaacttgcatgggattgaagttagagacgccaaagtggcgcaccttgccgctagtttgcaacttgtcaaaagcggcagcaacttcttcgggttccatcagggcgtccggtcgatggaggaggaaggtgtcgagataatcaacacctaagcgttgaagttcgccatccacggctgccagtatgtgctgtttggaaaagtcgtaacgcttgccaggaacgatgccgccttttgactgaatatagagctgatcacgcgatacgtgagcctgcttgagtgcttgaccgaagatggtcgatgattgaccaccaccgtagatatcagctgaatcaacgtaattgatgcctaaatcaacagcggtatcgataaccttggtggcttgagcgacatccaaggcgtccatgcgcatgatgccaagcgccacgctggaagcttgaatattgctgtgacctaaattaatcgttttcaaaactaaagtcctcctcaatgtgcaacttgatttaaattcagtatacggttttcgtaagaggatgtaaacggttacgactggtgccgactgttggtaaatctgattttagagcaaaaaaaatagaacccaaggcttctctacttgagttctacttatgaggaataatcctgattagcaatgaaaaattgttcagtgttaatatgatacaccttcatgctattcaattttacgcgtgtccaacttctaacggactaacccgtatttattgtaactatctgctatagtcgatctaaagtaaggttgttacttgattgcgactcgttagacgggttttaacgaaagtcaaactcgcgtttaaaacttgggaatgtcttcgtaacagacatgcacctccgtttaaactttgtaatacctgagtctacaaatggaactggtaatgtggaactaacaactggtcatcggagacacctgtttccaactaaaacttagttaaaatctgttcgtcattctaatgccaattaattctttgcggttatcgtttatctaagggtcaacgttcagtcatccaacgtaaatctcacgacactcgctagaccgataacgcttcacggcgcttaaaacggtttcgataacgacccaaactgtgatactagctgtctaacattacagcgacagccaaactcttttgagaagctttgctaatcgaggattaattcctttcctcacttagtataatagcataaaccgcaaacgcttacaacaaaaacaaccgcgaattcgcaataaaaatcaatagtgactcaaaacgctgctatatcggggattataataaattttttcgagaaatagtcgcataatttgctgattgaccgatcgtttgaaaagtcggctaattagcgctaataattgattgaatatgggctgacatacggtacaatagaagtagacaagaaagcgctttatataacgatgacgtgtatcaagtgtggtggcacttataccgcgaaacgttggcgtgattaatcagtgaattcaagctggtatggaaggacgagatacgatgacaacaacgtttaaagaccgggccttcgaggcgctaggacatgtcattgaccctgaattaggaattgatctagttaacttggggttgatctatgatgcacaattgacggcggaggggaccgctgaaattaccatgacgttgaccattgcgggctgtcctttgaccgaatggttggctaaggacattcacgatgaactgatcaaattaccagaagttaacaatatcgagattgagattgtgtgggaacctgcttggaacgaaagtatgatgtcccgcgaagctcgaatggaactaggcattcatagttagtggccggcctgttcgcagctagttcaagggctgacggtcattggatagggcatgattaaggaaagacgttgctggtttaggcttgcggcgccttttttgcgtgccactgtactaattccagccagcaatacgtgcatgcgtcgagccagcaaaaaaacaccagtgacacaaccatccgtagacgattgtatcgctggtgttttagtcatgctagaaatgccgatttaaagttttggcaatggcatccatgtcttgtacccgttgtaatcagcggtgtgcagtagtttttcggcatttgccacccgatcttgggttggagactcgattccttcaagccggtacttgatcttcatttcatgatattttttaacgcccaaagtatggtacggcaatacttcgactttttgaacgacgtcgtttggaatcttagcaatgtaatcgccgagtttcttcaagtcttcatcgtaatcagtccgttggggaaccaggacgtgacgaatccacatatcatcgtggtgttgggccatgtactgaatcatatccaagatattttcgttcccatactgggtcaactgcttgtgtttggcagaatcgatgtgcttaatgtcgaccaacgaaatgtccgtgaccttcattagacgttcgaacttgtcaaagaaaggttgttctcgggtaaaaggctgtccagaggtatccagacaagtactgatattcatcgccttggctttttcgaataagtctaagatgaagtcgatttgtaccagtgattcaccaccactgactgtgatgccacccgtcttgccccagaaagcccggtatttagccgcgtcttcgagaatctcgtcggccgtcatttgatcgccaacgttgagtttccaagtatcagggttgtgacagtattggcaacgcatgtggcatccttgaaggaatgccacgtaacggatacctggtccgtcaacggagccaaacgtttcgatggagtgaacgtagcctatcaaaggctcctttgccgccgcttgcgttgttgaaacttgtttgttttccatgagcctttcgccttcttaactattaaagattaaatgttacattgattcgaagaatgtccgtgaaataacgtcatcttgttgttccttggttaaatctgcgaagtagacacagtagccagaaacccgaaccgttaatgttgggtattcttcagggtgtttctgagcatcaatcaaagtgtctttattgaagacgttgatgttcaagtgcatcccatcgttcttcatgtaaccgtctaacatgtttactaacgtgtctttccgtgattcgaggtcatggcctaacgtgttaggagtaacgccgaacgtgttggaaatcccgtcagttgcgtaacggtatggtaatttggcagttgaaagaagtgaagctaatgcaccactcttttcagcaccgtatgcagggttagcacctggtgagaatggttcgcctttttgacggccatttggtgtggtaccagtgttcttaccataaacaacgttggaggtaatcgtcaaaacagaagttgaaagtttggcattccgatagaggtgatgcgtgttcatcttgctgtataattctttgactaaccatttagcaatgtcatcagcgcgatcgtcattgttcccataacgtgggtagtcattgtcggctttgaagtcaacggcgataccacgttcgtcacgaattactttaacgtgaccatacttgatagctgagattgaatccgcggcatgtgataagccagaaatcccagttgcaaaggtccgatcaagatcagtattcttcaaagctaattgggcagcttcatagtagtacttatcatgcatataatgaattgcattcagtgagttaacgtaagtgtcagctaaccaatccatttgcttgtctaatttcttcatgaattcgtcgtaatcgatgtattctgaagtaattggttcgtaagcagggccaacttgatctccagcaatttcgtcgcggccaccattgatggcataaagaatcgctttggctaagtttgcccgggcaccgaagtactggattccatcagcaattggttgtgcggaaacacagcaagcaatgccataataatcggtaccccattgtacccgcatcaagtcatcattttcatactgaatggttgaactgtcgattgaaacttcagttgcgtaacgtttgaagtcttctggtaagcggtctgaccataaaatcgtgatgtttggttctggtgcggcgcccatgttgtccaaagtctttaaaatccgaaaagcggtcttagtcacatggtgttgaccgtcgacgcctaaaccacacattgataaggttgcccagattgggtcaccagagaagagagaattgtattcttcagtacggatgaaccgaaccatccgtagtttcatgacgaattgatcaattaattcttgagcttggctttcgtccagaacaccattgtccaagtcacgttggatgaagatgtccatcgttgtatcaatccggccaacggacattgcagcgccgttttgggtcttgatagcagctaagtaagcgaagtacatccattgaatagcttcttgagcattagttgcaggcttgctaatatcgtagccataactggcagccatcttcttcatatctgctaaagcacggtattgatcttgaacttcttcacggaggcgaataacatcatcagtcaattcaccatcaccaatgtgggcaaagtcattagctttgtcttccattaaacgatcgatcccataaacagcgacccgtggaagatcaggaatgagacggccacgtgcgtatgcatctggtagtccggtgatgatcttgtagtgacgtgctttccgcatgtcaggagtataaacatcgaagacgccttggttatgagtcttgcgatattcagtgaaaatcttgtcgttttcttcatcaggggtataaccgtatgatttcaaagcgtcatcagccattcgaataccaccaaatggcatgaaggcccgcttcaaaggcttgtcagtctggagaccaacaatcttttcgagatctttttgaatataaccagggccgtgtgaagtaatcgttgcaacgactttagtatcagcatccaacacaccaccagcggcacgttcttgtttctttaattctaagactttgtcattcaaggtcttagtagcggctgttggtccggccaggaagctttcgtcgccattgtactgtgtgaagttattttgaataaaatcacgaatgttgatttcttcctgccagtgcccgcctttgaaacctttccaagctgctggttttgttgtcttttctgatgtaatcattttctcgcctccataatttgaatccaatcaaatgattgataaaattctatatttgaatcataacattttttgctggatttgtaaccgctttcaggtgatttatttcacgtttgggttatttttttgcaatctattattgaaaagttgactattaacgttgatataacagtacttacatagctagataggcattggtaattcacttaattatatttagaaaacggctaaaaacaagacttgttttgatatataagtggaatattgtccataatgtaacaagtgtttaactagttaattaataaaaagtgcaacgaggtgtggagggtgttaaaagcgtttgccgttgattttatgaggaagttcgttatcataaagaagataagcagaaactagtgaatgtagtgaaaggtgggcgtaatgcggatgctcgaacaaattgaacaatatattgacagttgtattgaagctggcgacatttatggggcgtcgtttagcttgatcacccctaaaggtatcaatcaatactatcatggtaagcagggccgcgatgagtttgccgtgggcttagatcctgcgatgatttatgacctagcatcggtaactaaggttgtagggaccacgacgaggatttttcagttgttatcggaccacacgattcatttaacggactcggttgcccggtctttacctgggttcactcatcctgaaataacgattaaaaacttgttacttcataatagtgggctaccggcagatattgataacctggataagatgcaacgtgaagatctgatcaaagcggtttatgatgcgccactcgtcacggcaccagggacaacgtatgtctattcagacctgggatttattttattgggatggattattcgtgcggttgacggctcattggctcggagtattcaagaccacgtttgctatccactagcgatgaccaatacgggttataacttaaatcgtccgaagattcggtttgtgccgacggagtttgatccgcggcggggtcagattcaaggacaggtgcatgattataaagcctttttgttgaatggtgagagtggtcacgcaggcttgttctcaacgctgacggatttatccgtatttattgaaatgatgttaaactttggtgaatatcaaggcaaacgggtgctggatgaaaatgtctttgactggttaggcgagtatgacgaaaatggccggacgttaggttgggaacgacgtgcgggacgacatcaatatttccatactggttttactggcccggcagttgcttttgatttggatcgtcaaattgggctggttgtgttaacaaatcgagtttatccaactagtgacaatcaggtctggaaccaagatcgtaagcgagtattcgatctgttttttgaatcctgatgatggcagcttcattaatagttagtagttaaattaaataagcgtcgcagccacttaaggctgcgacgcttatttaattacgatttcatgacagctagaccgctgaagtgtttggcacttgtgggtgctaagcaaacgctattttgctttttgcttctatatatacgttatttttgcaaccagcgaagtccgggaacatgacgtgcaattttataaccagcggcaccgataatgacaccagcccaatttgtgatgacatcatcgatatcaacccaacgtttgaggttaaccaaccagtcaaggatgaattgtcccagctcgagtgttagccccgtaagaaatcccaaccaaataaaacgacgccagggcaagtcgggaaaattccatgccagtaaaccgcccaatggaacagtgaggagaacgttgagccaaaattcaatgtcaagttgttggaaaggaatcacgttcagcttaacgggtccccattgaatatattgaataacgagttgggtaccaaaattgtaactggtaggtgtgtagcaaaaagcagttaagacccagagaaaggcaattaaactgagttgcttaaaacgctggatatttgtgcgcgctgatcgcgcacaagcgtatagtagaacaataaacattaatgaaatcaaaaagaatggtagccaagctagcataatttagtcgctcctttaattaaatagtatagagaaagaaagctggtttgactattaataaaaagaaattcagaaaaagtgttgacactttttacttcaattggtatattagtaagcgttgctgctacggcagatacatctcaccaccaaataattattgaaattagttgttgacaacttcttcagtaattggtaagatagtttctgttgtcgcaatggcaaccacgacaaattaatcaagttacttcttaaaaaaagttgttgacaagatattgattaagatgttatgatgattaagttgtgttaagcgattaacacacggaattagatctttgaaaactgaacaaagtttcgacgaatcaaatgtgtagggtctcttggttttgaatcaagagcaaaacatttgcgaagtcaattcgctagcaaataaattttagtacaacattaaatgagctttttagaactcatcattaatttgagagtttgatcctggctcaggacgaacgctggcggcgtgcctaatacatgcaagtcgaacgaactctggtattgattggtgcttgcatcatgatttacatttgagtgagtggcgaactggtgagtaacacgtgggaaacctgcccagaagcgggggataacacctggaaacagatgctaataccgcataacaacttggaccgcatggtccgagtttgaaagatggcttcggctatcacttttggatggtcccgcggcgtattagctagatggtggggtaacggctcaccatggcaatgatacgtagccgacctgagagggtaatc

SEQ ID NO: 2 - DNA, 326211 bp, synthetic construct
  source 1..326211: mol_type = other DNA; note = Lactobacillus plantarum PDA6 - Contig 2
cggtcccactgagcatcttccagttcgtatcgtttaggtgttgtcatcggaatgcctcgattcgtttttcctcagattatacctgaatttttagttttcagacagtccctaaataagcgatgaataaacttaattttttaatcaagaggtgattgtcatggcaacaacttacggcattttctataacggacaagcgggtaatgggcaagcggcaaccgtcgcccatcaaaccgcgcaagcgctatcgaaccacggcattgagtctcaattactgacaacaccaggaatcccccgggcaattgcgttaattaagcaaacgcttcctcaactgtcagcactaattattgttggtggagatggcacactgaacgttgcaatgacagccctaatccaagctgaagcacatattcgtatcggcgttattcccatgggaacggttaataattttgcaacccgctaccagttaccaactgacccccaagcggccatcgaactaatttgtactcagccggcaacccaagcagtcggcatgctagtttgtaatcaacgccgggcagtcgtgagttcactgacattcggtaatttggctgacatttccaatgaagttcgacaatctgagaagcagcgattcggtaaattaagctatctttaccgtgctattcgccatattggtcacaataagtcactgccaattcgatatcaattcaaacacgaaggaagccacaccttaaaaacatggttctgtttgattacaacgaccaaatcagtcggtggacacgtctatagcgcgtctgctccaggaaaaatgcatattagtctacttaacaacattggctggcggcaagtaattccatatttttggttcgcactaacggggaacttgcaaaactccaaggccattacacagctaacggcaaccagtgcacgaattacgagtgcaactggtcaagccgtgacgacacgtattgacggcgacccagcggttaaactaccaattgaattgacctatttgacggaccgcttcgaattgatcgtaccagcagtcatcgaataacgacgtattttttattaatataatcaacatattgattgcgtactattaactttttgattatagttaaacatagttattaattaatcccaattaacacagggaaaaaataataatgttcacatcataactttattggggggattacgatggcatctgcttatcgcaaattttgggacaatcttttaaacttttcgggtacagcaacacgctctgagtactggtggcccgttatcattaactacattcttggtggtattatcattgcaattattcagatgattatgggacaccccatcgaggatatttacaattggagcgatctgagtgttaatacgatgagtaaactcatcgcattaatcatttggttaggaacactctcgttgaagtttcggcgattgcatgacagtgatcacactgcatggtggattttaattgacttagttccaataattgggaccatttggttcttcatcttaatggtgttgccgtcacgctcaaatcgttggcaataatttaactaggcgcaacttttattggctaagcggcccataatggttgcgccttttgtgactgagcgctggcagttaatcatattaatagacgcactaattatgtgaatgttatcattaatataataaataacatcatttcatttaggaggtcctgaggatgtatcaaaatattctagtcccgcttgatggctctgataatgcctacatggctttaaaacacgcggtcaaactagcccagacgtttaaatctaaattatttctggtcaatgttattgatattacacgcctgaatgcgtatagtcctgcagcttacgggggaacgctatatacaaaccttctaaaagtcgcaaaagataatagtcaggacattctggatcgtggtcagcaaatggcttcggcagcacaagtcgaatccctaccaattcaagttaatagttcaccaaaagctagcattgcaactgatattcccaaaaaatatgcaattgatctaatcgtcatgggcaaatccggcaccaacgcggtttctcgaattttgctaggctcaacaaccgcgtacgtcgtacaaaaagcggaagtcaacgtgacagtcattaacacaattgacgaccctgattagacgactaatagaaggaaggaaaaatcaatgatcaaagaacgccctaaattcaattggcttcatctgctcattttcattgtggtcgtcgaagcaatcggtagtctgtcggcatggctcgcgggagacattaaggccgtttacaatgggctcaacttgccagtactatcaccaccagatggcctctttggcatcgtttggccgatcctatatgcgctgattgcgattgctggttacttagttttccagcaggctacgacacaccgtgaccgcctcatggacgccaccctgtttggtatccagctgttactaaactttatttggagcatcatctttttcagccagtcggcttattggtggggcttagtcattatcattgtgcttgatttagtcgtcttactttgcatattacagttctatcgcagtagtcggctagccgcaattttgatggtcccctacttggtctggatctgttttgcaacttatttgacattaggcgtcgcattattaaattaaatataatcgcaaatcaaataacggtcccatcagtcattgttactgatgggaccgttatcttattgtattaaagttttaacgcggcttaactggtgttgtcaccgccagggccccgtgtatcggcactgattaccaatcaactatttaaagcgttctacgttgccgttttcttgaacgatacggcacagcgtaatcttgtggcgcatcttccggactggcactcgtccaatggccactaccctttttagctgggcgggcatcatctttgagacacgtaaaccgtgagccgtgtttatcctggataataaaaattcgactaaattcgttaatggtatcgactaccgtacaatccgtatgcttgatgttgaacacatccgtataaactttactcattattgtccaccccctaggaattagtatttaacattgttaatataccgcgtcttgaatgacaaatccataaatatacatctgctggttattattactaaaaaatgataatcgtacaggtcactgataccccgatataccgcctaattcgtttaaattttcgcccgcaccaatcggccttgataaatgagtaattaatcagatgcagttgcataattgatacctgttttcattgtacaatcctggtctcgtacgatataatcagaatattctttttgtatgattaccgtagtatggtggtgacctttagtcacttaacgaattttgcaattttaaagttcaccaccgagtggcggtcagtctacaagcacgaacaacagggggagtattcaatgaaagtcattaatgtcgcactacacgtcaaacccgagttaaccactcaatatgaagcctttattcatgaactagtggtcaattcttcacaagaacccggcaacggtttctacggccacttcaagcaactggatcataacagtgactacgagattattgagcactggcaagaccaagccgccgttaattttcacaatgaaacgccgcactttcaaaactttctcgcccatatcaacgagtatctgataactgagcctgaaattacccggatggatcactagcgacttggtactgtagtcacatgagcgcaactgacagtcacctattgaatcacaaatttgagccacctttgttcagctaacttgcattgagaggatgctcatgcgcgtaccccttaatgctaaaatgccagctgccaagctgtaatcgcaaatccgattcccggcatccgcttaattattaccactaatttacaatagcaacctgtacttcactaatcagtaaagaccggtcatcgctattcgcttctatgaatccttaaagcacatttaaaaaggtcttactagccaataaacgccagtaagacctttacgatatctcaaagacaacttttatagtctaaaatcacctcaaagtaaatttagacctcatctaattactgtacgtcaatatctgagacttgatagaacgcattaccagtatccgctatattccaaacactgagtaacacttgatagcctttttcattagcagaaatattgacttggtgggttacaaattcactagggatggcaccattgtcattataactagctatcttcttgaaatcactaaacttaagtggtgcgtttggattccagccaggcttggtaatatagtaatcccaagtactagttttatgacgagcagttaactgccaagtcacactaagattgccggccttcacaggtgtcttataccaccgtttggcattttgctcgtccagtggtgcaaagttagcaataccggcactggcaattttgccatcaataaatgtattttggggcgcttcaatactctgtggttcatacataaccgaaccaatattggtattcaaaggcccacctggataccaagtactccccagataagctcttccacccgggttcgtcacaaagccatgtgctgaaacttgaatcacgccacaacctaaaaacgcgatcatcataccaactataataaataagtaccgtaatacatgattctttttggtgctcaacataagatcccctcctcaattgtcactataacgccctgaaaacatgatagccaccaagatgcacagagatccgaaatcttttctatgcttatcgattccagcctaatactgaacaagtctggaatggttgccctccttgtcaatcattccaaatgcataataaaaaatccctcgtgttcttataagggatgtactagtccctgtcaagttgtcatttgaaataatataagttttgattcacttcaaacggccttattccaatattctgctggtgtgaggtcgtttcttgctggtgaacggtctaattgattaaaataggtgataccttcttcgactaaagcggccagctccttataggtggctggtctggcgtgccgcgctatccagcgtaccttaaattcattccaccaacgttccattggtgcgttatcatatggcgttcctggccgtgacatactgcgtgtaacttcatgctgtgccaaaaactgattaaatgcgctcgaagtgtacgctgagccccgatcagtatgcactaagggatggacatcacccgcgaaattaaaggctcattgaaaaacctgaatctccgcatttgaagtttcagtctcacttaacctatgggcaattaaatgccgaccataaagatccagcacgccacttagacgcactttgtattggccattgactccatagaccaattcagtcgaatcggccaaccaggcctgatttggccgactagcgttaaactgttggtctaaaacattgtcttgtaaatactgttcctgttgctggatacgtgaacgtttcttctgacggacctgacaacggttagcgttctggaactcagtaattagagctaacttttcaactgctgaatatctagatcttggcatacgaaaatccctccatgaaatatcagatgaattatatcatttcatctgacaaccataaagggatcataacagatcaatgaaactacatgtttattgtggagctatatttcgatacgactaccgcagaaccgacaagatcaatcataaatataatggcgagtcattggaaggccagttccactcggcgctttcactaatagatattgaataacatcgatatttccggcctcaaaagcagctgcacatgcctgtaaatataattgccacatgcgatcaaatcgttcaccataacttttgacgacctgttgttcgacttgctgataattgtgataccagatttctaacgtcttttggtaatggcgccgcaagggctcaatgtctgaaaattgtaacttagcagccataatatgtttgagattctcagcaacatttgggatatagccccctgggaaaatatattggttaataaatggatcaacgccggcaccttcatgttgacctgtaatgccatgaattaaagctcggcctcctggaactaagaacgcttgaattttattaaagtacaaccctagattttctttaccaacatgttcaaacatacctaccgaggtgacataatcaaattggccagtgacttctcgatagtcctttaactgcacatgcactttttcctccaaatgacgttgcttgatttgcgcttgtgtataatcatattgttcttgacttaaagtaatacccgttgcatctaacccaaactcatccgcggccataaataataatgttccccaaccactcccaacatccaataatcttttaccaggctgggttgccagcttatttaaaatatgtctcactttattgagttgtgcctgttttaaagtatcatcgtcatgttcaaagtacgcacaggagtaggtcatggtaccatctaaccatagtttataaaaatcattgccgatatcataatgactttgaatatcttttgtgctgcttttttcggaatgtgatatttttggtaagtgtttcaaaaatgaattatgtgtcaaaaaactgtctttttggcggtaagcagaggcaattagttcctgaatgctcccatctacttcaatatccccattcatgtatgcttcacctaaaaccaatgttggctgattagttaataacttaattgggatttctttatttaatcgaactttaacagctggtatgccggtaccataccgttcaatttgcccatcccaataagtgacttcaatagtaacatcgaacgctttactaaataagtttttataaatgattttgtctaacataacagtctcctatataatgttttgtgtatgaaacattatatacctgaatttgattttctgaaagattgattgtctttatttcactgaacctgtattgaacagccaacggtatttctaataatagcaatgactgccagttttatttatactgaaaattatgctgttcataatatttatattgataatcttaaactactgatgttaaattcagaatgacctatttttttaaataccaagaactagtgtctgttgccaaacatcgagattgttcagcatcaatatttactgcagtcattacatctaaattgcttaaactaaatggaggtattacaaatggatttcattatcgcaattggcggcctcatcactggcattggcctcatcatcaatgtctttaacacccggatcaagtatggctggttcactcactatcagagcaaaagtcggccacttaattatgttagtttattattaatcataatagggttaattattattattggcaaagcctatctaaacggacaactaaattaacataaaaactaaattgctgatgcagtacagtattcatttgtatgttagcctatatagtggtgacgtgaaatttatatcactataactaattcatttgtttaaactaaacactacactgggggattcaatgatgaaacagcaacagaaattagcgcgtttaacaactgttaatcagcttttagaacagctaaacacttcagttccaattgaaaaagttgaaatcagaaaattaattagccaagcctacgcaactatcaaccaaccagattcagttactaagcgttatcaacaaatacccgacgcaatcaatgaattaatcggtcaacttcaagtgatggctgtcgctaaaaaataccatttctcatctgaacaagatcagttaattgccaacttaacaacttctacaaataaaatgtttgcccacggttggtatggcctaattgccatgagcggtattggaaagtaaacctagcaattcataaagagtgttccagctacgatttgacccattgcaggcatccccaaaagagcatctttttaaaagattagcgggtcatgatgtcaatttttgttactgtttaaacttaactgtagtataaaaggcgctcagcaaatgagcgccttttatgttactgctacaactttgattgttgttatatcaacgttcctacttaacttccgaagtattcacaatcggctgagtaccccgctccgaaataatggtgaccatcatgttattgatcagttgcagtttcttatcgtctgatagctgcatccccgtatctttctctaaacgggcgatcgtgtcttccgtaattgaaacggccccttccacaatgaccttgcgagcagatagaattgccgaagattgttggcgttgtaacatcgcactggcgatttcagtcgcgtatgcgagatgcgttaagcgtgtctcaacgatctcgacccccgcaacatttagccgttcttgaagttcttccgttaaccggtcagaaacttcggttggattactccgcagcgtaatcttcttgtcgtcatcaaacgtatcatatggatattcagaggccacgtgccgcaccgctgattcactttgaatctcaacaaattgttcataatcatccactgcaaagagtgccatactggtatcaacaactttaaacacgataacggccgcaatttccacgggatttccccggaggtcattaacttttaaaatggcactgttaaaattgcggacccgcagtgaaatggaaaacttactggttaacggaacggtcataaacagccctgaatcacgaattgtcccgatatacttaccaaaaaatgttaacacgcgcgcctcgttggggcccacaattgttagcgaactagccccaaaggccgcaataataattagcaatgcgcccaaaaagatactcgcaaaatgatcgccagtcgcaccggcccaaaccagccaaccgccaactaacacaaatgcgatcgctaacactagaccaatatagccattgatatgaaacacttgtttttctttcatcaagactaccccctttggcccttattatagcataagcgtctcacatgctcgcaaagctaagttcgatggcaagttccaaagtcagtaatggcgatcgccttcgcggccctaccggctcaactattcaaacgtgcgtgaagtccatccccatcaacgtgacttaactcggcttgccacttttccgctcccgtcccgcaaaacaccaggtcgtcatcactagcaatagcgtgaatggccaagcgacttggtaggggcgcataaacgcagcagttaactcaattttggctttggccttaatcgctgatgcagcagtccttattcgctggttagtgtgtttaacttgactgtgaaccttttgggccacctgctgatgaatttgagctttgatacgcactggagcggactgcaatgaccgtgcttttaacacttgcatataattggcagcaaccaaccggcgggccttagccgccgtgattggctcgtggaccgtttgcgcggtttgctcagttgctaattggtggtcaaccacgcgtaacgtatcacgtttggcttgcttaggaattgataaagtagtgaccgtcgtcgttgcatacgttcgtatctgtgtcttagccgttgtcaaattagcggctaaagctgacacaaaaatggctacggccaacgatgtgccaatttgccgaaacacgccaatcacactttgtgacgctgtcagtaactcaccggtaaaatcaccggccgctaataccgtaattggcccaataatcgtgccgtagcccgcaccaaccagtaacgccgccaatgcaaactgccagtactgactaggactcatcaggctaagtaccccataacccgtagctattgcgagactaccactaaagatcacgcgccgcgcaccaagctttgctaacaagaaaccactgattggtgaaaaaataaaaatcatcattgaagcgggcgtaatcataatcgccgccatcaattccgtcttactttgaactttcgtgaagaaactcggcatcaagactaatagtcccaccataaagacccctgataacacggtcgctaacgccgcaccgttaaactgtcggtctttaaatagggctaatgggaccatcggcgctgagacgtgggcctccatccagacaaaggcaatcaatgttagcgcactagtgacgcccaggctcaggactacgcgactcgtccatccccagtcattacctttaaccaggaccaacgtcaatgccaataaggtcgtcatcactaaggcactcccaccgaggtctagttttacttgaccatgactagggtgccgccatgatagccaggcgatgcaaccacacaacgcgacggcaactaaaggcacgttaatcaggaaaattccccgccacccccaaaattgagtgaccgcaccaccaatggttggtcctaacgctgcggctagcccttgcatcacgcccaagcttgcaatgacccccgtatgcctgctgagtgcaacactctgaataccaatcgtcatactagccgggaagacgatggccgcaccaatactttgaatcgctcggccagtaatcagcagcccgacactgagactcaatccagaagttagtgaaccaataccaaagagcccgagtccaatcaagtacatccgcccacgtccccagacatccgctaaccgaccgagtggaatcgccagactagcaaacaggacggtgtaaatattcagtgcccacgacaggtgcgtcaaatcagtatttagtcccgtctgaattgctggcaacgcaatattcataaccgtcgtatcaagcatacatagaaaaatgccaatcatcatcattgcaattactttcgtcgattttttcatcataatcgcctcccgttaagttaatgggagtatatctggtaaaatggtcataaataaatacttacgttacaaaaaaggagatgttgtaaccaatgaacccacaaacacgaaaacgccaaaatttaactgcggtttatgcggccttactacagcttatgtcgcaaaaaccactcagtcgtatttcaatcacagaactttgtcagcacgctcaggtttctcgcacctatttttaccgtaatttcaccaacttcgatcagattattttggcctatcaaaaacagactatccttcaatatctgcgccaattaccgcgacaatcaaaggttaaattgcaggtattgatgactcaatatttcactctcatgcaacaaatggcagcgacaaatgcgttattgatcaaaaatgaaaaaacccagatttttattcaaagtttcgaagccgtctttgcattactcatcaaacaagaccgtattatcggttcaagcaataccgcgcttcgccaaccgtactacacggcttatttttctggtgcggtcatcaatatgctcgttcattggcaacagaatgggatggttgaaacaccggcctatctcgctcaacaggtcactcggttcactctacgcgataacgaaagtaggtcctaaataaaacggggtgccgttgccgacatcccgtttagtagcttctttaatttacttatcaactcagtcgcgatggtaacgttgtttaacacgcttcatcgcttgtttgccaccgaacatccgctgaattttagcctgctccaactggcgtgaattgagtccttgatagctcatttcacgttgtaatttttgatagctttgtaaccgttcagacgttaccgtgcccacctcaactgctgcccgtaccgcacaaccaggctcgctagtatgggtacaatcactaaacttacactgtgtcgccaatgaggcaatttccgcgaaagtttgatttaaatcacccatgaagatttgtaactcacgcattcctggtgtatcaatgacacaggcgcccgttggtagcggtattaattgccgactcgtcgttgtgtgccgccctttgtcatcatctgtacgaatcgatttcgtcgccaagatatcctggcccaacaatcggttaatcaaagtcgacttaccgacacccgaagagcccacgaaggccaccgtttgaccagtcgttaggtatggttgcaattcatccaaaccctgacccgtttcgaccgaacaagtgatcgtcggtacgccgacactgacatccgccacagcccgtaacttagtggctagatccgtacagagatccgccttggttaagacaatgaccggaagtgcaccgctatcccacgcaatcgtcaggtaacgttctaaccgccgcacattaaaatccgcgttcaatgacatgcagataaagatggtattaatatttgtcgcaatgatttggccgtcttggcggttcacggcaccgcgcgccaagacactctgccgtggcgcgattgcttcaatctgcgcctgattatcagcggatgaagataggcacacccaatccccaaccgccggaaatgccgcgggactggccgcttcataagccagttttcccgtaacttgtgctgaacgttccccagccgtcgtgatgacttggtaccaatcacgatgttggccgataatccggccaagtatttgaccgttttccttagtcaagtcggcttgaaccgccgtcgtcaatccatatttaattaaattaattgtcaatttttataatcctttcgcaaagtgacttaccctaacgctctgcgaattaaaaatgcgcccagtcttatcccaactgtgcgcaaaaaccgtccgacatgtctatctgccaggctattcgtcacattagggtacacgaaactaagcgggtccaacccacttttttcgctcaacaacaccctaacgaatgcccgacataaaacacccctcctatatttgataattacaatttaacaagtctcaccaaaattgtcaatttaaagcgattcaccacggcaattcaacgctaatgtgcgcattaaagtcttgctggcgctttagtttggctaaccgggcggcctgccgctcttgatagccctgagcaacaaacgtgtattctggtttatcagcgactaacagtggtaattcaatattacggtccgtcaccacgaacgttgaaaagcaggtcaatcccaaaaaccgttcgccggtcttcaagtgttcaccaatgattttagtaaatacctcgatggagcggtgaccaacgcccgaaacgtaagattccgcacacattgagtcttgtaaccgaaacggcaataaaaaattgacctgatcgactgacacggtcaccgtctcaattcgagccactcgcgatgcggcaatcgatgaattatcatcgatagtcgccaagatttttccgccgaaaaccgtgtcgtgctcattcaaatcagctgaaaacacacggtgattgctaattgataaagtctgtgaaatatgaattggttccatgtctgcaccccgtcatctttaattattttatttatatcactgcaaacgacctacaatgtgattaaaacagactagctagctcgattgttgttcggacacgtccttcctgctacgaccaccgaaaccgactgcttttatccttatgtcatcgtcggctttgattccgattcaagacacatcgttagaatgtgatcagccgccacaattaatctgaaagcgattggctatacttcgtcgcaaacgcccaaaatttagcaaccacggcagcgtgattatctggacgcttcatgaaagccatctgactgcgaatagtaggcgtcagtggaatggctttaatgttgtcaaaaccagtgagatcaaatgaccgcgccatgacaaccgagacaccatcaccctgattcagcatttctaaaatgagatcaattcgttgaccatcataaaccatctgtggcgtatgcattttttgaaatgccgaaaacaacgggttatcttcaccgatggtatctttcaataataaaattgattcatgtgccagcatcgacagactaatctcagcttgttgcgccaacggatcgtctttcggaacaaggaccacaaactgatcggtctcattcaataaaacgtcataattattgggttgatccccgaaaatccgtgtaaatacaatgtcgacattcgtatgatccagtgcatgcgctaaccgatcgacactcgcctcactaaattgtaatttcacttccggataccgcttcgtaaatgccgtgataatatgaaaagcctggtattgtgctaaagatggtagtccctgaacaaccagcgactgcgcattatgagcggtattagcggccagaacttgttatagctgacgctcttcgcgcagaattgcttgggcccgtggcaataattgttgcccaacccgtgttaacgtgacttgccgatgcgcacgttcaaataattggacctgccaatcgcgctctaaagccataatgtattttgaaatggtcgactgtgacaaaaacatgcgttcagcactgcgactatagttctgggtcgtggcaaggtcaacaaacactgccaatttccgtgtttccataattaaccctcttctaactattcctatttagaatagtttaccacatattcagaattgttcttatccgaaacaagctctaaactaatagctgttgtttttatcaattaaatattgaggagggcttgcgtgccaattggaattattactaacgtgtgtgcgatctttttcgggggtattgtgggcgcattgaccggcaaacgaatgtcacaacgtttaaaagatgggctgaatatgtcctttgggatctgttccatgtgtatggggatttacgcgattgcaccattaaaaaatctagcggcggtcatctttgccgttattatcggaacaggtattggattgctttgccatttgggaactgcaatcaatcacggcgctgccgcgatgcaacgtttcatttcacggtttgtcaaagcaccagcaacttttgagaaacaggcctttgaacagacaatggtcacggtaatcgtattattttgtgccagtggaactggtatttatgggactttaactgaagggatgaacggcgacgccacaattttgatttccaaatcaattctggacttctttgctgcggtaattttcggtgctagcttagggttagttgtttccttaattgctgttccccaactaatcatcctgactgctttattcttagtcgctcacctagtctttcccttgaccactcctgacatgattctagatttcaaagcggtcggtggtattttaatggttgccagcggctttcgcattattgccgtcaagatgtttccgaccgccgatatgattccgatgatggtcgttatcatgccgatttcatggttatggatgaattttgcattgccattattatagataaattattgaaggataaattaaaaagcagttctgagcccacaattatggcttgctcagaactgcttttagtcagcacgtagaaggcttgcactagcaggtcaaccagttggccgataataaaatccagtggccattgttcactaaacttaaaaaagagcgtactaaagttaataccaaccatgcgctccaatcagccaaccgacaagggacgagccaaaaatccctcgtgggtcgcaggcaattctaacggcgtcaactggtataactgtgtttgatagcacgctagtccacgttgtaaatcaagaacctcgacacggcggggcgcatgggtcaagccgcagcccactaactttaataccgcttctttagccgtccaaagttgccaccctaaccgataacgatcttgcaccgataaagcctgtaatagctgccattccgccgatgtaaaggctcgccgaatggcagttacatcatatggacggacctgttcaacatcgatccccaaaggtcccggaccgaccgccaccatcactaactggtgcgtgtgactaacactaacacctaatcgaggatgacttggaaaatacggctggcccaatcgatgataagctaatggtaccgataacacttgctgaattaattggcgactcacggttcgctgagtgacccgccgcatttttttagaaacatcgaccggcatctgaagccactgccgtttaaagacaacttgagtgattggcattaacttaagtggacccctttatccacgtataccacgtccccggtcattccagtcgatagattgcttaataaaaaggcagccacgttgccgatctcacgcgtttttaccggttctccatcaactgtcatactgcgagataattttaataattgctgatgctcatgaatacccgttaccgccaacgttttgactgctccggctgaaattgcattcacgcggacttgttgtggtccaaggtcacgtgccaagtaacgcacatttgcttccaacgcggccttagcaacccccatcatattataatttggtacggctcgctctgatccaaaatacgtcaacgttacgagactggctcctggtttcagcattggccgagctgctcgggcaactgcaatcagcgaatacgcactaatattttgtgccaaatcatatccagctttcgtggtattcacaaaatcaccttctaaggttgctttatccgcataagcaatagcatggataatcccatcgatggcaccatactgttgtttaatgcttgcaaatgcccgctcaacattgtcatcatcagcaacatcacaggcaattaacggcacatctggcgcaacaaaccgttgtaagctttgcttcaaacggtcattttggtaagtcaagataacctgggccccctgtgcaattaatgcctcggtacacccccaggcaatactgcgctgattggccacacccatgaccacaatggtcttacccgataaaattccatccatacttatcattcctcacttatttaaaattgccgataacgggcttggcgttgcgtaaccagttccgccaccgactttgctgttaaagcagttaacgtctcgtcaatggctgttttcagcggttgacaatctgctgcggttgctacttcaggaataatccgatcgataatcccatctgccaataattctgtcggcgtcaagcgcattttttccgcagcttcagcagcacgttgcgattctttccataaaatagtggcatagccttcaggtgataacaccgagtaagtactattcgccaacatccagacttgatcaccacatgctaaggctaatgcaccaccactgccaccttcaccaacaatcaaactcaaaaatggtactcgcaattgtaatcctgctaacaaacagtcagcaattgctcgtccttgtccctcatattccgcatcaacacccggataggcacccggcgtgttgattaaggtcacgaccggctgccgtaattgttctgcttgccgcattaaccgcaatgcttttcgataaccgctaggcgtcgcacagccaaaatgccgagcttgattctcggccaaattttgacccttctgaataccaataatggtgacgggccgttgagcaattgttgctaagccggcgattacagctggatcatccgcccgttgacgatcaccatgacaatcaaaaaaatcctctgtcaagccatcaatcaacgtttgaatgctaatcttactagcatcacgggctgcttgaacttgttcataggccgttactttagacatcctgatgacctccctgagtgattgttaataatcgttgtagtgttttccgtaaggctggtcggggtacaatttgatctaaccatccattggctaataaggtttccgcccgttgaaaatccgcaggtggtgtctgttgaatggtttgttcaatgactcgccgacccgcgaatccaatgagcgctcgtggctcgctcaacataatgtcaccctgcatcgcaaaactagccgtgacaccaccagtggttggatcagttaaaattgtaatatacaacagtccagcttttcggtgatttgcaaccgccgtggacaccttagccatttgcatcaatgcacgagcgccttcttgcatacgcgccccgccagaagcagtaaccatcacaacgggaagtttttgggtcgtacaagtttcaaataatcgcgtaattttctcaccggttgccgcccccaaactccccatcataaatttagtttccatgacacctaagccaaattgataagtcgctaacgtcccaataccagtcaatacgctctcattcaagtgtgaggctgctttggcacgctgcaacttttctaaatatgcagggtcatcaaaactgacgggcgcacttaggtccgcatcccgctcttcaaaactcgccgtcaattgttgaacacgttgccaagcaggcaagcgaaacccataatcacaatggggacataccttgaattcaccgagatcttgggtataacaatcttcatgacaaactggacagcgcgtcaataacgcgtctgggatattatcccgtcgaacagctaactgccgttcagtgggtgcttgaaacttgcgcttgggcatcacttaaccatcctttcaaaaagtcttgttcgatataagctgtggtataggtaccacggctaacagtcgaatctgcaactaatcctgctaagaaggtccggttcgtttgaaccccatcgatggtcaattccaataaacaacgatgcatcttgcgactgaccatcttccgattaataccgtgaacaatgatttttgcaatcatcgagtcgtaaaacggtgcaatcatgctaccagtcaccacaccagcatcaatccggactcccagtgtccccattgggtagatcaaccgggtgatttttccaggttgcggtcgaaaatcgtggtacggatcctccgcattcaagcgacactccatggcaacaccatgaattttcacatccgcctgtttaatttttaatggtataccagctgcaatttgtacttgcgctttaatcaattcaatacccgttaccatttcagtaaccgtatgttcaacttgcaaccgcgtattcatttccaaaaaataaaaatgatgctgctgatccattaaaaactcataggtacccgtatttgtataacccaactttttggttgcgttagccactaattgtcccaatttggtccgttcagcagtcgtgatgaccgcacatggactttcctctaacactttttgatgattccgttgtagcgaacaatcgcgctctggtagataaataacatgcccctgttgatcggctaagacctgcacttcgatatgcttcgccggggcaatgattttttctaagtacaaccgatgatcatcgtatgaagcttgagcttcctgctgagctgttcgaaaggccttcgctaaatcttgatcattgctaacagcgcgaatccctttaccgccacccccagcagcggctttgatcataactgggtaacctaaggtatgggcagcttgcatagccgcctcaacatccttaagcaccgatggactgccgggaatcacgggtacgcctaatcgttgcatggtctgccgggcattttctttgtcacccatctggtcaatcacctcaggacgcggtccaataaacgttaactgacaatccgcacacatttttgcaaattccgcattctcagataaaaagccgtagcctggatgaatcgcctgacacccggtcaaattagcagcgctaataattgcttgcatattcaaatatgactggttgacgggactcgccccaatacagaccgcctcatcagccagatgtacaaataagctctcctgatcagccactgaatagacagcgaccgctttaatccccatctcatgaagcgcgcgaataacttggaccgcaatttcaccacggttcgcgactaagacttttttaaacaatcgccatacctccttcaggcttgcattacaaaggttaaatcagcactaacaacctcacgaccagcacaggtaatcacgccatggcctgttccgatttgacgacgcaacttagttaacgttaccatcgcttctaaccggtcacctgggcgcacatccgtcttaaaatcagcctgccgaattccgccaaaaaagacgttattaccatgatgctccggcatcgatagtaaagccacaactcccgtttgagccaaaatttctaataatactggccgaatcatcgttcttccggtcagtgtcggactctgaaaaaaccattcattaatcgtgactaatttttccgctgttgcgctgacacctggttggaccgctatgatacggtctaataattgcagcggaaaccgttggggaattaaatccgtaacttccattaaacggtcgtctcctcaattgcaaacaatggttcatcaaattcaaccatagttgcattcttaattaaaacttctttaacgatcccactaactgggctagggacttcgttgatcattttcatcgcttcgattacacacaaggtttcccctgacttgacacgatcacccacctgaacaaacggcgcctgtttcgggtcggcagctaagtaagccaccccaactaggggcgccgtgaccatcgttgttcccgattgagtcgccacttcagtcgtcggtttgaccactggtaccgtagagtcggtcactgccggctgtgaacgcgctgaatttgtctcagcagtttcagcttgtttattcaaatgcagttcaaaggttgtcgtcttgacgtccatgacttgagcgctggattgattaaactgattgatcagggcggtcatcgcttccgtatccgtcatactcatacattcacccacttcttaaaggcaaccacggcattatggcccccaaaaccaaatgaattactcaaagcataggttgcggcttgatgttgagttgctggcgttactaaattgactggacactcaggatcttggtccgtacaaccaatattcgcaggtaactgacccgcttgcagagcaccaatcgttgcaacagcttcaattgcacccgcagcgcctaataagtgccccgtcattcctttagtactgctgacttgtatatcttgaccaaacaacgcgctaattgcttgagcttcggcactatcattcgcatgtgtggctgttccatgagcattgatgtaatccacatcacgcggctgaatgccggcttccgcaacggcttgttgcattgcacgtttggcaccagcaccatccggtcggggggctgtcatatgataagcatcgctagtcgttccgtaacccacgacttcaccaagaatctgggcgcctcgggcttgggcatgggccaacgtttctaagactaacgtcgcacccccttcacccatcacaaacccattgcgttgacgatcaaacggtaatgaagccaacgttgggtcagtggctttcgacaacgcagtcagggacgcaaaccctgcaataccgatttcgttgacggaagcttctgaaccacccgtgatgatcacatctgcctttccttgacgcaaatattcaaacgcatcgccgatggcattcgtcgccgacgcacacgcggtcacaatcgcttgactggtattctgtgcgttaaattgcatcgcgatattaccaacaaccatgttgatgattgaattagggacgaataacggtgaaactcgtttgggactcttgtcgtgcatcttgatcacttgcgcttcaatcgtcgttaaaccaccgatacccgaaccataaataacgcctaatcgttctggatcaatatttgcttcatttagtccggcttgcgccatcgcttcacttgcactgtatagaccataaacggaaaataaatccaatcttttcgctaatttcttttcaattcgttcttctggctgaaaatccttaacctcaccggcaactgtaatcccagtgggcgtcgcgtcaaacttcgtgatgggcttaatcccaacttgtcccgcgaataaccccgttaaaaattcatcaacactattaccgaggggcgtcaccgcacccattccagtcacaactactcgttctgtcattggataacctcccatatcttatatcgtcatgccaccgtcaactgttagcacttgtcccgttaagtacggttggtgcaataaaaagtcaattgcttgggcaatttcgtcgggcgtcccaaagcgtttgagtggaatatcacttaaggcagccgccgttacacggtcattcaattgtgccgtcatggccgtcgtaatcattcctggggccaccgcattacaccgcacttggcgccgagccccttcctttgccgtcgttttagttaaaccaataattccagccttactagccgcatagttcgcctggccgatattgccatgtaacccgaccacactagcaacattaacgatggcgccttgtcgctgtcgctgcatgacttttaaagcgtatttggtcatattaaatgtgcccaataaatttgtttgaatcacactcatgaaatcttccgcgtgtagccgcgttaataactgatcatgggtcacaccagcgttattcacgagtccatctaagcgaccaaaatttgtcatcacggtctcaattaaatcagccgccgtttgatcatcgctcacatcaccaactaattgcgtcaaccttggatattcagccgttaatgcttgccaatcggccgcttcaatttcatgatgaacgtttaaaataacgctggccccctgagctgccaaccgtttgactgttgccaaaccaatacccttagcagctccagtgactaaaatcacttcatccacgctcacgtacctcctcagtatcctgacaataattctgccaatctgtcatatcttcaattgaccaaacccttacccccggcaatgtttgtttggtaaaagttgctaaactatgccccggtccaacttgaataatctcatcgacctcatatgtcgcaattcgttgtaagcaggccgcaaagtgcgttggcgatactaactgttttaccaacgtttccttgacagttgcctggctaaagggggtcacggtcgtattactgatgaccggaatttggggtgctgcaatattaacaaatcgtaatcgttgcgccaacgcctcactcgctgctgccattaacggcgtgtgtgaagccaccgcaacgtctaatgggaccacccgtttaacgccgtgtgtttttaaataggttcgcgcagcttgaataccagctgcatcgccaccaataacaatttgatcagctagattgtaattagcgggatacgcaacccccactgcttgggcactttgacaagcggctgcaaccagtgccggcgttaccttcaacgccgcgaccatctccccgggatgctgtaatcccgctcgttgcatatatctagcccgatcggcaactaacttcaagccatcagcaaatggcaggacgccagctgcaatcaatgcggcatactcgccaaggctcaatcctgttaacacggttggacactcattaagcaacgctgttaaagcacgatataaccccatattcatcgctgtaattgcaaccggcatccgttgagcatcatcgatccaatcagcagttacccgcagatcccagtccaacacttgattagcttcgtcaatcgtggcttggtacgctggtaacgtttgataaagatcggcccccatatcggcaaactgttgtccttgaccactgaataagattgccgttttcataacttagtcctcgctattttcctgatgagtcgccacataatcaactaaatcaccaaccgtggctaaagcgtcatccgtttcgatttcgatatcatattcgtcttcgatcttatcgatcacttcaaaaacgtccagactatcaagtgctaagtcttcggtaaagttcgttgtcatcgtaatcttgtcagcatccacgtctaattgttccacgatcatctttttaatttggtcaaaaatttcagttttagtcattgttgattcctccagaatttttaaattaattttaaatgcttgatttcagttatcaattaatactcaattacgacactaccgacggataacccgccgccaaaaccggtaaacaccagcttgtcaccacgttgaacttgcttttgggcaaccatttcggcaaatagaatcggttcactggctgccgcagtattgccatactgtgcaatgttcatcggtaattgttccgtagctaagtttaatttttgaccaacgctcttaacaatacgtgcgttggcctgatgaagcacaaatgctttaatatcactcgactcgagccgtgcctgcatcaacgcctgctcaattgagtgcggcacttgcttagtggcaaagtcataaacccgccgaccattcatctgaaaggcccagcggttagaatctgcaccatcagtccgtgtcgaccacggattcacctgaggttgctgtcccgccgttaaataatgcccgtcagcgccaaacgtcgcgtaatgaccgcccagccagtgcccagtggccgtattaggcttagcagtaatcaatagaccacccgcaccatcaccaaataaaacggcagtgctacgatcatgccagtctactaaccgactcaaggtctcgctaccgattaacaaagcggtctggcccggttgtaagtattggtgaaccaactgcatcccataaacaaagcccgcacaggcaacattgatgtcaaaggcaattgctttttcagccccaattgctgcctgtacttgaggagccgtcgccggtgtcaaataatccggtgacatggttgccacgatgatcaaatcaatcgccgtcgccgctagccgactttgctgcaacaactgctgggcaactgaaacagctaaactcgtcgttgtctcatcggtcgcgacgtggcgagaacgaattcccgttcgctgcttgatccaatcatcagaagtcgccatcagttgcgttagttcttgattcgtgactttggtcgtcggcagtgccttagcactcgctaaaatcgaaaaattagttgtcatggttggttacaattcggcaatgcttttaaaaaactttcccaaacgacaatcgccgaattgccattaccacctttctattttgaatcagttgcaccaacgataaaggttaaatcagttgtgcaggctgccttgtcaccgaccatcgcctgacaactcaccgttcccatgttggaccgttgcttgaccatttggacatgcaacttcaagacatcaccgggacggacaattttgcggaacttggcatccttaatggcgccaagataagccgtcttaccagcaaacttttcagatttcaaaatcagaatcgacgcggcttgcgccaaagcttcaataatcaacacgcccggcatgaccgggttaccgggaaagtgcccttggaaaaatgactcattgatcgtgacatttttcgtcaccacgatcgattcacccggatttaattcatccacccggtccatgaataaaattgggtaccggttggggattaattgcataatttcacttgcttctaacacactcatagttagtcgctcctttcacggcgtttgggaatggcattaagttaatcgtccggccaaatcttgtcaattgatttcagcagattaatttacagtatgttacattttttagtagccaaatcccggtaagctgggctctaatcgagctttatttttttgcgaaaatttcttgacgatccattttttgcggtcataatccgtcaacgaactggcacagtttagcaatttgactataaagtttataatcaaattgctaacaagttttgacttcagcaagcagtgatacaatctgttcaactgtcactagcttaaatgcacgcaaaaaaaaattgcatctaagaactagcattcttaaacacaattgttatgacgatctattaatttaaaggattacccatcagtctaaagccatcacatccataagattttaacgcccataacttttaacctaaacggcaatgcctgttaatttttgaacatccccagagattgttggcggtaaacggatggactctgatgaaaccattttttaaaagctctcgaaaaagactctgggtctgaataccctaacaaatagctgatttcaatcaagtttagcgattgatctttcatcaagggtaccactagggttcgacgcgcaatttggacttcatcattaaatgtggtgcttaaagtactaagatgacgctgcaaggttcgtttactgagattcaaacttgttgcaatctcgtcaattgagaaggaaccactaggaattttcttcaacaatagtgcttgaacagtcgcgagcaatgattggttgtgttcaatagccagtttttgttggtctaaccctggttgcaaaaatgcccacattgaattattggccgaaataagcgcccgctgtaagtccgtgacttgaaactgaatgcaattatcagccaattgttgaggtcgaatgcccatcacggcatcaatctgatcaccatacggatacttactaccaactgaaattggcttgatgagttttcccgtacctactcgtaacaagctgattaacaacaattgttccgtcataatcgtgaaacgcggcaactcgacgccaagactatttcccaaaatatgaatattgacaatatctggcttggtcactatctctaaatgaaccggacctgccaatgatttatagtttgccatgcgtgcaatcgcttgttcaccatttttagcagctaatgctgcaaaaaaggacggcataaacgtattaatgttagtaatattccctaaactaagaatcatttcatccgtcaattggttgtcgaattcgttcattaactgccaatactccacatcagaaagcattaattgttcttgccaaaccactttattaataccggcagcttcaagcaggctatttaaatcaacgccaaggcttgccataaaacactgaaactgttcagaaaccataatcttcacactaatcactcctactaactggcatgcatcatgataaaatcaaaaacacgagtcggtaaaatcgccttagcaagtaccagcggtttagccccaaatccaattaaataacgcacccgtggtcgtttctgattgaccgccttcgaaatagctttagaaataatttttggatcagacatcattcgcgacgagtattgtcggcgcatacccgcggcagccttggtcgcttgtgtttgatatgcactgtgacgtgctgaggcttctaaatgatccgcagcaatgaatccccagttggttttaatcccaccaggttcaataattgcaactttaatgccaaagtctttagtctccattcgtaatgcgtcactaaacgcttcgacagcgtacttggttgcgtgataccatgcgcccatataactcaccaaccgtccacccatggaagaggtattgataatgcgtccttcacgttgcgcgcgcatatacggtaaaactaattgtgtcagccgagccatcccaaataaattaacctcgaactgttgcctggcttcatcaatggaaacatcctccacagcgccatatgagccataccccgcattgttgatcaaaacatcaatgcgtccttcactggcaattaaagttgctacggcctgactaagcgactgctcattggttatatctagtgacaagggcttaacgccgtatggggctagtgcttcaagtttattcaaccgccgcgccgcaccgtaaacaacgtgaccttgctgtgctaagtctttcgctgtctgaaacccaataccgctgcttgcacccgtaattaaaataactgccatctcaatgacctcctatgtttttcaataacaatagtttacatagaaaatcgcaacggcttaatgatttatcacgtcatcatcataacataacatgccattttttggcgcaggccattaacagctgatattaatcaactcagacaactgcaaaatcgcactcattacgcctggcgctgttgatcaagccctgatggtctaagtattttaaaataactacaccaccaaaaattcgcttgaaattaatttcaggcgaattcataaacatcctgctgccaatttctcatcctaatcaccatccgccaatgcccccgctaactagccggcactgcacttccgattgcaatataacccacaacaggacgctgaaacccaccatgacacctaaacactgcccttcaaagcctgttagcgtcggcagttgcaagagtccgagcttgcgccgtttttgacgggctaacttaatcatgacttcacccgttaccacaactaatagtggtaacatcactagccaccagcggctgccgaatgaatcagccaagccggcactattaaaatgtgtgacaactgtttgcggtgccaaaccaatcataatgacacatatcaaaacggcaccagccacaattgttcgcacgatccaagtaaagactcgcattacgctcacctcatttttgacccagtatagcaagctggcgacagcacggacagcaaaatgcgttcttttaaacggttaattatcgaagccaactacaatcgtgcgaccagctagctttaatgacacggttcaactggttgcatgtcttttttctaataccaacgcaaagactagtctagatcaactaagcttgattgatttttaccattaaattatcgccatcgaaaaagtcgtttcagcacgatgaatcagtactgaaacgacttttaatcgattgcttttaagcgactagttacctagtcgagattaatcaatggtaatcatagccttaattgtctttcgattttgcatgtcttgataagcccgattaatgtcggctaatggatacgtttgcgtaaatacccggcccggattaatattaccgtccaaaactgctttgagtaagaactgtttgtcataagtcgtaacggaggcggaaccaccagcaaccgcaatattttgagcaaaggttgacccaagtggccggttattataatgtggtacacccacatagcctacgcgacccccattatgcaaaacacctaaagcttggtcaatggccgcttcagtgccgacacattccaacgccgcatccgcgccgccaccaaggatttcgcgtacctttgcaatgccttcgtcaccacgttcagcaacaaccgcggtcgcgccagaagcaagtgccatttgctgccgatcttcgtggcgactcatcaagacgatttgcgcggcaccccgcaacttagctgcaatcacagcacattgcccaacggcaccgtcaccaataaccacgactttatcgcccctttgaacgtttgcacaccgtgccgcatgataaccagtcggcatcacgtctgccagcgtcaacaatgacttgagcatcccttccgtatagtcactaggttgaccaggaatcttaactaacgcccaattaccataagtgaagcgaatgtattctgcttgaaagccattagaccaatttgtgtggtccggatgccgatcacaagtaccatcgaaaccagccaaacaagccgtgcactcaccacagccatgggtaaatggggtgatgacaaagtcgcctggcttgaccgtcgtaatggccgagccaattgcctcaacgattccgatagcttcatgtccttcgttgatcgaatgggcagccttgtcatcaccatgcgcatatgaccacaaatcggaaccacaaacacaagtccgcacgatgcgcacaatgacatcatcatcagattgtaatgttggtttgtcaacttcctgaacagatactagtccagctttttcgaaaattgttgatttcatcctaatcacctttggccgcctcaaccaaaattcaatcagcggtcgttcccttcatcattaaaataataatattaaaactaatacacatatattataacaataatctgcacgtatcagttaatgattgcaccaagtcgggtatcaacaaatactttagttactcagataattgtgaccagactcgcttgttacttatcattcagaagctttccataaaaaatgcgcccaaccatgttagtttcctagcaaggtcgggcgtcttccctttgtcgattgaccactttcaattcaagctcgaacccactttaatagtgccgtagctgccaattcatggaagcgagcgccataggttaggcctgcgtcatcacagcggtaatttgattgatgtaaggtcccattgccgcctgaacctaagaatccatagaatcctggaatacattcttgatataacgcaaaatcatcgtcggcattgcatagctgggcaggcacaatatcaaaatcatctttcagaacacgtgatagtacagcggtaagtgccgcgttattgttgacacagcttggtcctcggtcccaatcaattgtagcggtttgctgattcatcttggcagttgcacgcacaatatcgtaaaaacgtactttagctagatcccggttagccgtgttgaaggtccgaatcgtgcctcgtaaattcgccgtatttggaatcacgttaaaagtcgttcccgcttggacggcagcaatcgttagcaccagtgctgcgtctggcgcaatatttcggctacgaatggtctgtaaattactgatcaattcaccaagcgtcacgatgggatcatgacttgcttcggacatcgctgcatgggcgccctggcccaaaattgtgacgtcaaaattatcattactagccatgagtggtccagacttcatcgctaaagtgccgactggtaaattcggcatattatggaatcccgcaatcgcacgaacacctgctagaacaccattatcaatcatcattttggcaccgcggtgtccttcctccgcaggctgaaagatcagtcgcaccgtaccattgagatctgcctcatgcactttcaataatcgcgctccccctaataaggcggccgtgtgaaaatcatgcccacaagcgtgcatccgaccaggaatcgttgatctaaaggataactcattgtcttcttggattgggagtgcatcaatatccgcgcgcaacgcgatgattggcgcaccatgcccaatctcggccaccaccccagtttctcccggatagtctaccaaccgaatgttcaactcagtcaatgtttgcttaattaaagcggtcgtcgcgacttcctgcagtgctaactctgggtgtgcgtgtaattgatggcgcaaggttgtcatccaagctgctaaagttgttgtcatcatctgaaaagccccctataaaattttcaagaagattgacgcaataatcactgacgccactgagacggttgcaaaaccgcccactaacattttaggtaacatctggtctagtaaatattgcttttcctccgcagtcgatcccataatttcggtcacttcatgggtgacgatatagtccgcggggaaaccaaataaggcagtcaatgcacttgcaaaagccatttcgcggctaaatcccaacggtcacgccaataagctagatgcaatccacatccctaaaacaccaagaacgatcaacgttacaatcgggatcaaaataccacttaacatgctgattttaacaatgtttagattggcaaaaatataagctagcaaaccatacatcagccagtgaaagacgcccgctttctccaacaccgcatcttctaaaaagcccaactgatgcgcgataacaccaaacactaaacaaatgatgtactgattaatcgtgccatgggctaactgggcagtccattcagctagcccagtcacagcagcgactttaaataacataaaagctgaagtatcataagcagccggtagttgccaatgccgtaattgaggttgaactgatttcaccttcgctggtacggttggtagcgggcccactggtaattgcgccgttgtttgaactgtcgcactggtggcagaatcagcggtcgcgaccgtgacgtctacatgtcggacttgcaatagtcggcgactctcccgttttagcatccacgcggttagcggataaccgagcatgctgtgcatgacaaacattgccaccggaaacgccacaagtgcggtaatatgttgggccttgagtccagctgtcatcagaaaggcagccactaacccacccgtcaacgggggcacactggcaacgatcgtgtgccaatcaaataaaagacggccaattcccatcgtgagcaccactgtcccaaccacgccactcagggcaatcacaactgcgcgccactgttttaacaacaatttcagatccatcaacgtccccatatgaaccaataaaacggcttgggtaatttgaataaaggcagtgccaaaagaagcagcagggacaatgtttttgggaacaattgtccaaaaacccactagaaataagagtgccgtaataaatacggatggaacataggcccgactgcgcgtggaaacccactcgccaagcatcataaaacccatgacaaccattagagaaagaattgctaccattaccatcacttccattagcttaatttacgatcggctttttctaatcgtattatcataatctaacagaaagccaatcgtagaacgagccgttcaatcagatttcgtttaaatctaatctcattcgcaacgacacaaacgattctaaagtatcgcacctagttccgataagattccaaatactagattgactgaactaactaagcaaatttcaatcaaaatttaaatccatgggacaatggactgggcgttcataaataaattgacgccccaatcgaccatctatgcggcgatgcgtatcagtgaaaccatgggtcaggtataaatgttgcgccacatgattggcatgattgaccgctaataatattgtttgaatcatcggataatgactggcaagataacgtggtaattcggcaagcgcgtcagacgcaacccgctgatgcttaaagcgatcatcaacagataaagctcgcaacaaaatcgtattcacttccgtttcaccgtaactgagcggtccttgaccaacatgcaaacagaaaaagcccactaattggttgccattcataatcataacggccgttcgttctaaatcagatttgcaagcacgaataacttgttgtggcgtcgccgtgtacatcacattaaccagttgatactgttgtatttgcttcagtgctccccgtgtcgtcgaataacgtactaattgaatcatgaccatcacacttccatttgaccgatttagcacttagtgtaacagtccgtggtcatgactgggaattttaataattcaattgttgaattgactaactggcgctcgattcagcctgcactactaatccaccacaaaaacggcatcggaaaaactgcccgatgccgtttggtgatattcgattaaaccagttaatttcaaatacgattcaagtacttcatgggcgcaataaaatcttgccagcaacttgcccggtctcaagggcccggtgcgcagcggctccttctgctaatgaatagactgtcgctggtcgtatcgtcacgcgatgcgtgagcacatcatcaaacaattgattggcacggcactgacgagcagccgcgctgtccaaataatcccataaatcaccagtcatcaaactcttggattcggacattagcttgactggatcaattactggtggattgccagctgccatgccataaaaaatgacccgcccacggtgcttggtagtcgccagactaactggtagtgtcttaccgaccccatcaaacaccgtatcaaaaaaattatgatgggtcgtgtcccaaggatcatggcgcataaaaacggtggttgcgccagcttgataggccaattcagctttcgccggtgttgacgccacaccataaacagccacctcattggccacgagcagttgcgttaatagctgcccaacaccaccgctgatgccatgaatcaagactcgatcgtgcggttggctttgtgctaagtcatggactaagaactccgcagtcatgccctgcaatccaatgctagcgacctgctgatcattgattgcccgtggtactttaatcgcctgatcagctggaaccgcgacaaggctagcgttggcaaacggcacgtcaacgaataacacccgatcaccgcgtttaaaattcgccacttgcttaccaactgccacaaccgttcccacgccttcataaccatcaatgtacggttgatgcttttccaaatgataggtaccacgacgacgataaatgtcggcaaagttgagcccgatatacgttgttttaaccaatacagtatttgcagtaacgattgggtccgccacctcaccgtactgtaggaccgacgcatcgccaaaatcattaaaaaataatgctttcaactaatcacccgtcttttctaacaaatcgtcaatacggcccgatgctgttaccaacgtcaagaaacggtggttccaaatccgatcttgataaaaatcaatcgtttgttgcgcactcatcatggaattggccgtcgttgtcgtcaacccccgaaccatttcgaggtggtagcctaacccatgagccattttaaccgtcgtatccacacaaaactcaacttgcgcaccacagatttcaagtgtttgacatccaatcgccgtcaattgggcttgtaaatccgtgtgataaaaagcgttggcgtgcgttttctggaccacaatatcggttgcttcaattggcaactctggtatcatctgccaatcggcagaaccagtgactaagtcagcatcgtgatgttgcacaaacacgattggcttattttgagcccgataactcgtaatgcgctgttgaatacccgcaatcacggttgccaaattggcaaccggttgggacccgcgacagacaccaacttgcatatcaataataatcagtacatccgccatgttgagccctccttaaattaatttaactggcttggttagcgtcaactattattaacgacgcccacaaagcagtaagctgtttttagactagcacattatcctagcgtttcccagcatttaatcgaagtagcccggcacaacaacatcgtaacaaacaagatcagtcaactgtatcagccgtgcgaccatccaatgcgcgccgcatccgtcgcgtatagtctcttaagactgctgtcgctggttggtgcgtcgcaatcaaatgcacgactgcactaccaacgatgaccccgtccgcaatttgtgccatggcctgggcctgggctggctcatggataccaaaaccaattgcgacaggtaacgtagtcgcatggcgaatcttcgccaccagtgttgctaaatcagtcatgatgtgtcgccgggtccccgtgacacctagtgatgatacgacataaatgaagccccgcgcctgctgggcaatcgctgcgatgcgtgcatcatcactcgttggcgcaatcaatggaatcaaagcaataccatagtggtctaaggttggtcgaagttcaccagaggcttctagtggcatgtcgggaataatcaagcctgcgacattcaaactttgacactgctgggcaaaggcagcataaccaaactgataaacaatgttcgcataggttaaaaatacgagtggaatagttgtcttctctcgaattgccaccaccaattcaaaaacgcgttggggtgtgatgtgttggtcaaacgcacggagatcagcggcctgaatttcgggaccatcagccacagggtctgagaacggaatgccaatctcaacgagatcacaacccgcttctgctaacgcaacaacttggtcaactgtcgcttcaaaattaggatcaccggccactacaaaagcaataaacgccttatgatttttaaaaattgttgttaaatcagtcatcaattgtcacccctcgatactttgcaattgccgccacatctttatctccacgaccggataacgtacaaataatagtttggtcacgtcgcatcgttggtgctaattgttgtacgtaggcgactgcatgggcactctcaatcgcacagatcaccccttcgaccttagcaatcagttcaaatgcttgtactgcttggtcatcggtgatccccacatattgcgcccggccactcgcagccaggtaggcatgttccggtccgacgcccgggtaatccagcccagccgagattgaatagaccggggcaatttgtccggctttatcttgtaaaaagagtgacttcatgccatggaagataccagtccgaccacgttcaatcgtcgcagccgtcaacggcgtttgaacacccttacccgctgcctcacagccaatcagctcaactgacgtatcatcaagaaaagccgcaaaacttccaatggcgttactgccgcccccaacacaagccacgacggcatccggcaaatgacctgtttggtccaggatctgctgtcgggcttctacactgatgacactttgaaattcatgtaccatcattggaaatgggtgtggtcccgttgcagagcccatgatataagctgtatcatcacagcgccgcgtccactcttgtaaggccgcattgatcgcatcctttagcaccattgaaccagtcgtgaccgggtggaccttggcccctaatagttgcatccggtaaacattcaatgcttgacgattcgtgtctttcttacccataaagacgtcgcattccatcccgaacaaagcagcaacagttgcagttgcgaccccgtgctgtccagccccagtttcagcaatcaatcgctttttgcccatcttctttgccaacagtgcctgccccaagacattgttaatcttgtgcgcacccgtatggttcaagtcctcacgtttaaaataaatctgagcaccacctaattgatctgataatcgttgtgcatggtacaacaacgatggccggttcgcatagttattcaacaagtcagtcaactcttcttgaaactgcgcgtcctgtcggtaatgttgaaaggcgcgatccaaccgctgtagctcggtcattaatgtttctggaacgtactgaccaccaaagtcgccgtaacgccccgcctgtgattgatttttaatcatactaattcctcctaatttctgttaataatggtgttgacacgcccgtttggtgcgcccgttggaccatcagattgattttttcacggtctttattgcccgccgtctcgacgccactagccacatcgaccattgccgggtacaccttgttgattgccgttacgatattcgtcggtgttaaaccaccagccaagataaacggccggacgggacgctgtgattgtaattgattccaatccaacacctgtccactacctggacgggcattatccaataataagtaatccgcttgacattgcgtagcattcgctggcgtcatcgcttgaatcaccggcacatgggcggccattgaggacgcaatccgaggatcatcgacggtagcgtgtagctggaccacctgaataatgtgttgttgcacgagagctaaaatttccgataattgattagttgtaaacacgccaacacgccggatacgcggatctaattgctgtgacagttggcgcgcggtcgccatcgtaatccgtcgtcgacgaccgggggcaaataccatcccaattgcgtctgggagcgcttgattaaccatcacgacatccgctggtcgcattaagccacaaattttgatttgagtcatccacgcacccccgcccgcaattgcatgacggcttgacctttatctggtgcacgcatcaatgtttcgccaactagcatggcgtcaaagccagcagcggccaactgttgagcctgtgtggccgtttgaataccagactcagcgaccacataacactcagctggaactgcttgccgtaactgacagctcgttgcaaaattgacactgaaatctttcaaattccgattattaatgccaataatccgggccccagccgccaccgcttgcttaatctcagccgttgtatggacttcaactagcgcacttaaattcagctcatgagccaacgtaatgaaagcctgcagttgaaccggtgttaaaatagcaacaatcaataaaaccgcactagcaccagcaatacgagcactcgcaatctgactagcagctacaataaaatctttacgtaatgtgggtaccgagaccgtttgcgcaatggcttgtaagtaagacaactgtcctttaaaataccggggttcggtcaacactgagatggcatcgatcccagcagcaacatagtcttgcgcaatctgtaaatagtcaaactcagccgcaatcagccccttagaaggtgacgcccgcttaacttcaccaataagctgtaagcccggctgggccagcattgcttcaaatgataaaacgggggtggtcatttttcgagcttgttgaatgcgcttcacacgctccctaactggcaccttctgaacccattgctgactcgcctggacgagttgatctaaaatcatgaggccatcaccgcctgactactctgaattaattgggccaacttagccgcggccgctccttgatcgattgtttgctgggccaactcaaaagcggccgctagatccaactgtggcttggcaatatgcaacgccgcggcggcattcatcaacaccacgtcacgaggggcccccggttctccagtgagtactgcccgcgtgatggcggcattaacttgggcactaccaccaataagagccgcatggtcacaacgcgtcagtccaaactgttcaggcgtcaggattcgcgttacttgctgcccatgattaattacgatcacatccgtaggggctgccgctgaaatttcatctaagccgtctcggctatgcacgaccatggcatgtttaacatctaaacgcgtcaacacttcggctaatggagccattaaagcttgccggtatacccctaatagttgcatctcagcatgagctgggttggctaagggacccagtatattaaaaatagttggaatcttgatttgttgccgagccggagcgacaaatcgcatcgcctgatgatattcgcgcgcatacataaaggcaaaattggtccgctctagcaatgctagactctgagcgggcgttagatcgattttgataccgagtgcttctaaaacatccgccgcaccactcttggacgacgccgcacgattgccgtgcttggtcactggtacacccgcagcggcgaccactagcgcagtggtcgtcgaaatattaaacgaattcgaccggtcaccgcccgtcccaacgatttctagcgtgggccgtttaactttaaaaggtaacgcctgggaacgcatcgcagttgctgcaccagcaatttcatcgatagttgcctttttgatggctaaggcggtcaaaaagctcccaatctgtgcgtcggtggcctgacctttcataatttccgtaatgacttgttggctcattgtaaagtctagattttcttggttagtgagttgtgcaatcgctgtttcaatcataagtattcctccactctcgtctgcttaatgtttaagtgctaaaaaattacggatcagttgctcaccaacggcggctggcgtcatgattgattctggatgaaattgaacgccgtacagctgacggcccacatcttccactgccatgatttcctgatcatcgcttgtcccaatgattcgaaagttaacgggcaaacggcccgcatcagctaccaacgagtggtagcgcgctgccatgaactgcatcggacaatctttaaatagtgatgacggctgcacgtgcattaacgtggcttgcccgtgaactaaatgctgggcgccttgcagcgaaccgccaaaagcggtgaccatcacttctaatcccatacaaatccccaatatggggacctgaccagctaattgttgcacgacttgtggactaactcccgtgtgggctggcgtccccggccctggtgataaaatgatatggtcaggttgtaatgccttgattgcagcaaccgtcaaatcgtcatttttaatgacccgtacatcgggcgtcagacgaccaattagttgatacaagttataagtaaagctgtcatagttatcaattaataattccatctttaactcgtcctttcgcgtcttgtactgcattaacgatcactcgttgtttattctggcactccttaaattcttgagcgccgatactgtcagcaacaatgcccgcacccgctggaatcaccaaccgttcatttatccggtaggccagccggatgccaatcgccatgtccaaattaccgttacaatccaagtaaccaaagcaaccaccataaacaccccgcggcacctgctcataatgattaatcagggtcattgcttcaatcttaggcgcgccagctaacgtcccagctggaaaagtagcggcaagcacttggagtgctgtagtagtcggcgccacttctgcggccactcgagaccctaagtgcatgacttgcgaataacgaattaatcgccgtaaattagtcacccggacacttttaaactttgcaacttgtcctaaatcgttacgtcccaaatcaactaacatattgtgctcggcaatctctttagggctggtttgtaattcatgagccaactgccgatcctcggcaggtgttcgaccacggcgtctcgtcccggccaatggatacgtcgcgacttgttccccatccttcgttactaacgtttctggtgaggccaccgtcatttcgaaattagcctgtttaaaataacaggtatacggggccgctgttttttgaagttgctgataaactgccagcaatgacccgctcatggtccccaaacatggattagcatatatcatttggaaaatatcaccagcgtagatgtgttggcgaattcggtcaacctgacgcgcataggtcgcttggtccacttgcatgtgtaatggttgctgcaagtcaaatggtggcaaagctattggttgctgcaattgttcaataatggcggctaactgttgcgttagagccgtttgagtcacggcgtaagttgccgctaaatccgcagttggaatcagctgtgtcaacccaagctcatgatgtcgatgatcatagacgagcacactcgtaactaagaataaacctaagtcatcgagatctgcggttgctggtgatttcaaatgcaacttgggtacaaattgttgaacatactcatagccgaagtatcctatcaagccccccgtaaatggtggtaatccatgaattcgtggtgttcgatattggtttagaatggcttggagtgtctcattagctggtcgttggtgcttggctagttgccgacccgtgagacttcgctgtggtttaaaactaaaatagctatatcgttggtgccgatcaatcgtcagcgcgaaaccgttccccatctggtggataattttagcaaccgcaatagggtcaaatgtgacgagtggtcgtttgaccatcactggtacgtagggataatgatcctgataaggaatcaaggttggtaatgttggattcatattgaaccactcctcattaataagatagttttacttgagttgtggttaattgccatcgttgctgcattgaactgccccctatcaaaaaaatccgtccatgactaatgacagtcaaggacggatttttccgcggtaccaccttggttggacaccaaattaccccattcaggttagacttgggtcccagcttagcgaaatgcaaacacattcccgggaattgacgactccctatcgtcgcgaggtagtagaacaaaactgttcgttagtcgcgccctcagtggtccatttaataatttgcgttcgatcgcactctcagcaacggcgactctctttacgggcatcattatcttgatctccacttcatcggtttcatggacgaatattaagttgtcattaacattaaaactcaatgagcaatttgtcaacacttttatcttaatttaatattatgtgactgtgaaattaacacttattagtcaagttgctgccaaaaagtcttgtagtaatgccagaccaaaccagcagaaataattccgacgccaactaatacaatgatattaatcagcatagctgccgccgcgaacagctgaatcagcacactatagatcacaattgtcagcacacccacaatactgcaggccaacaagttaagcatcaaaccaagattaccgccgccccgattaaacaattgggtcacattagtccaattcgtcagccgtagctgataatcacgcttaaagtaatgttgggcagctaggtacgtcccccaagcagcgcccaatattagagccaaatctagggctaatggtgctcgcccagcgatacccaccactagaaccatcacgccattaatcatgacctggaaccaataacccaagtaaaacttttgtcgtaagtaacgggacattgggattggcagtgcacgcacaaagtcaaagttcattttatcaagtgaaatgagattaccgactaatgaggtttgattaacattgacgatcgcaccggccatcccactgacaaaccagacaccgagccagttcagcgatagccggctaaaattaggagcggtccccgaaaagaaaacggtcccgactaaaatcaatggcagcaggattgaatctgtgaataattgtaaggctaaactgggttctttcagtaactgaaactggtaggtacgcaaaattttattgcggttatgttgtcgtgaatgtcgacgcggtggtgttgccactaacactgagttgacttgcgtaagctgttccgctaagtgggtcaaaacaaaccgtcctgtcagtgcgaacaaaatcagcgagatgacaattaaactcgcccaggttagcaaactcgtcattgtcaacggcgtcgtgaaaactttaaaaatcggtatcaataggggtaatgctgcgcggtcaacctgcgttccggtgtcagatgatgagccgcgattcatgaagtagagcccgactagcactaagacagcgttaaggcctaacatgacgttcatcaccattttttgatgggcgcgaaacacggttagcttggttaagccaaaaactattagggcgcacaagcatagtaacagactcagtattaggccatacatcaagacggccatcagcacacctaacaccacaaagattccggcccgtgttgcggtcatgataaaaattaaaagtaacggaatggtaaagggtaccgtgttgaatatcacgaccaaaatcttactcataaaaatttcttgattgcggaaaggtaacggtaagtattcaacaagatcattgccggcaaaaaagacgttataaataccggagatactctgtgaaactcccaataagataaataacgccacatagaacgtaaacatgcctggcaacttgctaaaatcaaaggccaacatcgtcaagccataaatgccaagaaacatcaaggcattcaagtaaaattgccgcattagcttcttactcaaggctggccccgaagcgccctttttacgtagccgatccgttagttgcggattcaacaacctgagattaacagccaacaaaacacgtaactgacttttatgcatcatgctcaccctccagcgcatcgacaaggtgatcatccgtcaaccgcccggccatttgtaaatatatcgcctcaagtgattgttgcggatgttgagctagtaattgttcaaccgaaccggtataaatcaattgcccctgcttcaaaattgccaatcggtcacataactgctgcgccgtatccagattgtgggtggaaaaaatgaccgtcttgcctttggcagcatgggccttcatcaaattttttaaatcaaaagcagcttgggggtctaacccttgcagcggctcgtctaaaatccaaatatctggatcgggaagcaacgccccaatcaaaatggctttttgccgcatcccgtgtgaataactagccatgggttcgtcaacgtgttcagtcatatcgaacagtgacaccagctgctgtcgccgttgctgaacggcttcctctgattgctggtaagcggcagctatcaagtcccaatattccatcgccgaaagttgaagaaaaatatcgggtgtgtccggtacgtaagagatcttttctttgacggcttgtcgttgctgttcaaggtctaagccatcgaccgtaaccgtgccactcgtcggtttaatgatactgactaaatttttgatcgtcgttgatttccccgccccgttgtggcccaacaaaccgaagatttgtcctgatgcgatggttaaagtaagctgattcaatgctgtcttatccccataacgcttcgttaattcgtgaatttcaatcatgtgattatccccctagtcatcagttacgtttattataccggaatcgtccgaaaattcgaaaccggagcggtacgttgctcattgattaacgcttctgtcgccaatgactagttccatcacgaaactaacgatttcaccgatccagaagcatcagttaacctcaacttctagggcaagtttcatcagactgttgattaaaaaacatattgcaaccaagaaccgttaaatcacctgcccccaagatacttatgattctagttcgatcagggaccgtcttatttttaataattgtcatatacaagcaaatcatttaggaattttcatctccataaatcaagcacaatttatccgctggcattcccatgttaggcctttttgttacttacaattctgaaagaactccactaagtccaattaagaagctggtaccgttgctgtaacgcaaaaaagttcttctctgacaaggcatcaggccctatcaaggaagaactttaatttacactttgttatttaaataacggctttccatcgcctggcgggcaagaacagcgtcctcaaaatgctgaaacggcttgtgtaacaggtagcgccccttgtagaaaaatgtcgccacccatttttgagtattgctatcccagctgacaccgatgacaccactcttattacgcttagacataatctttgacggtaaatcagtgtgatgatcatgaattttcagattgcttaaccgccccatactggcagccgttttgggattacgtcgaattaactgcgaccgactttctcgtgtcaaacacccacagcttcttgctcgcccatgccgcaacgcgtacgaatcagctttggtctgattgccacagcgacactgacacaaccagagggcattgccatttttggcagttccacaacgtctaatgactgttaagcggccaaacttctgacccgtgatatcgattaaagtagtcatattaacgcctccatttaacggctaattatgacgtttcttcaaaattgcactcacaccaactagtaaggttgctgcggtcaaaccaagtagttccgccgcaacactagcttgccgattatcattggtttgcggtaaagtcgcttgtttgtgggtggctgattgatgagccgcggttggcttaacggatttagtcgtcttcgccagtttaaccgtttttacattggctggtcgtgtctgagcaggctgttcaacagcctgtgcttgtttgagatccactgaccgcttgacgctagcttgtttagcagttgttgttgcgacggtctgagccttatccggcgtcttgaccgttgcgactttatctggcgtgtcagtcgtcttaattttatccgacttattaactgtcaccgtcttcaccggtgtttttggtgtctcaccggttgaaggcctatcggtaacgtaacgaatcgtttgaacatcatccacgctagctggcgtaaccatgactgcctgagtacccattaccaccgcatgatagcccggaatactgaacgccgcgacgcgctcaaaagtgtgatccgcctgattagtcgaccaattgctatacgttacgtccccggtgacctgatcaacccgtttagtacgagtgaatgtcatcgctctgaccgtatcatcgtgcaactacgtgccagtcgtactctgataatgtacggtttgcgtgattgtcttggtctcggttgtcgcagttgtcacatgtgcaagctgaaccagatagctgtgaacgacaccatcatcattgaaaatagctcctgaaactggatagctatcgcggacaagcacgtagccctgattactgtaatcagcaattgtgttagccgtgcggtaatcggatgatgtctgataatcgccagtcaaactgacggtcgcgagcgttttatccgtggtgacatcaacataggtgaccgtcgccttttctgcgttaatcgcatacgtcacaataatgttggtcggttgcgccgcactagttactgcatcgtttcccgtgacccgcgcccggtcagccgtatagccaataataacgggtgacgtcacggtggtataacgaccagtagctgaagtcccatccagccaatcagtataaactacggtaggctcaacttcatcaatcgtggcatcccgattaaacgtaatcagttgaacgctgtcagtgccagccgaagccccattttgataccgatacttaatcgtttgactaacttgtttcgtcagatcttgggcggtcgttcctactggatacttcggtccgtctggattgtctggatcaattggttggcccggcgtacccggattccctggtgtaaccgtaactaacttatgcttcagtgtcacggtataagttttagcaaaatcatcgacatcgaacagcatccccgatacgggataattatcacgtaccagttcataaccgtttttaacataacctgcaatggtttcagcggtccgataattggattgtgtccgatagtcaccagtcaaattggccgtaacgagcgttttacccgtcgtgacatccacataagtgaccgttgctttttcaggttttgccgcataggtgacgaccacctgtgtgtctgaatctgtattagcaactgaatcacgaccagcaacctgtgttttatcagccgtatagccagtaatgacgggtgacgtcacggtggtataacgaccagtagctgaagtcccatccagccaatcagtataaactacggtagactcaacttcatcaatcgtggcatcccgattaaacgtaatcagttgaacgctgtcagtgccagccgaagccccattttgataccgatacttaatcgtttgactaacttgtttcgtcagatcttgagcggtcgttcctactggatatttcggtccgtctggattgtccggatcaattggttggcccggcgtacccggattctctggtgtaaccgtggctaacttatgcttcagtgtcacggtataagttttggcaaaattatcgacgtcgaacaccgcccctgaagtgggatagttatcacgtacgagttgatagccattcttgacatagctcgcaatcgtttcagccgtccggtaactggacgtagtctgatagtcaccagtcaagctttttatagcgagcgttttacccgtagtgacgtctacatacgtgaccgtggcgttctctggcttagcctgatacgtgaccacgatgttcgtgtcagcatccgcattgtgcacctcgtcattacccgcaatacgcgttgaatcagcaacatagcccttaatttccggtgaatcgactggcatgtaatgaccagtcgttgccgtaccagtcaaccaatcggtataagttagcttattgttaacctcatcgaccgtcacgctgcgcttgaaagtgattgtttgcgtattagcgtcggcagcagtacttttatcctgatactgatagtgaatggtttgaccaacctgcttaatcaagtcttgcacagccgtacccgctggatatgtgggtccgtttggattatcggggtcgatcggctcgcctggcgtacccgggttctctggggtgagcggcaggagtttatgttgcaatttgacagtataagcctgagtacttccgtctttatcaaacacagcaccggatgttggataatcatcactgaccagttcatagcccatattaaggtactgagcgattcgatctgctgtccgataattcgagacggtctgataatcaccagttaccggatctgtcgtcagcaccgctcccgttgtcgtatcttcataggtcaccgtggctttttcaggattagcctgataataaacttgtacatctggactgagatccgtcccactcaccgtatcacgacccgcaacactggttgggtcagccgtataaccagtaatcaaaggtgaatcaacggccttaaaacgaccagtcacggccccatcatcagtcaaccaatctgtgtagacgactgtgccattaacttcatctaccgtgacgttacgaccaaaattaaccgcttgaacattgttcggtttagcagtgcgaccatccttgtataaatactgaatggtttgactgacttgctcagttaaatcctcaaagtcagtccccactggatatgtgggtccgtttggattatcggggtcgatcggctcacctggcgtacccggattatctggcgtgcgtgttacaaatttatgaacaagcgtaacctggtactcttgaacactgccgtcctgatcatagaccaccccggctgttggatagtcatcatcgaccaggtcgtagcccgcattctcatacgcggcaatcgtatcagccgtccgatacgcatccgttgtcccgtacgctccttgtaagggttccgtcttaataaccttgttatcagtttggtcaaaatacgttacgatcgccgtttcagtcttggccaaataacgatacgtcacggtaccgccctgatcagttaacgtgccattataggctagtccagtattgggtgctaacacatagcccgtcttgggtttggctgccgtcgtgtaggtcaaatagtccgtggccgttgcgtccgtagcatgtgtcgccgtaccagtttccgaagcatctacctgagtctcaccattagcatctacatgttcgtagaggtacttaaccgcaatatcaccaattgtcaaggtgccaggaatgactgaaatggtatagtttttattcaccgaatcatcagcatcaggagtggccgtaattgtcttagttccaaccgcactcatgccgttggtcacacgatactttaaggtctcaccattaactgtcccagtaaccaccgccgccaaattcttttgcgtcccatccgaccaataaatcttgttgggaatcgtaattgttgctttggctggatcaattgtcagcgttccattgacatacgaaattttataattactggtatcggctgccgtagtcccagtcattgcataagtgccgaccgtagtataagtcgtcgcaccactgccatctgctgcaactgcggtaaatgctaactgatcataattggtcccgctagtaacagttgcagtcgtgccatgtgctcggccgtcataaactgcattatcatccttgaccgtgactgtcagatctgctggcgtgatcaccaacgtcccatccgtcgtggtaacggtatagtttttaaccaaaatcgccgcttgcgtgggatccgctaacgcgtatgtcaggttgtcataggtaccgacgttcgtgtcagtcgtcgtagtaaaatcaaagtgatcatacacggttccagtcgttacagctacggatgtcccctgaggcttgccattataggtcactgtatcattggctatcgttaacctgagaccagcagcctgcaccgcaccaatcgtggtgaaaactgccgcatcatccagaatataattcgaccccagcgcagcttgaactgccttcccaccagcgtcattaagggtgattgcatatttgccagtgtccgcaccggtcaagttagtttcggtgccttgatacgtataagtaaaatctgccaacgttaaaacacgttgaccgaccttgccggctacgcctggtttagcatcgccgatttcgccgttactaatttgaaggatattttgctttgttgcatttttaacggtgactaccggcaacattgtcaatgatcccgtatacaactgtgaaggccgaagtataattagcccattcttaccagtggtggctgtgatttttacagggacaatgttaattgtaaaggtataatcggaggccccagtcgaaaaggttgggacaaagtcatccaaatcactggtcgaggtatcgtaagcattatagtcttgcataacccggctcatcccagctttacccgctgcattgatcgtcactgagtaactaccaatttggtcgagcgttgaaaagtccgtatctccggaatatttcgtgacctgcccatgttcatccgtatacacaacatcaacgtaatcattgacatcagcagagtccagaaaaagtgcatatagcaaattgaccttgttgccgtttacatcttctaagtaattgcccgctgcatcttgaatgtagtaggcgacgtcgttagccggcgtctcatctggagaactaatatgagattctagatccgccagcgacgcctcgccatagtccatcgacacggtccccgtagttactaacgatacggtcggcttcgtttcagcttcactggtgatagctgaaaccgcctgtactgtagacttagtgaccggcgtgtttgctgacctgctcgctagcgcacccgtcaatgggagtgcccgacttgtcactgcagtcgtaatggtcggtgcttcagcagtaggtatgctggctgttttcccagtttccgtacgcgtttggctagctgtcgtagcatcagtgagatcatttgccactgatgaacttgtcgtctcagtgtttagcacatctgtgtcagcactcgtagtagccgttttagttacggatgctgatgtggcttccgtgtcagtagatttactggtgacacttggtgcactagcacttgcgccatcagtacttgatatgctagcacttgagtcagcgcgacttgaagcagtaccgacttcggcagctggcttcgtagctgctgtcgactgacgattactggaagctgatgttgccccagttgaatcagtagtcgctttagtatcctgagtcgcggccgttacatcagtagcagcttttgcatcctgagtcgcggtcttagtaactgtcgccgtactagctgattttagtacgacggcattgctcggttctgccatgtcggaactaacgctagcgctattgtcggccgtgtcaacccccgtacccgttgcggctttcacttgttcaacttggctaaaagtcaaaccgatgccaactgaaaatactgtgatactagcagccacccagcgccgccccgatttataaagcttatagtgagacttactttccaatcccaacttatttaaacgattccgcataattctgcctccaaagttcaaccgtacctggagcaatcaagttatttagctgagtaatatttggtgcgtttcgtaccgtgccgaaacgattgtgttaatcaacaaactatcacctaattgaccccttcaatcattagtatgcgttcaaataagttgaaataacaagtgcataacaaaaaatagacgaaattatttttgagattatttaattgtagtatcagttcacgctataacactgcattaaaatactgatataaccaacatattgacacacttattttgaatctggctcatccacatcccagttcggtacttatcaaacaatgtatagcatttgttctacggccaaaatcgtttaccagctatttagcagcaccaaacaatttttatcgcccgccaaccatatcacctaatattgttaagacgcgcagatcatgaactgtttttccacaccaaaaagcccctctgaataggtttcattcaaaggggcacggacatgcgcacgatgttctcatttaagctgttaccaacacacttccgatgaacgccagcctcttacgttcaaaaaccatcgtcagccgtctgaagacggtctggtttcgctagtaacttcatcactgacacaccctaatctaaataggtactatgcatcccaatatagcctaaattcgttcccattggtttggccgcgactaatattggataaatctgatcataaaagtttgaagcagccttcgaaaggcccttgttgcgtagcgcctccatttgaaaactaaccactaatttatttaacacagcaattgaatagcgatgatgctccaaatcggctttggccatcaacccgattttacgttcacggtcggtaagactagtgtcgagaacgaagtcaactaactgactcaataacgcctgttcatcgacctgatgtttccccgtacatccaaacatcggctttcacctaactctcttttattttatcgtgctcgctttgagcaatctcccgtttagttaacccggccgccagcttagcactagttatacacgtcaggtacgcgacaaccctgttcaaataaatcagtttagtctgatatcaagtgattcatattcagctaattgacgcatcccaagaagcatcgcgtactcgtattactatcataatacttcaaattaggaattacgagctatctcgtaagattgttaaattataaatccaagcacagcatgctcacattgtgaaccgacctaaattggtcgatgatttgacgattgagcgtgtcactaacttcgccaataaaaaaagctagttaatcattaaaaatgattaactagctttccatcatcagctcagcctaagctgcaaccgatgattgttgacgttgtgatttagccacgacgacgttctgggatccgagcagccttaccatgtaagttacgtaagtagtataacttggcacgacgtacacgaccttgacgaacgacatcaattgcggcaacgcgtggtgtgtgtaatgggaatgtccgttccacaccaacaccgttactgatcttacgaacagtataagtttcgctgataccggaaccatggcgcttgataacaacaccttcaaataattggatccgttcgcgagtaccttcaacaactcgtgcatgaacacgaactgtatctccagcacggaaatcagggatgtccgtacgaagttgttcattggtgatcttttcgatcaattggttttgacgcataatgtatttcttcctttcgccgacattcgtgacaacctggtcagcggaacatcgttaatgggcacaatagccaataaatagaataccatattcgagggtgggcacgcaagtttttttgaactcttcacgactaacttgtcctaattaacggcatagcctacacttccgactcatccgccttgatatctgctaacatctgtttagcttttcctgacaatgatagccccgtcaacatgtccgggcgccgttcataggtccgtttcagcgcctgttctaagcgccaatcatcaatttttccatgatcaccactcagtaagatatctggtaccttcataccacgaaaatcagcaggacgcgtatattgtgggtattccaggagaccgctcgaaaaagaatcccccggagccgattccgaattaccaagcacacctggtaagagccgcaccgtcgcatcaatcatgaccattgcacccagttcaccaccagttaaaacgtaatcaccgagcgagacttcatcggtgactaatgaccgaatccgctcatcataaccctcatagtggccgcaaataaaggtcaagtgttcttcctgagcaaagtcttcagcaacgtgttgattgaactggactcccgccggatccaataagatcacgcgaccgggtgccgggtgtttttcctgaacgctggccaaagcatcaaaaattggttgtggttggagtaacatgcccgcaccaccaccatacggataatcatccacatggttatgcttgtcggtcgtaaaatcccgaaaattagtgacatcaacattgatgacgtcattttcaatggcattgccaatcatcgactcatgaagcggccccgcaaacatctctggaaacaggcttaaaatatcgatttgcattaatcaatcaacccttccattagttcaacagtcaccacgcccgcatccaagtcaacatctttaatgacctggggaatcttaggtagtaagacgtcagactgaccatgatcccgtttgaccacccaaacatcattcgcaccaggtgacagaatctctttaatagtccctaaaggctcgtcagcggtcgtcacaacttgtaggccgacaatctggtgatagtagtactcacccgctggtaaggcatgtaatgcttcagcaggaactttgatcgtccaccccttatagcgctccacatcattgatgttatcgagcccttcaaaggtaagaaagtacagccccttttgctcacgggccttcgcgattttgacagtaatcccgccagtcgtttcatctggggttttaaataaattcaattgttgccctactttaaagcgttcttctggaaaatcagtcacgacaacgactttcacttcaccacgaatgccgtgggtgttaactagggtgccaacacgatagtaatccattagcttcctcctcttaattagcttgattgttattcgttttaaatgtcatcaacatgttacaactaatctactcaacgacggtcatcgagatactttgactcgtcctcaaaaaccggaacaagatataaaaaaactcttaaacaaaacatcactgcttcgctcaagagtttttttgttgtccgtcttcgatcgtaagccggacacgtttaggtcctgaaactcggacactatacacaattgtccgaattgccgaagcaacccgtccctgccgaccaatgacccggccgatatcttcgggattaaccgttaagttgtattcaagataacgcgtggtttccttaaaatcaactttaatatcgtctggatattgaactaacggggtgacaaccgtggtgattaaagctttaatatctgccatgatctattaccgctttattatttagtgaacttagcttcgtggtacttcttcatgataccggccttagataagatattcttaaccgtatctgaaggttgggcaccattgttcaaccaaccgaggatatcttcctcttcaagtttaacttgggctggttctgtaagtgggttgtatgtgccgacttgggcgataaaacgaccatcacgtggtgaacgtgaatctgcgacaacaatccggtaaaatggatttttcttagaacccatccgctttagacgaatcttgactgacatttaaacacctcccgaattctttaacaggtaataatataccagtaaatcaatagcttgtaaaggactttttcttgacaggctaaaaaaacttataaattagcgtttgcgacgccgcattgctttggctaagcgcttttgttttttcttcttagtttgacgaaccattcgcttcatggccatttgttgcatcttaccaccgataccgccaccgccattggcaccacccatgagaccttccataccagcaaagttccctttggacatttgattcatcatctttttggtctggttgaattgcttgatcatccggttgacttcatgaattggccgcccggaaccagccgcaatccgtcgacgccgagatgggttcaacaaatccggatctgctttttcggcattggtcatcgaataaacgattgcccggatatgggcaatgtctttcgggtccatgttgatatttttcatcgctggattgttagccatgccgggaatcatcttcatgatatcttccatgttccccatcttgtcaacttggtctaattggtcgataaagtcattgaagtcaaaagtgttttcctgaatcttcaggttcatttcttcggcttgtttttcgtcatattgctgttgcgccttttcaatcagcgtcagcatatcacccataccaagaatccgatccgccatccggtctggatggaagacatcaagatcagtcatcttttcgccttgaccgacaaacttgattggcttaccagtgacggcccgaattgatagtgcagccccaccacgagtatcaccatctaacttcgtcaagacgaccccggtcacatccagcttatcgttaaagccctccgccgtattaacggcgttttgaccagtcatcgcatcgatcactaacaaaatttcgtcaggatgaacgagatctttaatattggccaactcgttcatcaactgctcatcgatttgtaaccgaccagccgtatcaataaacacgtaatcattgtggttttcttgtgcctgtgccatcccttgacgcacaatctcaacgggatcgacatcggttcctagttggaagactggaacgtcgatttggcgaccaacttgttgcaattgttcaatcgcggctggccggtaaacgtcggccgcaatcattaatggtcgggcatcctgttcgttctttaatttgagggctaattttccgaccgtcgtcgttttcccggccccttggagcccagccatcatgatgaccgttggaatcttcggcgatttgttcagtggaactgccttttcacccattgttttcgttaattcttcatcaacgattttaacgatttgttgggctggatttaaaccttccagcacctttgcgccgagcgcacgttcgcgaaccgttttaacaaaatccttgaccaccgtaaagttaacgtcggcttcaagtaatgctaaccgaatttcacgcatggttgctcgaagatcactttccgaaatcttccccttgcgccgtaaattggtcattgctttttgtaaacgttccgttaggccttcaaatgccattagtgtcacctaacctttattattattctgagtcagcttccaagttgactagttgttgaatcatcttaattaactgggtatccccatggtaattttgcttaatatagtcagagatcgcgtcaacttcgtgattacgttccacaaagtcgtggtagagatgcagcttagcctcataaccttctaaaatcttttcggtccgcttgatgttatcatagacggcctggcgcgaaactgagaactctgctgcaatctcgcctaaggaatagtcatcagcgtagtacagttgaatataggctttttgcttattcgttaataacggttcataaaactcgaataacgaattgattcgataatttttttcaatttccatgtggggactcctcacgcttatcatacagactacacactaaataagagtaccgattttatcgccattcgtcaactatcagtcgctatttgtggtaaaaataaatggtaatcgtcctcgtgctgagaacaattaccatttcgttaactggctttcaatttaagaccatcatcaactgatttaacccgtgataatatctttaaataacccgtagacaaagtcattggcattgaatggtcgtaaatcagtcaccttttcacctaaaccaacgtactttacagcaagatgcaattcattacgaatagctaagacgatcccaccacgtgccgtaccatcaagtttagttaacacaatcccactgacatccgtcgactgtttaaacaacttggcttggttcagcgcgttttgcccagtcgtggcatccagcaccagtaagacctcgtgtggtgcatcagggatttcacgggtgatgacccgcttgatcttttccaattcattcatcaagttgactttgttttgaagccgaccagcagtgtccacaaagagcacgtcataatcttcggccttagccttcttaaccgcgtcaaagcaaacggccgctggatcacttttttcggccttagcgaccacgtcaaccccgtctcgttgcccccagacttgcaactgctggattgcaccagctctaaacgtatcacaagccgccaacaagaccttcttgccttgctgcttgtacatgttcgccatcttaccgattgtagtggtcttaccagcaccattgaccccgacaaataaaataacggttggaccactcttagccatgtgaatcgagttatcctcgccttcaccagcttcaccgtacatatcaacgagcttttcgacgatgacgcttgaaatttctttcttgctcttcgcgttctttaatttaacttcgtcacgtagctcgtcactaattcgcatcgcggtctcataacccacatcagattcgatcagcgtatcttccaaatcatcgaagaacgcttcgtcgacatggcggaaattagccaagaaggcattgatacgatcaccaaacgttttccgcgactttttcagtccttcatcataacgttctgcctcagttggctccggctcagccgattccgaatcagccgccgcattaacagtcggtgcggcggattcagtcgctgttggcgctgatgacttgactgctggcgccgtactagctactgattctgacatagcgttgccttcaactaccgcatcagacttagtcgctaacgccacgtcgctcgcggccgcttgactaacttgtgccgcactcgcacttaatgcagctagtgactgggcaaccattgcactggctgtgagtggcgcttccgacaccgtcgccgattgcattggtgcttgtgaaccagactgtgcactcactgccgccgtgctatcggccggggcttcactagtagctgccgattttactgtcgctggttcgtccgcagtgcttgtcgcttcgcttacggctgtactggacaccggtgtcgcagttgattcagttgttgcgccctccgagcgagctaactgttgtgacgaaggggcccggtcgtcactgaccggtgcgttagcttgactcgtcgttgcaggtgcttcactggcagctgacgttgtttgagcgtcatctgattctggtaaactaaacgctttttttaaccgactaaatagtcccatcttcaacacttcctttaattatttttgttcatcttttaaatctgccaaggagactgagaccatcttggagacacctgactcttccatggttaccccataaagtacgtcagcgtgcatcattgttccttttcgatgagtaatgatcacaaactgcgttcccgtttgaaaatcattcaaatactgactgaaccgatccacgttggcatcgtctaacgcagcttcggcttcatctaagatactgaatggcacggggcgcactgctaaaatggcaaataataacgtaatagccgttaacgcccgttccccaccagaaagtaaacttaatcgctgaaattttttgcccggtggctgggccatgatatcaaccccactggtcaataaatgttctgggtcggtcaagatcaattcagccttaccgccgccaaacatctgttcaaaaatcgtactaaattcgctagcgacttgatcaaatgccgttttaaagcgggtggcaacggtcgtatccaaatcagccattgtttgcagtaagtgttccttggcttcagttaaatcggaagcttggttattgagaaagtcaaagcgttccttgacccgctcgaattcgtcaattgcgccgaggtttaccgttccaatctcatccaagcctcgtttaagcagtttcaactgttccgtaatcgcaggtaacgctaagtcactgacgtcagcttgtgccgcggcaactgtcaactggtacttttcagccagatcagccgtggcgtggtcgacttcgccagtcaattttgtttggcttaattccaagcgacggtaatcatccgttgcggccgctgcgagttgttgcaaccgaacttgctgggtcgataattcttcaacctgatcattaagcgttgctagctgttgttcacacgttttccgttgttcttcaaccgcagcctgtttagccttagctgttttcaagaccgtatcgcgttctgcgaccgacatttgctggctcgctaacgttgttttaattgctgctaaatccgcttgaatttgctttttcgtctcttcattttgcgccaaggtcgcctgacattgttctaattgtcgttgcgtttgtttcacgtgttcctgcaacgtgatcagttgttcacgctgggcttgtaatttcgtcgtttgagtctgttgataactttcgtaatccgtttgctgttgttggactgttttcatttggtcctgatagtctttaagcttagccgcattagccgcttgcgcttgctgattacgagccactaagtcttcatagctatcatcagcttgcgtctgttgctgctcataagttaaagccttaacttgacgacttagctgcgtttgctcgctctgtgccgcctgtaactgggcctgtgtctgactaaggcgatccttaagttcacttagttgttggcgggtcgtttcaacctgaaccgtcaagtcttggttagcttttttaaggtctgctagcccttgttcataggttactaattcagactgcatctgggcaacgttagctgcaattttttccgcggattgttgctgttggagtagcccattatcatcatggcgagtcgcaccaccggtgatggccccactggccgcaatcgtttcaccatcaatggttaccaatttgcaccgaaaacgtctgctccgtgaaattgccatcgcgtggtctagcgtgtccacaatcgccgttgttcctaacaagtaacgtttgattgccgtcaatcgtgattcacaatcgaccaactcgctagccacgcccaacacaccaggttgttgtgataaatcgcgctcagtgttaacgggaagttgacgagccgtgatccgctcgataggcaaaaaggttgcccgaccggcgtgattttgttttaagaaattaacaacagttttagccgtctgttgtgtgtcacaaacaatattttgcaactgtccgcccagtgcaacttcgaccgccttagtatactgatcaggaacggtcaggagttctgaaacggccccggcaacgccactaaactgttggcgatgttgtaagaccattcgaacgcccgcataaaagttcgtatagcgttcctgaacagcttgcaacgcctctagccgtgacttttcacgctgcatcaagccagccgcgtctaaccaacgttgctgttgctcgtcgatccgctctgcattcgtttttacttgggcttgttgggctgttagcgtggcctgctgctgactgacttgattttctaaatcacgttgctcacgattgtgcacgtccacggtcgtctgcacccgtttcaagttagcctgagcctgagctagccgttctgctaacgctgtgctctgactgccagactgttgatgttgcttaacgaggttcttcgcttcgttattcagttcagcctgaacttgtttttcatcaatataagcattgcgtaatttttccagctcatcagccaactgctgacggccggccgcactcgttgccgtcgttaactcggcaacttgcgctttgactgccttaacttgggcttgctgctcagataatgtttgttctaattgggtttgttgctcggtttgcgtcgcaatctgttgctcagttgcggtcaaactggccgtcagccgttcctgctcagactgttggttttgccgccgttcagcgtcaaccccttgttgtccttgcgtgttttcgatggtcttaatcagctcaagattttgtgctaccagctcatctttttgctttaattgagctgtctgctgggtttttaaattagctagcttggttgccccagcatcaacttgttgctgatacttagccactaacgccttggcactagctaacttttcattgacaccttgcagttgatcacgagcaatcgtcaacttcttaacgagccgcgaacggtccaaataatcaaatttttgtttttgatcttgataatcccgggcaagactcgcttgttcttccaacggccccttttgctgattcaattcagcaatgatatcgttcacgcggtctaaataatccgtcgtttccgctaatttattctccgtcgtgaacttatcctttttgtactttaagaccccagcgacatcttcgataatgctgcggcgctcttctggtttcgcattaaagaccgcctcaacacgaccttgagaaatcactgaaaatgagtcttttcccagaccagtatcaatcatcaaattcgtaatatctttcaaccggcaactctgattattaattaaataatcgctgtcaccgttacgaaagagtttccgcgtaatactaacttctgcgtaatccaaaggtaaaaagtggtcactgttatcaaacgtgatcgtgactttagccatattcaacggttttcgattagccgagccggcaaaaatgacgtcggtcatcttagtgccgcgtaaacttttgacggcctgttctccgaggacccagcgaatagcttcaataatgttactcttaccactaccgtttgggccgacaattcccgtcattccggcttgaaaatcaattttggttttatcagcaaatgatttaaatccgctgatttctaatgatttaagttgcattcgacacaaacttcctgtaattattaatggttacttttgctgtaattgtgaataagcttgccgagcagcgctctgttcggcttccttcttggaatgcccccagccctcaccgattttttgaccatcggcaagtacggcaatctcataagaccgctcattggctggaccatcttgttcaattaattgatagtcgattgcgacatcgccatcccgttgcaagtattcttgcaaggtcgtcttataatcaaaaacgccatcaaaacgaccctcatccagcttaggaaaaattacttgatgaacgaacttcaaaacaggttcccgtccttgatccaggtacaatgccccgacaaatgattcaaaaatatcacataaaagtgaatctcgttcccaagcatgcgctttttgttcgcccttgcctaaccggatgtactgaggaaagtcacattcacgggcaaagcttgcaaaactttcttcacaaaccatggcggcccgtaaacgagtcaacttaccttggggcatgtctttataacgtttgtataaatattcggacaccactaactccaagacggcatcccccaaaaattcgacccgttcgtaatacttcaactgttggtcctgatgttcattgacatacgaggcttgtgtaaacgcctccgccaataaatcgggatcgttaaacacaatgccaaaccgttccttcaacattgcagctaattctgtaatcatttgaaacttcctttcgttatcattctatcgactaaccccattggatcagccagttatcacaatctgttactggtggtgcctaacttagcatgaatcattatttaaggtggtcattcatctgccgttcgagtgcttccgacatgtatttagtgctactcttacacgcaatgttcagtctcacccagccgtggcagtcgaccgtggatgatcagaagctaacaaaatagaaacacaagttaaaggtccgcttaagtaaggattcatctgataatcagtcagtcaacaggtcacacattgcatatcataacattatactatgatttagtggtcaataacaatgatatcggtactttcgtagtcagacaagtaaaaacaggtaaccatgttggctacctgtttttgcttggtcaattaacttattttgcttggtgcgctgccacgtaatcgacgacttcgccgaccgttgacaatttttcggcatcttcgtctgagatttcgctaccaaaggtgtcttctaattccagtacaaactcaacaaaatcgatggaatcagcatccaaatcggtttgcaagttcatttcgttggtaatcgttgctttatcaacttcgaaccgatcagcaatgatatccgcaattttatcgaaaatttcttctttcgtcatgtaaagatccctcactaacttgaattcactaaagtattctaatcgttttcagcaggaatgtctacacttgcttgctgattagcttgttgattagcaaaatattccgcaactcctgggacgatatccgtactgaccatctggcgaatttgacggatagtattcacgattgttggcgctttgctggaaccgtgcgtcttaacgaccggcgccttcaatcctagtaagaccgcgccaccgtactgagaatagtccatttgagaccggatttcattaaacccattcttaagcaataggccgcctaacttgccactgataccggtgttatagacggcatctttcactaaaccgagcatggaacgcgccgtaccttcaatgctcttcaaaacggcgttacccgtaaaaccatccgttacgacgacatcagcaaccccgttcaacaagtcccgggattcaacattaccgacaaaattgataccgtcagtctgtgacaagagttcaaacgctgccttatggaccttatttcccttgtcatcttccgtcccgttattgagtagggcgacccgtggatgcttagcttgcatcatccgttctgcatagtacgtccctaacacaccgtattgttgcaagttcagtggcttactatcagcattagcaccaatatccatcatcacaaagttcgattggttagcattgcgtaccactggcaataccgtcactaatcccggtcggtcgatgcccttgatccggcccacgataaataacccggctgccagaacggcccccgaattaccggcagaaaagaaggcgtccgcctgaccatccttcacggcctgagccgccattacgattgatgaatgcttcttacggcgaacggcacgtacgggttcatcctccatcgtaataacttcatcagcattgatgatttgaatccgatcacggttcttcagttgcgcgttaatcacgtcgcgttgaccatataataaaaagaccgtatcctcaaacaaatcacgagcctgctcgaccccctcgatcacagcgttaggggcgtaatcgccacccatggcatcaatcgcaattttaatcattgtgtcaccattcctctcatcacagtactgtatttaggttattaatcgagcgtccccaccgcagccaacttctggctcaaataggcggctagtgcccgattatccggttgactttgccaatccggttgctgcacgattgcgtgggcatcttgctgggcaacttgtagcacggtcaaatccgcaatcggatcacccactttaaattccggcattcccgattgcttgacccccagcacatcaccggctcctcgtaattctaagtctttttgtgccaaaacaaaaccatttgttgtctgcgtcatgatctgcatccgctcaatcccttgctggttcttgggatcagccaccaaaatacagtatgaagccttggtcccacgaccgacgcgtccgcgtaattgatgtagttgcgccaagccaaaacggtcagcatcataaatcatcatgattgtggcattcttgacgtcaacacccacttcaatcacggtcgtggaaacaagtaactgaatgtctcccgccttaaaagccgccatgaccgcgtctttttcctcaggtttcattcgaccgtgcaacagtccaactttaacactcgccccaaaatactcttgtaaattagctgacagagcctcggcgtttttaacatccagcgtctcggattcctcaatcaatggtgtcaccacataggcttgcgatccattgtcaatctgttgatgaacaaagcttagcgccgaattagcttggttgctccgtacccaagtggtttgaatcggttgccgaccagccggtaattcatcaatttcagaaacgtccatttcaccatacgccgtaatcgccaatgtccttggaattggtgttgccgtcatggctagtgcatcaggttgcccgcctttttgacgaaaggcggcccgttggttaaccccaaagcgatgttgctcatcggtaataactaatcccaaattagcataagtcaccccgtcctggatcagggcgtgcgtgccaatcaataagttgatctcaccagcagccagcgctgctaacaatgtcttgcgggcagctggcttggtcgcacccgttaacagcgcaacgttgacatccgtgtcggcaaagacctgggccaagttatttgcgtgttgttcagccaaaatttcggttggcgccatcaacgcggcctgataaccagcggtaatcgccgcatacatgacaatggcagccacaatcgttttcccggaccccacgtcaccttgaagcaaccgattcatatgcttcggtgacttcaaatccaaacaaatttcattgacgacacgtttttgggcgtgggtcaattcaaatggcagtgttttaataaacgcctttagtcggtcattgtcataagcgatcgcaataccgttcgtcgtcgcgtccgtttgcttcagaacttgcatttgcatttgaaacaacaagaactcctcgtaggtcgctgagcgtcgagcggccgttgaatcggcttgactagctgggaagtgcatatcatgaatcatttggcgccgcggtaacagtcggtatttagcacgtaagttagcaggcacaatgtccgtaatgactggggcatataactcatatgcttgtttgatcatcttctgaatcgtcccctgcttgaccgtcttgctggccggataaatcgaaccaaacgctgaatccgcattattgggattgatgatcttcattcccgtcaagctactgcgcgtggcgtcccacttgccataaacggctaaatcttggccagtctcaatctgtttcatcaagtatggttgattaaaaaaagtcaccatatagacgtcatggtcgattaacaagcgaaaattcaggcgattcttcttacggccaaaccgtgctagcacaggttcagaagccacagtaccctttagtgtcaccttttcttgatcggcgatttcattgacgtctttgacctgtagatcttcatagcgaaagggataataggtcaatagatctgcaatcgtattaatcccaagctccgctaaacctttttggcgggctgggccgacaccacttaaagttgcaaccgcgtcactcaactgttgtcccatgcctgaccaccgccctttctaaaataattgcctttaccaatattaattataccaaaaaaacgtttcaatcccgcgggaagtatccgtccgtacaaaaacaggccccagcatcactgctaagccctatttttaacggttagtcctattcaactgacacaaggaatgggtaaactggttgatcaccttcatgaatttcaatttctaattcatcatccaactcttgcaccttagctgccaaatgatcagcgtcagttttagttgcatccttgccgtaaataatcgttacgagttcgctatcttcgtcgagcatggctttgaccatatccaaagcagcggtatcgcgatctggattcgtaattacgattttgccatcaactaagcccatgtaatcatctttcttgatttcaaggccatcaatcgtcgtgtcgcgaacagcatgtgtgacttgaccactaacaaccgtactcaaggtttcttccatcgcggcctgattatcgtctaaatcagcttcagcattgaatgccaacattgcagtcatgccttgcgaaatcgtctgactgtggataattttaactgggacatcggcaacttccgcagcttgttcagctgccaaaaagatgtttttgttgtttggcaatactaatgcttgttgggcaccactgtcattaacagctttgacgatatccgcggtacttggattcattgtttgaccaccagcaatgatgtcggtgacacccaagcccttaaatagcttgccgatcccatcacccgatgacacagagatgatcgcataaccatgcatgtcaacttgtggttgtgaaggtaaggcgggctcagcagcggcttgcgcttcgtcttccttatcatgttccatgatggtttcttgttgtagacgcatattatcaactttaactttgatcaacgccccaaaacgttggccccacgtcatgacatcgccaggatgttccgtatgaacgtgcaccttaacgatttcatcatcgttgatgacaagtaatgaatcgcccaatcttgctaagtactcatagaaagtgtcatagtcgaacttgtgatcaactaacttaccatcgccgattcgcaccataatttcggtacagtagccatacttgatatcattcgggtctaattgcccctgcacactttgatggtgggcagcatcaatcatcgaatccatttcagcatcgtccggaacatagtcctgtgattcgtcgaccttgccgcttaatgagtcactaaaggcttccagcacgaaggtcagcccctgaccaccggaatcaacaaccccaacttgttttaaaacgggtaacaagtccggcgtggacttcaatgcagcttcagcagccgtaacgacggcatccataacttcacaaatatcatcggtcgttttaacagcttccttaccggcaccagcagctttgcggatgacagtgaggatagttccttcagtcggcttcataacggccttgtaggcggtctgagcaccggctgcgagggcggctgctaaatcgttagcggttaagctctccttatccgctacggctttagaaaagccccgaaaaatttgtgatagaatcacaccagaattaccacgggcccccatcaagagtcccttggctaaggctgacgctaggtcgcctacttttgtactggtttcttcacgttcatatttggcaccgctggccatcgataagctcatattagtcccggtatcaccatctggtaccggaaagacgttcaaagaattaataaattcagcacgttggttcagcttttgtgaagcagcctgcaccattttgccaaattcaagattagtaatcgtggtgattttcaatttcaaaattcctccttggcttccaccaacatcaatttagtcgttcattacccggacaccttggacaatgacgttgaccgaattggccgtaacgccaagcatgttttgtaagttatatttgaccttggcttggacattgcgtgagacttctgaaattttggtcccataactgacgataatgttgacatcaatagccaccccattatcctcttggcgaacaaccacaccgcgcgcatagttttcgcggcgtaaaatttcattaacattatcacgaatctggttccgactcgccataccgacaaccccgtagttatccgttgcggcgccaccgacgaccgtcgcgataacatcattatcaatatcaatggttccaaattgcgttttgattttgacagccatgaaaatagcctccttgttttaacgcgttcatttacgatagtttatcatagcacaaccactcttgaaagaaaaattaagcgactgcttaacagaagcccggaaactgggaatttagcagtaaagtaaaattacttgatagaaatgtattgcaacctttattaatctatgataaattattctagtgaatgataaagacgaccttttatcaatgaattaccgaaggaggcagatcaacatggcaaaagactacgttacaggcaaacggacgcactttggtaacacgcgttctcacgctttaaaccacagccgccgcagctggaaagctaacttgcaaaaagttcgcattttagttgatggtaaaccaaagaaggtttgggtttcagctcggactttgaaatcaggtaaagttacgcgcgtttagcgcagcaaatcgccagcacattttttgtggctggcgttttttgttgtctaaaattactaatttctcgtcaactttttataaagtttataattcagccttgaccagcccattatgatgacctgaatcattgaggatgcttgccataccatcgtcggaaacaaccagctgggtctgaccaaaaagttctgcttcaacataagctttccggttaggtctactaacgaccaccgacctaaacatcagcacgtttcaccaacaagctccccgatgatacgtcgttactgcatattaaaagaccggttgatgagtttatgactcaccgaccggtcttattttagctgaaaccttggggtaccctacgcatctgccatgctgtcatcacgactttgaataacagctagaacccccgcatcaaagctaaagtgaccagtattgccactgaattcgttactggcccatgaaatcgggtacgcattataagcagcgtccaactgatacttttcatcgggtaacgtgagatgcatcggcatcagcggtacaaacgccaaatagcgtttatccgcttccttcgtgatctggtagtcccctggtagaaagaaccgaaccgaattttgcttatcaatcagtttgatctgcggagcccactgacgaaataccggatcaagtactaaccacatattggccagtaaatggtctaaccgaccacccgtggcaccatatagatgcacttcatccggttgcaactgctcgaaaatggatttaatcgccaattgtgtatccgtatggtcttggtcgggtttgacaacgatagcgcccaccaacgcatctttgacagtctggagttcagccgcatcaattgaatcaaaatcacctacgaccatcacgggctggataccacgtttcaccaaacgcaacgcgccacggtcagcgccgacccatggtcctggaatcgtcgttaaatctgctggataattagcagtcggtccgccaaccagtaagtttacgatggttgccattaattggtcgccaccttcaaatcttgaatacgttgcgctgggtccgcactgtcatagacatacgaaccagcaacagcgaccgtagcaccagcgtcatagcacgccttgacggtctggtcgttgattccaccatcaacttcaatctcaaattgataaccgtgttgttgcttcaattcgttcaacgccgcaattttagcaaccatctggtccagaaaatgttgaccaccaaagccaggattgacggtcataatcaaaacttgatccactagtggcaataattcactaatcatgccgagtggtgttccggggttcacgaccacttcggctttcacaccagcatctttgattaattgtaaggcgtgataaatgtgacgggtactttcaacgtgcacaccaatcaaatctgcaccggcctttgcaaactgcccaacaaaccgctctgggtccataatcattaaatgacaatctaacattaatgacgttactggccgtaaatccgccacagtactcattccgaatgacaagttggggacaaactgaccatccatcacgtcaatatgcaacgcatcggcaccggcattttcagccatctgaacgtcacgttgaaggttcgcaaaatctgcacttaaaattgaaggggcaactttaatcattagtctcactcactttttcttattatagattacttttttatttttaatggtttcatagaattgtaaataattatcatagcgactcgctaacagctccccagctgccaatgcctgtttaaccgcacattgcggttcgttaatatgcacacagcctcggtatttgcaatcagcgctaagtcgcacaaactctggaaaataatgggtcaactcgttagcggcaatatcgaaaacttcataggatgagaaacccggcgtatcagcgaccaacccatccgcaatcgggatcaagctgactttacgggtcgtatgtttcccacgattcagcgcctgcgagatttcaccagtcgctaacgccagccctggttgtaaatgatttagcagtgttgacttaccagcaccagtttggcccatgacaaccgccacatgaccagccagagccgttttaactgcggctaaggcggccggtgaaaatgcggttcgttcgcagatgacctggtaaccaatctgccgataagcgtccgctaatgttaatcgttgttggtacacctcatcggttagtaaatcagtcttcgcaaagtagagtaatggttcaatacctgccactgccaaagctaccagttgtcgatccaataaattcgttgaaaattcttgttccgttgtagcggttaccacgatacctaaatcaacattagccactggcggccgtaccaactgggtctgtcgatcaagaatatttaacacgtagccctcttgtggggtcgccgcatcaaactccacattgtcgccgacaagtggcgtaatgcgccgcttccggaaattcccgcgtgcacgggtccgatacatttggccatcagcataaacgtcataaaagccgcttagcgattgccgaatttgtccaattttcaaattagcaccaccttttatattatttggtacggtccacttttctctattgtaccaaaaaagtcatgcattgcgcatgacttatctttattttgttgcatttttgcttgtaatattcttcttttccatgatcgtaaccccgttacgcacgattcggtaatgccccttcgtattaccggtcagctgaaacggtaaactaatcttagtcgaccgcatgattgcaatatcgcgataaacggtctcaatcatatgggtatcatcatacaaataaatcttaacatcgttggcctgggcagtggtggccgataacgctttgtatggcaccgttagtttaacataaaaattctgtggtgtcgtcacgttattatcactgccccttgacatggtcaccgtaatagtcgacccagtccggacattgccaccgccatctggatcttgatcataggaataacctgccttctgttccgaagagtagccctgcttaaagttaacattaagatcatttgcctcagcatagtccagaatatcgctcttgctctcaccagttaaatcttttagctcgacgtagcggctaccagcgctgaccgtaaacgtcaccgtcgtatctgtcggcatcacgcgactaccagcgacaacatcctgactgatgatttgtcctgctgcaaccgacgacgtactgtaagtttccttaactttgaaccccgccgatttaagcgtctgtcgaacatcatggtaattatcattgacataattaccaaagctcataaccttggcaccgttgctgataaccaaattaatgcgagcacgttcttggacccgcgtcttaacactgggcgttgatttgatcacctgatttttggctacctgattacttttagcatgttgaacagttccgaccgtgagatggtgttttttgaggaccttagttgcggcacgctgacttaagcccgttactttcggcaccgtcgtcatctgtggccgacttaattccaaaccgacgatcacggccacgactaataacaaaataataccgccccaaaagaggagccgacgccgcaacggatgtcgtttggaccaagaacgtgttggtaacggttcttcatcagcatctgtctgactctcagtcgtttcagccgggcgctggagtgttggttgcttgcttttatgcgccacgacctgggtcttaccgtcttgattggccgcaattgctgcttgaatatccgcactgggcatgatcttagtctcatcattaccgacatcttgcggtacaaagcgcttttcgcccgcacggctactagcaagcaccgtcaataagtcagtggccatgtcctcgaccgtagcataacgttcccgtggatctttcgttgtcgcctgcaagacgacgttttcaagtgcctgcggaatatccgcatcaaactctcgcacggatggcattgcattttgaaaatgctttaacgcaatggaaactgccgtctcacccttgaaaggaactgagcctgttaacatctcatataaaataatccctaacgaatagatatccgattgttttgtcgccatgctaccgcgggcctgttccggtgacaaataatggaccgaacctaaaatcgtgttagtctgcgtcatggtatgttcagataacgcaaccgcaataccgaaatcagtgattttagcattgccctgctcatcaattaaaatattttgtggttttaaatcccgatgaataatattatgcgcgtgggccgttgccacggcacttaatatctgctccatgatgtcgattacttgctgtaacggtaacggaaagttctctttaatataatttttaagatccatccctttgacgtattccatgaccaagtattgcatgccattttcttcgccaatatcgtacaaactgacaatgtgggggtgaacaagttccgtcgttgccagtgcctcacgttggaatcgcttgatggtcttaggatcatcacgtaagtctaaccggagcagtttgaccgcaacatcacgatctaatattaagtcatgtgccaagtaaacgttggccatcccaccttcacctaaggaccgaacgatccgatatcgtccgctaagggtatagttgggtgtcatttactggccacctcaccatcaagcgccatcagcagcgccgtaatgttgtccttaccaccagctgcattggctaatttgatcaacgtctcacacttctgggtcgaagtctgcgtcgttgccaaaaccgtcgcaagctgttggtcagtcaccatattcgtcagcccatctgaacataataacaattggtccccaggttgtatctggtaaaggttcgtatcgatatccgcatctggtgagatgcctagtgtccgcgtaataatatttttctgcggatgttgtcgggcctgttcggctgaaatctctcctcgcttgaccaactcattgactaaagaatgatcctccgtcagttggtggagttgcccatcgcgaaaaagatagccccgactatcaccaatgttagccatcaaaaacttttgatcaaaaagcaaagcggcgaccattgtcgtacccatgccgtttagatctgaaaattcacgggccttttcaataatatgctgattttcatcttgaacttcacttgctagccacttgacggcatcattgggttccttgaatgttgtattttcaaaccgaaaacccatgtgcgagactgccatctcggaagcgacatcgcccccctggtggccaccaataccgtccgcaacaattgcaaaattgatgcccgctttattttgaaaaaagccgacatagtcctcattttcttcacgttgttggccaatatccgaccggtatgcaaaatccattgtttaccactccaccattatttttttcgcaaacaagcaatgaaaaagccgtcggataaataatcatcgggataaatcgacaaagtcttttccgttcgatcagttttcaagtctcgttcagttggcgttgtttgcaactcaaaatctgggtgatccgctaagaatttggtaatcacatcctgattttcctgttgcaaaatcgtgcacgtactatacgtcatgataccaccttttttcaaggttggggcgactgctgtcaaaattgccagttgaattcgttgcaagttcaaactatcctgcaactgtttctcatagcgaatctcaggcttccggcgcatcaatcccagtcccgaacacggagcatcgactaaaattcgatcaaaactttcagcattaaactgcgtctcaactttacgagcatcgagttcggtggcttcaacgcgatcagcaacgtgcatgcgcgccgcattttggccgatcagtttcactttattagcatgaatatcaagggcaacgactgtgccaccctgctcagcatctaaactagccgcaatctgggtcgtcttgcccccgggggccgcacaagcatccaagactcgatcactcggctgcagattgagtgctggcacaactaattgtgcactttcatcttgaactgtaaacatgccataccgcatcgcttcagtattaatagcctgaccatccgttgcaatcagccctaacggtgagatttcactcggcgtaattgtcaaaccatcattaatcagcaccgttgtcacatcttcaaccgtcgacagggccgggttgacacgtaaggcttgcttagctggttggttcaatgatgataagattcgctccatcttttcagcacctaattgacgccgcaattcttgaatcaaccatattggcatgctataagtcacactcaaccgttcatcaggatccttaatcgcatcaaaactcggtaatcctgagcgatccatttgatgtaagacgccggttacaaaccgccgaatgccagggtgacctttgaccttagcaatttcaatcgtttcgttgaaaacggcccgttgtggaatcttatccagatactgccattgatacaatgcgctcaataagagttcccgtacccaggggtcaatctggtgcggatgtcgaacaaacggggtcaaccagtattcgagagtcaaccgatgttgaatgacaccgtaaaccatatttgtcagcagattaatgtcacgccgatccatctgatgatcattgattaactggtttaattgcaaatttgaatatgcaccgttcttaatcttcgctaaggcggcgaccgctaaccagcggggggtattaccaactgtactcatttattaataacctgctctccggtagcgaacttatctgccgcaccatttaaatagtctgtaattgtcatcttcggtttaccagctggctgcaacagattgattgcaatcgctgtgtggttagcagctgcaatcacaagctcatgtttcgtcttgcgaaccacttgtccaggagcttgcgtgaccacttcgtcagctaacggggtcacatcccagaacttcgtgcgcttcccatccaagaccgcataggcgattggtgctggccgcataccccgaacttgattatcaatttcaacggccgtttttgtaaagaagtctaagacctcttgttctggctgaatgttcggtgcaaaggtcacttgggattcatcctgtggcaccgccgtaatttcgccagcaatcaacttgggcaatgtttccagtaacaagtcgcgaccaactaagctcaacttatcaaacatcgtcccggtgtcatcgtttttttcaattggaatcgcacgctgcgccagcatatcgcccgcatccatctttttaaccatgtaaatgatagtaattccagtttcagactcaccgttgataattgaatattgaacaggcgcaccaccacgatacttaggcaacaacgagccatggacattaacggcaccaattttggcagctttcaacaattttgttggtaaaaactgtccaaaggcggccgtcacaattaaatcgggctgcaagtcaataatctgttgcatttcaggactaccactaatcttttccggttggaagacgggaatatcatgggcaaccgcgacttctttgactggcgaagctgttaagacgtgtttgcgaccaacttttcggtctggctgggtcacaacgcctagtacctggtattgttctttaattaaacttttgagaatcggtgccgcaaacgcaggcgttcccataaaaacgattgatgtcattgtcaaacttcctcctaatcccattacatgaaatgtaagggttctacgtcaatgccaatctgtagcccttgtcgttgttgcgcctgcgtctcatgcagtagcgttgtcagcgtctgagctaaattgggttcttgtttatatttaatcacgatttgataataataacggcgattgactcgtgcgattggcttgggcgttggacctaatagaatcgttgacggtgccaaccgcgggcgtaaccattgcaataactgatacatgcgcttggccgctaccccttcatctaagtcactcgctgtaatttgaaccgtaaagtagtacggcggatagccaccccggtgccgcatctgcatctcatacttgaaaaagccttcgtaatcgtggtgttgtgcaaaccgaatcgcataatgatccggattaaatgtctggatatacacgtgaccactcttttccgcccgtccagctcgaccactcacctgggttaatagttggaaggtccgttcactggcgcgaaaatctggcaatcctagggccgtatcagcattcaagacaccgaccaaggtcacgttaggaaaatccagtcccttcgcaatcatctgggtaccaatcaaaatatcagcttcaccactcccaaactgtgctaaaagcttggcatgggcgccctttttacgggtcgtatcattgtccatccgaataatgttagcgtccggaagcaagtcttgcaattcttcttcgactttttcagttcccgtcccataataacggatctgacgactatgacagttcggacaattccgcggaatggcttcttcgtgaccgcagtaatggcacttcatcgtgtgcgtatccatgtgtagcgtgagtgaaatatcacaattaggacacttcaagacaaaaccacaatctcggcacaacacaaacgatgaatagccccgccgattgagcattagaacactctgctcatgacgttcaagccgatcctgcaaggcaactaacagtggcgctgagaaattgctttcagcgtgttgttgcatttcctttttcatatcaataattgaaaccttaggaaggggccgtcgattgacccgatccgcaagcagtaagcgctgataaacgcccttttctgcgcgggcgcgcgtttctaacgatggggtcgccgaacccagtacgactggacagttatggtaacgactacgccataaagccacttgccgagcatgataacgcggggcatcatcctgcttatacgtgctctcatgttcttcatccatcacgattaagccaagattttttagcggggcaaacaccgctgagcgtgcgccaaccaccacctgagcctcacctcgttggattcgccgccactcatcatacttctcaccactggacaatccactgtgcaaaacggcaacagctttaccaaagcgacccttcacgcgttgaaccatttggggtgtcagtgaaatctccggcactaacatcaacgccgtttttccttgtgccaatgcggccgccatcgattgcaagtacacctcagtcttaccgctccccgtcacaccctctaacaagaacgtggtggttgcggcttggtcaacggcttgcgtaatctgatcgacggccacttgctgttcatcattcaattgtaacgccttggtagtcttaatatcactagttgcgtagggatcacgataaacctcgacggccacttttttaagccagcctttctgtactgctgtacgaatggcaccgtccgtgacatcaaaacgagtacaaaacgccttttgcgagagctgttcaccatttaaagtgagcaacccctggagcaccgccaattgttgtgtagccccggcgcgtacctggtccactgcagcctgtagcgcttcgttagttaaggccgctttcaccgccgtttgcgttttacgccgtgcttgatttttaacttggtagtacacatcgacttgcccagccgcctgcagccgtaataactggctgacgattgccggcgtcgtggcgacgtcatcaaacggcaccatcgattggtccccaaacagcgtcgttcgaatcgtcgcgggcgttgttgctgttgttcgcaactgtttttcatactttgcacgcatgaccgccggcagcagggtctgtgcacaggtaatctgaaatgaaaacgtgctggcagccaaccacttggtcagtgctaaggcttcagtattcagaaccggtgctaggtcaacgaccgcgtcgattggtttcagctcaccatcaaagttagtaacgtcatcaagagctaacacaaacccctgcacccgccgtttaccacggccgaatggcaccacgacgcgcatgccgggttgcacttgtgattgccaggcggttggaattcgataactataaggtcgatttgtctgcatagtgggcacatcgactaatacttgggcaatttgtgccacacaactcttcctctctacttaatcatgcctgtgttcctgcaccatccgcaattgccgtcatcaagatctgtttggcaattgcagttttcgttgtcaattccgtcgtaactggttgttgctcaggccgcaacagtgtgacctgattagtatcaccattgaacccaactcccggtttggaaacatcgttagcaacaattaaatctaattttttactagttaacttacgattggcattagccagcaatgattgcgtttcagctgcaaaaccaatcacatactgttggtgcttccgggccgctaacgtttttaaaatatccggtgtttctgtcaatcgtaacgttaagtcagcatggtcagctggctttttaatcttctgatcagctaattcagccggccgataatcagatacggccgccgccatgaccaagatatccgtatcatcaaaaatatcactgactgccgtcaataaggattgagccgaatcaaccgtcacgaccttaacaccactaggcgctgctaaatgagtcgtggcgctgatcagtgtcacagttgcacctaactcccgtgcgacttgagcaactgcgtagcccatcttccccgatgaacgattcgtgataaatcgtaccggatctaaggcttctcgggttccgccggcagtgacgacaactcgccgtcctgctaatggcaaatcaggtgtcaactgaatcagttgatctgtcaaccaggccaaaatcaccgctggttccggcaagcgtccttgaccactgtagccttccgccaacatacccgtagcaggagttaagacgtgtaacccatccgtcgtcagttgcttcaaattgcgctgagttgctggattagcgtacatatgtgaattcattgctggcaccacaaacttgggtgcggtcgtcgctaaaattgtcgtcgttgcggcatcatcggctagaccattagccaccttagcaatcaagttggcggtagccggaacgagaatcatcacttcagtccagtcagctaacgcgacgtggacgacgtgatgcgggtcagtcgttgtgaattcatcaatgaccactggctgctgcgttaaagtttgaaaggtcaatggcgtgataaactttgccgcatgggttgtcatcgcaactcgcacgacggcgccctgtttcatcaaactacgaatcaatactaacgctttataactcgcaatcccaccactaacgactaccgttacatggcgttttgtccatatactcacttcttcacgtcctttgaaaaatctcgcaaccgtgccagcgagatttttacactttaataaaacaattgtatcaagaatcgacagtaacgtgaagctgaacgtccgcgtcattcttcataaaaaaagtgccaagccccagctggctcagcacaccgttttgttactaatctttgtcagtttcatctggatcgatcattaagtcaccggccgcaatttcttccatggcccgaccaatcgttttaaccgatttgtattcgctaagcattggtgctgcaccagcgtccaattcatgggcccgcttgctagctaacataatcaatgagtaacgcgaattaacttgcttcaataagtcatcaactgatggatataagatcatgattccgcatctcctaacatttcttcatactcgggcatgacccgtttaacactaaaccgttcactacgaataatagccttgattcgttcagcagctagcgggacttcatcattgataaccgcataatcataattacgcatcatcttgatttcatcaaccgcttttgccatccgcttgttgatcacactcatatcatcagtcccacgaccaatgatgcggtgcttcaattctatcaaatccggcggcgtcaagaaaatgaagacgccatcaggcattttttcgcggacttgcatggccccgttaacttcaatttctaagaaaacgtctttgccagccgccaacgactgcttaatatattttaagggcgtcccatagtaattgtcaacatacttggcatattcaagcataccgccgctcttaatttcatcctcgaactcttctttggacacaaaatagtagtccttgccatctacttcgcccggacgcatttgccgcgtcgtcatcgagactgaatattgaaaatcgttatcatctgagtcaaagatttccttgcggacggtacctttaccgacacccgaaggacctgataagacgattaacatgccttgtttcgccatgatcacaaattccccttaattaaaatatgttttaaagtttattttgcactttttaaccctatattgcaagtattatcaaggttacacagctttttttcatttttattcgtgaattttctcaaattttaggcttgctttttagaacgcctgttcgtataatggaaacacaaacaaatgttcgaggtggctaatatgcaaaatcaacaatctaatttgaaactaatttccaagaacttacacgcttcctatcgccaatttatggatgactttactgctgccccgaccgtcgttgcgccgttactgccaatgatgccggctttccagcgggatttgttcttagctcaagcgcacacggaacactatcaaatcatgctccagatgcagcctcagctcactgagtcccgaccatataatattcacggagtgttaaaaaccctcgctagtggtcagttggttctagttaatcggcagttacacctgacccacttggtcgacccggacgccatccgttatatcaaacgcgtttagtttaatcattaatacttgcatcaaaagatgaaatcatgttcaatacaaccttgcgtattctcatggtgtttttgatgcaaatcaaaaagattgatgttacagctccactgacttccctgaatgagtgagtacggagtacctgtaaatcaatcttttttagtaacttaatttttatattgcttcttttacttgtcgctcactgacgttatttttgagttggatcagcacgcttttcaatccaagccaagaccgtatcagcaatgattgccattaaggctgttggtaacgccccggccaagataatggcaccaccattcgtagcattggttcctcgaataatgatatcccctaaaccgccggcaccaacgaaagtcccaatggccgtaatcccgatagccaacactaatgcgttccgaagtccagccataatgacggaaagtgacagtggcaactccaccattcgtaacaattgccaacgtgtcatccccatccccttaccggaatccaaaatactagcactcacattttgcattccagtataggtattcttgataatcggtagcaatgcgtataaaaagaccgtgacgattaccgtgttcacacctaagcccaagccaatcatgatgattgataacatcgctagtgacggaatcgtttgaatcacattggcaatcgcgatcactgtcgcactcaaccgactatgatgggcaatgaaaatgccaattggaatcccaacaattgccgcaaacagcacgccataaattgaaatcaagaagtgacgtgagaactggcttaacacgtacacaccgttttgttggtaataatatatcaactgttgcagtaagttcatctgagccattatttgtcactcccttcaaagtaattatgtttttcaaggaactgtttagccacaacttccggttccactaagttattatcaacttgatagttcaagttttgcatcgtctttaagctgattttaccgtttaatcgattcaagattggcttcaacttcggatgagctttcaagatcttgttcgttgcaaccgcactcgcattgtatggtgggaagaaattcttatcatcctttaaaatcttcagatcataactaccaatccgaccatcagtcgagtatccgaggatggcatccattttacctgattccaaggcatcataaactaaaccaatttgcattggataagtcttcccaaattgaaagccatacaacttcttaaaggcaggatagccgtcaccttttcgttcagtccagatttgatccaaaccgaccgtcagcttcgaggctacttttttcatatcactaaccgtatttagatggtattttttggccgtcgctttcgtcaccataaaagcataggtatctgcgaacccataacttgggaaataggtcatttgatacttgctgttgaactgtgagcgaactttttggtcaatcgacttgatattactccgatccatcttttcacccagaatcgtcgttaagtccgtcccagtgtaacgaatcgctgaaatatcagcctgatcattcttcaaagcattgaaactaaccgtcccagaacctaaattgttaatgattgtcgtattcaaattagaataatgcttaatcatatcttgaatcatgtacgccatgatctgttgttcagtcgtgttttgtgacgcaatccggatcgtatcggatgaagttcctgacaaacccggaaagccacagccggccaataataacgcactggcgaccgttgcgaaaacacctaacaaccactttttaattttcttcatctttaatcccccttacgcttgtgtggttcttggggtaaccgctgcttctagtttacccaacagccaatcaacgatgagggctaagataatcactggaatcgaaccgcctaaaatcaagtcagttcgatagaggtttaacccattaaagataaagtccccaaggccaccggcaccaatgtatgatgctaacgcggcccaggcaataacgtacgttgcggataatcgaataccagccataataactggggctgccatcggtaactcaactttaacaattgactgccaaccggtcattcccattcccttagccgcatcgatcaaggccggatcaacgtcttccagtccaagataggtattgcggagaatcggtaataaagaatagatgaacagcgcaatgatagctggaattgcaccaatcccgaaaaacgggatcatcaatgccaacaacgccatcgctgggatcgtttgtaacatactagcgattgacatgaccacattcgcaatcggcttcacccgcgtaagcagaattccaatcggaaccgctacgataatgcctaagaacaatgaaaacgctgaaatatacaagtgttgccacgtcttaaccagcagctgcatgccgtagttttgtaggaaagttatcatgcctgttcaccgccttcagcgggcgcatcgtcctccccatgatgaatattattttcagcttcatcttcgtcttcatcaccccagagagcatcataaacaatatcgaccagggtggcccgcgttacaattccgaccaggcgatgttgttcatctacgactggaatgttcttcaagccgcgtttcaaaatacgttcgaccgtatcccgaatcaatgaatttgactgaacatagaacaaatcagtcttcataatgtcgcccacactagtagccgagttaaagttgtaatcaacgtcttcaatgccgatcacacccttcaagatgccggcttcatcggtgactaacaacgagtcaacgcgtttatcatgcatttgtcgtaatgcgaccgtcaatgactttcctggtgtggtggcaattgggtctttcaacatcacttgcccaacagtggtaatacttggccgtgcttgaatcaaacgatccttaccaattaagttctcaacgaattcattagctggatgacgtaagataccgtctggcgtatccacttgcataatgtcgccaccatccatgattacgattcgggtcgctaattttaacgcctcatccatatcatgggttacaaagacgaacgtcttacctaagcgttcctgcaaatccttaacgagatcttgcaaagattcacgggtaatcgggtctaacgccccaaatggttcatccatcaatactaaatcttggtctgctgctaacgcccgaacaaccccgatccgttgttgttgcccaccggaaagctccgacgggtaccgatccaagtaatcttctggcaattccaccagtttgatcatcttcttagcacgttcattcattttatcttggggccactttagcaatcgtggtaccaaagtgatattgtctcgaatcgtcatatggggcattagcccaatattttgaatcacataaccgatttgtcgccgtaatttaaccgggtcaatctggctaatatccttaccattaagtttaatggtaccggaagtctgacttaacatccgattaatcatccgcatcgtggtcgttttacctgaaccagacgtcccgatgaaacaaacaaattcacctttttcgatttccaaattaaaatcttcaacggctactttgccaccaggatacgttttattcaaatgttccattgtcagaaacaacctcatcactccaatcatttactcagtttatttcgttgccgaataaactgtactgtaattaagcataacttataacgaaagcaaaatgcaaacgtcatgacatgtaaactgaacattttatcgttttaacggtatattttggtagtcggagcttcagattagccacccactaccaaccagcccgacagttcattaaaacgtgtccgttgacccatatttcgtctatttgcgttttatattgtaaagaattatcgtcgccttggcaataataccgaaacctcactcgacactatcgtcactaattaacaccatcaaaaaaggaccgaccatagttgtccgtcccttgtggtaccgatcaattaagcctaatcgtctttttcctcatcggccagtcgcaataactcttccgcatgctcaagcgataacttagtgactttagttcccgccaacatgcgtgccagttcttgaacccgggccgcattatccagcttagtcacactcgttttcgtgcgtttaccagtaatcttcttggcaatgaagtagtggtgatcactcatcgccgcaacctgtggcaaatgggtaatacagagcacttgtgaaaagtgtgcaatgccgttgattttctcagcaatcgcttgagcaacccgaccgctaacgcccgtatcaacttcgtcaaaaatgatactggtaattccctgtgattcagaaaaaatggttttcaaagccagcatcatccgtgagagttccccaccagacgcaattttagccaatgggcgcatgcgctcaccaggattagtctgaatataaaattcaacactgtccagaccactccgatagatctgacccttagtcggtttgaatcgtacttcaaagattgccttatccatatacaaatctttgagttcttgatgaatctgtcgttgtaacactttcgccgcagcccgccgtttatcggacaacgcttcgcctgtcgtaagtagttgttgtttcagatcggcgacccgctgggccagatcttcactattttcttcagagtcagtcatcttggctaactcagccgcgattttttggtaataatctaagatttgttgttcagagtccccatacttacgttttaactgggccaaaacgtccagccgctgttcgatttcatccaagcgaccctcgtcgaattcttgcaaatcgagctgattagaaatctgaccggccgcgtcctgcagcccataaaaggcattcttgacattcacggtaatctcattaaaggcggggtccaaattagcaatcggttctagtgcattcatcgccgtaccgaccatatcaaccgcaccagtcgtctcctcacctgcagctaacaatgtgtaactctgttgaagcgcttgattgatcatttggtaattatccaagcggtcacgttccgcagtcaaactggcctcttcacccactttgacttgtgctgctgcgatttcgtccacttgaaagttcagcatatctaagcgttgagcccactctttttcattcgcattcttttgccgcagttcacggtttaactgctgataacgatcatactgttgctggtaacgctgcttcaatttacgaattttagcggtggcaaactcgtccagcaatcccaggtgtttttcaggttgcatcaactcttgatgttcattctgaccatgaatatcaacaattgtttcaccaatctgtttcaaagtcgtcgtattgaccagcataccattgatgcgacatgtattacggccacttttagtaatctcgcgctgtagaatgacggtattatccgcatgttcgatccccgcttcgtccaacaattgggccgtcacgccgtcagccggcaaaataaacatgccttgcaaaacggctttatcagcaccggtccgaataaactctgccgagccgcggccacccgctaataaaccgactgcatcaataataattgacttaccagcaccggtctcaccagttaaaaccgtcatgccggcttcaaaagcaatgtctaagtgttcgataattgcaaagttcgtaattgataattcttgtaacactgcaagccctccttaaaagcaattggttaccagcatccgttagttaattttgaaaaaaagcgacctgacacacatgtgagcaggtcgaagatagcttactaattagtgatcactcagtaagcgttgaattttttgttgtagctctaaagtcatcgctaacgacttgcaaataatcagaacatgagcatcatcgcctagcgttccaaaaatttcgtcataatgcattgcttcaatcaacgttgctagtgctggtccgttacccggcaacaccttgatgaggacaaatttatcctgagtcgcatacgagacataagcatctttcagtgtccgcttgagctttttctccgtatccatttgtttctgaactggcatactatagtggtaaccgcccgttgccgagggaaccttgaccagctgcatatctttaatatcgcgcgaaatggttgcctgtgtcacgtcaatatcttcagcacgtaacagcttgacaaagtcttcttgacgttcaatttcgttcgaactcaataatcgtttaatgtagcgttggcgctcttgcttcttcacccgatcacccccggtagctattcatacttatttaaacacatcataagccaaaatgcataaatatgaaagtccggatttcaattttaagcttgatttaattgttcataagcggccgcctgagttttttcaatcgacacagtcggcgcaatccgtggtgtttcatcggtagcttgtaaatgaattagaaactcaatattaccttcaccacccttgattggtgaataatcaagccctagaacgttataaccattcgcttgcgcaaattccacgatatctgtcaacaccgcctgatgaacagcaggatcacggacaattccgtgtttgccgacattctcacggccagcctcaaattgtggcttgattagagcaacgactgaaccaccgttttcaataatcgcgtgtaatgggggcaaaattaagtgtagtgaaataaatgaaacgtcgatggacgcgaagttaggttgcccctgcgtgaaatctgccagttcactataccgaaagttagtatgttccatcacaaccacgcgcggatcttggcgtaacttccagaccaactgattactaccgacatccaaggcgtaactcatttttgccccattttgtaaaaccacgtcggtaaaaccaccagtcgacgagccaatatctaggaccgttttgtcggtcacgtcaatttcaaaacttttgagtgctttttcaagtttgagaccgccacgtgaaacgtagggcatcggtttgcctttcaaatgtaattcagttgccactgggatcttcatgcccggcttatctaagcgttcttcgttgacacctaagatttcaccggccattacggcacgcttagccttttcgcgggtatcaaataatccttgttgtactaataatacgtcaactcgttctttttccatctaaatttaagtccttaatctgtaaaatacgttagaaaagctgcaagcaagcccatgcctcgttgactagcagtactagcttttactaacgccgtttgagcagctgttaccgcttgttctaacgctgttcgtgcgcctgcaagccccagcaaacctggatacgtattcttatgctcatcggcatccttatgcgtagcttttcctaactgagcaggcgtactcgtcacgtctaaaatatcatcgtaaatttgaaacgccaatccataggcatcagcatattgtaatagcaattcctgcacggttggttgcacttgagcttgaatcaaccctgcctggacagcgtagtgaattaacgcccccgtcttctcgcgatgcagctgttgtaaggctggcaaagccagatgttgtcccgctccaaggacatcagcaacttgaccagccaccatcccgcgaggtccggtggcctgcgctaatgctaaggtttgattagcgacgatcgatgccggtaacccactatccgcaatccattcgaaagtcaacggttgtaaagcatcccctgcaagaatggcaacgtcttccccaaacttaacatggttagtcggttcgccacgtcgtagctgatcattatccatcgccggtaaatcatcgtgaattagcgaataagtatgcatcaactcaacggccacacttgcccgcaagtttgcagccgtcgttgtgatatcaaaagtatctaaaatggctaacgtcaataacggccgtaaccgtttgccacctgctagtaccgaataacgcatggcgtcagtcagggttgattggtcagaacacgcttgaagctgctcatctaaatactgattaatctgaggacgccacttggattcaaattcagttaataattgcttattcattggcgtcagcttgctcaaatggaacttcgtcgccattttcattcatcatcttagtgagcgtcttttcagcaccttcaagggttgcttgcaactgcttgctaagtgccacgcccttttgaaattgatccaaggcttgttctaaagggacatcgccttgttctaattgattaacgatcgtctctaattgtgataaattctgttcaaaagttggttgttcagccattattttcctccatcaatcttcgtaatctgtgcctgagcctcaccatcagccatgtgaattgcaaccgtttgttctggctgcaattgtttgaccccgtgaaccacctgttcatccgccgtcacaaaggcgtaaccacgcgtcatgattttaagcggactaagtagatccaacgattggacggtctgcgtcagttgttgccgtttttgccgcacgactaactgggtaccccgattcagccgttgctgcaagttaagcagttgcgtttgtgcctggcgaacttggtgaatcggcgtttgctgtcgtaattgttgaaaaacacgctggtagtgctggcttgccagattaaagttattttgaccagcctgtttaagtcgctcatttaagaagtctaacttctgcaaatacccttcgtacaagcggttcggctgagtaaacacgtacgacgtttgtaatttattaagtcgttgtcgatcgcgttgaacgaaattctgaaatgcattgaacacgcgggtctggtcttgctttaattgtaataaaacatcgttatatactggtaccgctaattcggcagccgcagttggggtggccgcccgcacatctgcgaccaagtcagcaattgtcgtatccgtttcatgccccacggatgaaataactggcagttgactctgtgcgattgcacgcgcaaccacttcttcgttgaatggccacagatcttcgattgaaccaccaccacgcccaataattaatgtatcaaaatcaccttgcgcattggcacgttcgatctgccgactaatttcggccgcagccgcatcaccttgaacttgagatggaaacaaaacgatctgcgcaatcggaaaacggcgccgagtagtcgtgataatatcgcgaatcactgcgccactacgactagtgaccactgcaattcgctttggaaagcgcggaagcggctttttgggtgcactaaacaagccctcagccgctaatttctttttaagttgttcgtaggcttgatacaacgcacccacgccgtctggttccatgcgttccacataaatctggtaactaccactgggctcatacagaccaatccggcccacgaccagaaccttcataccttcttcaggctgaaatttgaccttggcaaacgccgacttgaacataatggctgaaatcttggcatggtcatctttcaaactgaaatattgatgcgtattaggccggggacgataattagaaacttcccccgttaggtacactttacctaaatacggatcaacctcgaatttacgttttaaatactgagttaaagctgtcactgtcaaatattgttgactttcactcacttacatcactccactttgcaagttccaccgttgtctgcatcaaggtggcaatcgtcattggacccacaccaccaggaacgggcgtaatcaaccctgcgatgccttgagcagaatcaaaatcgacgtcacccactagtttaccattttcatcacgatccatgccaacatcaatgaccgtcgcgcctggtttgatatcagcaccagtgatcaggtgtgcaatccccgttgcaaccaccaagatatccgccgtccgggcgaccgcctttaggtcagctgttttactatgtgcaatcgttacagttgcgttagcatttgttaacaaagcggccatcggcttaccaacaatggtactccgaccaataacaaccgccgttttaccagccggatcaaccccatagtcagccaacatcgtcataataccgcgaggcgtatttgctacaggataattacctggaaaattggtgatcaacttaccaacgttcgtcgggtgaaaaccatcgacgtcctttttaggatcaatggccatcgtgatcaatggttcattaatttgggctggtagtggcgactgcaccaagatgccatgaatgctgtcatccgcattgtatgccgcaataatggctaacagttcgtcctgactagtagtcgctggcaactgccgcaccacggagtgcatccccaacttagtggctttacgattcttatttcgaacatagatttgactggctgcatcgtccccaacaataattacagcaatccctggttgaattccctgagcagccaattccgctactgccgttgccgtctgcgcgttaactttcttagctactgccttaccatcaataatcttcgtcacaagtgccacactcctctttctctgtctggtcttattttagcatattcaccacaatgatttatgaccggtttactaataagttattaaaaaaagtctggcaaatcgccagacttttacggtagaacataagattgttcggttttagactaattggcttggtttttaaccactttaccaagcaccccgctaacgaatttccgagagcggtcatcactgaacgcctttgtcaattcaattgcttcattaaccgcgaccttagttggaacgtcgtcaacaaattgcaattcaaagaacgcgatgcgtaagataatcaaatcggtcttagccagtcggtccaacgaccacttctgacttaaataaggctgaatttgagcgtctaattcaacttgatgttcacgaacaccagttactaacgtacttaaatatgcgggaatttcaactgcatccgcttcttcagggttgagtaactgttggaacaactgattttcatcagcgtctgggttagcattcaacgcgaataaagcttgaaatgctttttcccggatttcatgacgcgttaaactcacgattcttcaccatcttcattttcatcggtctgggtatcttcatcaccaaacaagttgtttggatcaatggcactttcagtcttctcagtcacgataccagtgatgtggacattgacttcacttaaggcgaggtcggtcataaataagatttgttgcttgaccttatcttgaatcgctaaagcgacttttggtaccgaaacaccatagtccaagtatgcgaacacatcaacactaatctgatcatcgacgattgttaacttgacacccttaccaagattcttcttgcgaccgaacaactcatttacactggaagaaatcgtcccttgcatccggttaacgccatcaatttgacttaccgcgataccaacgattatttcaagcacttctggtgcaatttgaatttgtcctaagctgggttctttgctttgtaacgtaatattgctactgtcagccattttgacattcctccaattccatgtttgccggtattagtttttctaaaaattaagcccgtgaaacgtacgtggagtcaacggtgttaacgatcagcttgtcaccggccttaacgaagaatggtacctgaataattgcaccagtttccaacgtagctggcttggagccaccggaagcggtatcacccttaatccctggttcagtttcagcaacttccaaagtaaccgtgtttggcaaatcgattcccaacacttcacccttataaagcgttacttgaacttccatgttttccttcaagaacttcaattcgtcttgaatgtggtcgccaggaatttcaatttgttcataagtttccgtattcatgaagacatagctgtcaccatcggcataaaggtattgcatcgtactcttttcaattggcgcttgttccatccgcgcaccggcacggaaagtcttgtcttgaacggctcctgtccgtaagttcttaagctttgaacgaacaaacgcgccacccttaccaggcttaacgtgctggaattccacgatgcgccaaattgcattgtctacttcaatcgtcaaaccatttttaaaatctgcagttgaaatcatttttaaaaatcctcctcaaatatatctttataactataacaagaccgagccgctgtggcaactgtcttaactataaaatcagtaaatcacgagttgcagtcgtcagtcgttcatggccctcagcagtcactaagacatcatcttcgatccgcattccgcctaaatctgggaaatataccccgggttcaacagtaatcacactgtttgcaactaaggtgccagtcgtgttttttgagatcaacgggccttcatgaatggcaagaccaatgccgtgacccataccatgattgaaggcgtcaccatagcccgcttttgtcagcaaatcgcggccaactgcatccagttgagcagtggctgctcctgcttggacctgatcgatcacagcctgttgagcggcctgcaccgcctggtaggccgtaaccaacttatcatccggagtacctaaagcaaacgtccgtgtcatatctgacgtgtacccgtccaaaaagtaaccaaaatcaagagtaacaagttgcccggccgtcaagagtgctttagaagccgtcccatgtggcaaagccgctcgtgcaccaccaagtacgattgtcgtgaacgacggcccacttgcaccgtgcgtccgcataaacgcgtctaacaggttgctaacgtcgatttcacgcatgcctggtcgcacgatactcgttacgtattcgaaaccagcatccgccaaacgtgcactcgctcgtagccggtcaatctcatcaacactcttggtgatgcgcaactcatcgaccacgtctggtaacgcaaccaaatcactgaccaagttctcatctaagtaactgtaggctgtatatggaatctcggcctcgaagcccatgaccccagtaccggttttggcaataatatcacaaacggcccccagataatcacgtgtaatgactaggtgctggtcatcatagtgaccggcaaaagctgtctgataacgggcatccgtaatcagataggcttcctgtgccagtactagcagataaccatcgccggccatatcagccattcctgttaaatattgaagattagctccatctgaaactaaaaacgcatcaatttttaactgatcaaacttattttgtaaccgttcaactcgactcattatttcgtcactcccatcattacctcacgcttcattataccaaactttccaaaaactgaaggtaatgatttattgaaggccattcgtcaatcaattacgtttacggctaagcggcccgtgaaccaataatagtcgcaggtatccctagattgcttcacaaaaaaagagcctccctgcagaggctcttcaaaaattattttgctgggtaaacagatacttggcgcttgtcgcgacctttgcgttcaaaacgaacgacaccgtcagccattgcaaataatgtatcgtcgccaccacggccaacgtttacacctgggtaaatatgggttccgcgttgacgataaagaatgttaccattcttaacagtttggccgtcagcccgcttagcgcctaaacgccgaccagctgaatcccgaccgttggcagttgaaccgccacctttatggtgagagaagaattgcaagttcattaacatagtaaagtccacctccgaatgtggttatcgtgtttgttcacgaactcggatgtaatctccgtaattcgtggccacatcgttcaaaccaagtgtgaaactttcaagtaaggtttgtaattgtgtgttcgccaagtccagcttagtgaaatctgcaattaatagcccaccattggtttcatcactttgtactacgggttgcaagcgggcaacttgttcaatcccattgattgtactaattgctaacaccgaaaccgctgcacaaacgatgtcttgtccataagcacctgaatcagcatgtcccgtcaacttaaaagcggtcacttgaccggtcgcattacgagaaatggttgcctgaatcataaagaatgcctactttcttaattatgcattaattgtgtcgatcgttaccttagtgtatggttggcgatgacccttcttagtatgttggcccttcttggccttgtacttgaaagtaaccactttacggtcacggccttgcttttcaacagtaccttcaaccgtcgcaccatcaacagtcggcgttccaaccttagttgtgtcaccaccaacaaagactacttgatcaaaagtaaccttgtcgccagcagcagcgtcaagtttttcaacgtaaattgcttggcctgcttcaactttatattgtttaccaccagttacaataattgcgtacacgtttgtgcacctccttaaattataaatcacttagactcgccgaatgtaagtgccattgctgaacttaagactcaatccgtgcggttgtagctgtagaagtccacaaatacaacaggaaaatattatcaaattttttcataatagtcaaggattgatttcacttcacaaaaaagtccgtgaaactaatgctccctaccgtcatcaaatggtgcatttttttaatacacttggttaagtaatgtggcgtgtagatcatatcattagctaaccaatcagtaatcaggccgactgtcgcagaaacgtaatacgcgatttgaatgctgaccggtacttccaaatcagcaaattgatcctgaaaatcacggtgaaatttcgtcatccacgtcgtcatctgctgattgatccgttgattgaccgctaactggcgctgatctaacaatagcgtctcaaaggcttccgcgtgctgactgatgtaaccgagtgcctttgataaggaaaaaacatgcacccgctgtaacgggtcagccggattggtcataatatcacccactgaaaccgtcacgatggccgtttcaaacaattcacttaccaagtcatctagggcctgatcaacaaatgctggcttgtctttatagtggagataaaatgttccgcgggtaactgctgccgtactagtcagtttttgcacggaaatgttatcgactgtttctgtctgtaatagtgtaattaatgcttgtcgcaagcgccgccgagttttatcgacacgcggatcaacttgactcatatctgctccctactttcatttcataattaatataacattaattactaagagcgtctaacagatgataatcagccggacaaatagttagattacgtctaagatggttctcagtgatctatctggcccattcattcgactgacacatgattgatatggggctcacctacctgccactatcatactagctggttagtccttacatgccttagcatcaattcaaagctaaattgatctttagaaacgctgtaaaggattttatcttgacaaccgaccgaaataaccgttatactaataatgcaatttttgggaaaagtctggcttttcctgttaattcggttgcaatgtacactattcttgtttaatatagtcgttattggactaatcaaaggagggacatactcttatgactgttgttgcaaaaccatataacacatgggcatcacgtcggccagttgctgggaagcaaaagcgcattcgtcgcgaaaaagaagttgctgctatccaacgttgggctgccggcaagactgacaccatcgaaaaaacaccaaaaatcaagtaattaaaaaagaactgctcatcttgaatgagcagttcttttttaattacttgattgtataatgccaatgtgcaagataagaactcccgttgactaacggtcattacgggaagcagtgaaatgcttactgcttgcattttctttggcaacaaagtttgaataatattgaatgccaccagcgatggcgatgatcccgacgattgcaaatactgaacccataagaattctccttccttgttacatgattattatcgttttgttacagtaacatttcaagcgaaataaactattttagtcagttttgttaatttctttatcttttcttaagtattttaggagatattggttcttcgccgtcgccatttaacaaccccgtcttgcaaaaattaaattaatgatgaccggacttagttaccgctattacagcgtttatattgtgtcgttcttcaagcattaattggtattcatgaaaacaatttcctcgttcaccaggctaacttcatttttgactttcaccataatgaccaattatctcagcaaaatgtgcttactgtaatttagtgctttttcattacaaatattacatttttacatcattctgcttactcacgcctttttttaactgctgcacatcggtgaaaaattaaataaaaattgacactctccagcttcttaactataattaatcttgttgttgtcacggtagctcaactggatagagcatccgccttctaagcggagggttgtgagttcaagtctcactcgtgacataccatcgattcggacctgccattttaaaatagagaagcttgttaaaccaacgtttagcaaacttctctatttttggtttctaataaatttcggcagccaaatcgtattcgtgcttattaaatcagccaattgacggcatagatattaaaaaggtcaacaactacctaaactgagcatccacataaaaaaacaaaagtattaggttcacagcttgtatgagtgaaagagcatttgccgcattggacaatatcaccctattacctaaaaattgcattctatccaattaatttggtggaagacaaactgaaaatatcaaaattgtaacagtcgtcgtttataataccaatttacaatcaagacaccgtccaatccaccacaaccttggtgtagtacaatcaacgtatctaatactgtctgggggaatcaacaatgcttttacgccatggcttaaccagtaacatttatctgaacgattacttaacgtttattcagcaagggcgtgacacctttgaatttcatcataacttattagtcgcacagcaccattaccacctagtcatcaacgcccaccacgcctttaacgctttctacgctgaacagaagcggctggccgagcagctgatggactaaatcaattctcgcatcccatcctaatagtgcgtataatatgttttgaggtgaaacatattgaaacttgaagcaattgccggaaatatcgcgcatgccatcaaagatcgttcaactgacgggccctacgtactcgcggtcgagtttacggacaaagccaccaagggaaagtcagccactggttgtgtcatcgtccggatgccagatcaccagcactatacgatcaccagcaatgactttcggtatatggatgcgggcaaagatactttagctgaggaactcggggccttctttgaatgcgacgatgatcttgatcaacgacaaacattgatcgaccaagttaatgacttagttgcacaagacgccgataacgacgcgcaattaatgacagaggcttaaaaaataacctagttacgtgatcaaatcgcgcaattaggttatttttttaatagttatttgcttgtcgttgctcattgacatgatttttggccgtaaacgccgtctgtatctcgtcctgagtaaaaccaaaatcaactagcccaatcttcaagaaaacgtgccaagcgtgctggtagctctcctgacgatggttaaagtaagcatcatagaggaggtgcttgatcgccaagtactgtttattcaaatcagtcgccggcttagccgcaatcgtagtcaattgctcaggcgttactggaatcaaatgcgtccactgttgaatcgctgagacaaggaagaagaagtccatcgcatctacgtattcgttcagcagcgttgcgcggtgtgtcttatcaggatccgctttgccacgatgaatcttccaaactttgaaccattccgacgtattagccatttctgccaattcgacgtccagtgagaccatcgcattttgcaaccgttcttgtggccgccaatgaatctgttgacgggccgtaatatcgcggtctaaacgaatcgactgttgtaataacgttgttagttctaacatctaatacccccgttacttaagcaaatactaatggatccgcttttatttctagcgaatcgatattttctaagtaccaatcacgcatgaacccaaagtgtaacaacacgtcaaaccacgaaactgcttgatcaggatcatgaacagtcaggacccattgttgactaccgccagcttcagctgcatcaaagatatcaactgtcaaaccagcccgcagttcaatttgggcaccatgtccttgctgtgaattacgcaacatgtgctcattcttagccgcactgacaaacaatttgtcaacgattgcccgatctaaattagccgaccgaagttcatatttagccgcgttagcaacgtccaaaatattaaagtcgacgttaaagccaaaatcatcttgtaagcaatgtccaaatttaattagcgttgcgagaaccgtattaatttggtcaaccccagtccccttcaacaataatttattaataaataaattcgtaaacgccgaactattaaaccgtaacaagcgccgttctaaatgaatataaaacaagttttcgccagttgtttgttcacgataatatgcaccaccgttgccgttgttcaccacttgatacaagaaggtgtaatcatccgttagcgccccgtaaacgtgatacagcgcttcagtatgccgttgagaattcagcaccgcttgttcatcaccatgcatgcccaataaccgactcatgaagatcaaataataatcggcattctgatattgatggggaaacgtcacgtaagccgtatccagtttaaagtctgctagctgttgtgccgctgctaacagtgtctccccgtcagttgtatcaatcagttggtccatcaaggccgtaaatttttcaccattagcgagtcctttttttaagccctcattgaacgtactcagcttaccgtgagtgctcagtgttgccgtgtccatctgcttgtccgtattattcgccatcagccgctacctgcgccttcccaatcagcgtggtcaagtagtcaacataaagactacggttacgctcattaaaattctcaaaactcttaaaggcgttttcaatcgcttgtttctcataagctaaaatcgtatcttccttagaaagcgttaaaatcttagcttcgttatccttcatggttgcatgggcattattagcttgttcgtcttcatcggccaacttagttaactggtcaataatttgctgccgttcttctttgatccgaccagaatcaaatagtgagttacgttgcccattttcctttagttgctgccgcaattcttctttttgcgcatcacggtctgattgcgcgtcaatcagtttctgtagctgatcgctaccagctgagatctgctgaatacgatctgtattgaaacgtttgtgcgcgggagccagttcaaacgtcttttgtaatttattgtattcttccgaactaaattcaaaggcgactttcaaaacgttcaatttaccaaaccggcgccgatcccaccagttaccaaagtaaatctgaaattcgccgagttgggtttcttcataataaaagaatgggtactcatgagccaaataatcaattaacttggtactcaagtagtgactgattgccggatagacatccgtaattaaatccacttgggcgttacgggttggatccggttcctcgttaagtaaggcttggtgatagtggtcaccatcgatcaattcgtagatcaaccggtcgtcaccagccgtaattgcttggcgcaccgtagttacatagtctaacttttgttgaagtcgcttcgtaagcgcgcgcgtaggttgatcttgtttttcaagatcaggctgattttgtttttccataataatctccttgcaatcaataataattgaaaacttgctgaattgcattgttgttcctaatgttaccgaaaattagtgcattaataaaggttaacaccactaatttaccaattttataacaaaaacggctagttcgccatttaaggtgccctaaccgtcgtatttttatctcaattaatggtttagtacaattccatgtactgatcacgttcccattcactaacttgttgacggtatgaagcccattcaagccgtttagcttccaagaaactctgataaatatgtggccctaacgccttcttcatcgtcggatctgtctggaactctttcagcgcattgtgtaacgttgatggtaagtcagcgataccagctgcagcccgttcatcttcatccataacatagatattacgatcaacactctttggtggttcaataccgttcttgattccgtccaagccagcttcaagaaccgctgcaaaggccaaatatgggttagttgaagcgtccacactccgtaattcaaggcgcgttgacaagccccgtgcacttggaatccgaatcattggtgaccggttagatgctgaccaggccacgtaaacgggcgcttcatatccaggaaccaagcgtttgtatgagttgactgtcgggttagtgacagcagtgtatgaccgggcatgcttcatcaaaccacctaagaagtgataagcgtctgatgataattctaagccattcttatcattagcatcataaaaggcattgccttgatcatggaacaaggacatgttcacatgcatcccagaaccattgacaccgtttaacggcttaggcataaaggttgcccacaaattgtatttccgtgcgatggtcttaacgaccaatttgaacgtttggatatgatcggctgcagataaagcatccgcgtacttaaagtcaatttcatgttgaccaggtgcaacttcatgatggctggcttcaacgttaaaaccaagtcgttcaagttcaagtgcaatgtcccggcggcaattttcacccaagtccattggtgataagtcgaagtaacttcccttatcattcaattcggtcgttggttcacccttttcattcatcttgaataagaagaattcaggctcagtcccacagttaaatgacgtataacctgcttcgcgcatatcgttcaagacacgaattaagttgttccgtggatccccttcgaacggcttacggtcagacgtgtaaacttcacagataatccgtgcaattttaccatgttccgtgttccaaggcatgatcaaccaagttgataagtcaggatacaggtacatgtcactttcttcgatccgaacaaacccatcgatggatgaaccgtcaaacatcaacttgttatccaagagtttgtcgagttgtgaaactggaacttcaacgttcttaattgtgccgaatagatcagtaaacattaaccgtaaaaaattaacgttttcttctttgacgatgcggcggatatcgtcttttgagtaggactgttttgccatgaaaatcgctccttaaattgattgactaacgaatgcaaacatcttagtgtgccggataattggggcccttgtcggactgcaagcctccgagattcaggaattcatcatgaaggattcggcgcacatcgcgatcagttagcggcttagccaagtcagcttgcttctgctcagctcgctgtttttggagcgcatatatttctttgattccagccatattgatgccatctgctaagtaatccttgatttcaagcaaacgatcaacatcattcaacgaaaacattcgccgattaccggcatttcgttccggcgtaatcaattcttgctcttcatagtagcgaatttgtcgcgcagacaaattggtcagcttcataaccgtaccaattggcaagacggccaacgagcgacggagttccttttccttcataacgaccctcctctttaatacagacttaatattagcaatgttatcatcgaatgtcaatcattcatgttagaaaatatcacacgttttatcataggtataccaatttataatttagcttaaccaactagctagccgttggtcaatcgagacccgtaattcagggtgttccaatagattgatccagtcgaccgacatcttgttacggaaccaagtcaactgacgcttcgcataacgacgtgagtcctgtttgatcttagcaattgattcgtcacgcgtctgctccccattaaagtaagggaaccattcgtgatacccgatccccttaccagccggtaacatggcgccaccttggtcaaatagccaccgcgcctcttgttccaatccggccgctaccatttgatcgacacgttgattgatccgagtatacagcagcgctcgctccgcggtcagacataaggtataagcatccagtgtgtcaccgtgcgtatccgcctgctcagaaaaaagctgaccagttgtatgcacatactccaacgcccgtacgacccgtaccaagttagcgggcgcaattgcggtggctgcctgcggatcacgctgtttcaacgccatccacgccacatccgaaccttcgacagcggcacgatcaaaccaagcttgacgatacaccatatcaggttcattatccgctggtccaaactgatagcccgccaacaaggactgcaagtaaaagccagttccacccacaataataggcagtttaccccgagcactaatatcaatgatcaacgccgtcgtccgactgacaaattcagcgactgtaaaacgctgatcaatatttttgatatcgattagatggtggggaatgcccgcctgctcttccggcattattttagccgtaccaatatccaagtgacgatagacctgcattgagtctcctgaaatgatttcaccattcagctgtttagccagcgctagcgataatgccgtcttaccgactgctgttggtcccgcgattagtaatactttatgtttagttactgttgtcactcgtttaacctccttgtacctgcttacgaattcttcgtgctaatccagggtagtcggtaatcagtcccgcaaaccgatgacgataacagaaccgcatatcgcgttccgtgttgaccgtccatggccgcaactgcacttttggcaataagagccagtgaactcgcacccaacgaatatccggatgataaccgagaacaatgtgttgcgcatgaagccgcttcgcagtttgaaccttagtcttgaacaggctatccgattcgacctcgggctgtaaaatatgcaaccgttcgatcgactttccgtagaagctcgaataaattagcgtaaacggaacttgatgatggttaaaataatccgctaccaagtcttcgatcccctcataatgaatcttattagttttgatttccagattaaaaataccagtaaagttgtattgaatcaataattgaaccacttcatctaaagtcggaatacgcgttcccgcataggctgatgcatacttaacaccagcgtccaattgctttaactcggccaacgtgtgatccacaatccgacccgttccgttagtcgtgcggtcgacgagctcatcatgcataataatcagttgcccgtctcgcgacaagtgtacgtcagtctcaatgccatccgcaccatcctcgatagccgcaataaacgctggtaacgtattttccggcctggtccccttgctaccacgatgagcaataatttgagtaagcattgcgtttcaccccacttttttaaaaatcagattgaattgattgctatctccgcataaaacaagcataataaaactaacaattgctaggaggttttactaatgaaatcatttacccgtggcttcttgtttggggtcgtcgcaactgctggtgccgtaattggctccgtcttatcatttaagaagcaagttgttgatccaatcgaagaccaagaaaacaaattcgaagaaaaccggaaaaaggcgatgcgcaagagtcgctcagctcacaacggttaattaaataaaaaatggtggccgaacaagttgttgttctagccgccattttttaatacttcgcttttttcgtcttaccttcccaacgtgcgtaaccgggttttaaaatgtatagctgtgaataaccattcttagctaatgtgacgacggcccgtgtacttaacgtatgggtttgatcgtaaacgtagattggcatatccttgcgaagttcgttcatccgaactttcaaactgttgaacggaatattccgagcccccagaatatgaccagcgtcaaactctttcttttcacgcaaatcaatcacttgtgctttacgcattcccgcctgaaacgcttcttcgtccaacatcgtggacacctgacgccgtcgaatgtaactatacaactcataaataaagtaggccgcgattatgataactaacacgatgttaacatacgccatgccgctcaatgcacctaaaaccacgttatccctcctaatttctacttatctattttacacaaaaccgcttacttttactaggggtaagcaggaaaagccgcgattaaactgctgactaatcctgaagtcccactgattgctttatggccgtactcacccacggtttaaagaaatccattaaaacggtcgggggcctgagacccgcatttaaccacgctgttaattcaaaaccaagcatcgcggtatcacatttatgaatctgaatcgatcatctgaatctgactaccatgcaccagtaatccctgattgttagtcaaccgtttgaccgtaacgcccgtcttatgttcccagtcagtgatcaactgcggcaattgcggctttacttcacaatgaacatcataatgcggataaatacggatcgtcgtcgcattgatggctgttgtgcttgccagttgctcggtgttgtcctccgggtataaataggcgtacaggtctaaatccgggcctaacaagatagccccggcgctaataccgtagattggcttgcccgccagcgcgagagtcctcagtcgttccagcacgtgcgtttcacgcagattcttcaacagtaaaaactcgtagccaccattcaaaataatgaccgttgccgtattcaatgcggccaaatcatccgtcaatacatctaggagctgcacgtgcgcatatccaagctgctgaaccgtttgttgtagtgccaccatttgggggtgatttttacccgtgctgaccgaattgacaataatcacaattctcgcactgttcttagccaccggcgccactaaagtgaaaaaggcgtccgttacggccacagtgctaaacgcccgtgaagacaataataactttaccatcctgcttctccaatcaattctgtcatctaattcaattcacgctagtcgattcgtatcccttgtgccaaatcgcgtaacagttcatacgccgttacaacaacataccgacatgaaactaaaatcgcgcatagtctgaggacatgagcccaaatcagcatcggcaattggcgctcagtttttaaccacaacctaatcagcacagtttttggagcttagtataaaaaagaagctcggacattacttccaagcttcttgacgattgattttaacttaaataaaccgttgggccaatgaacctgctccgataacaccagcgtcgttacctaagaccgctaacttcaaagcagtcgtgtcgcgaatcgttgggaatgtgaattggttaaagtaactgatgacttgatctaataagaaatcaccagcagctgaaaccccaccaccgataatgattgaagatgggttcatcgtgttcccgacattagctaatgccaagcctaagtaataagaaacccgatcaacaacgcgtttagccaagacatcgccttctttagctaaatcgaaagtgatctttgaactaatttcttcaccgttgtctaataattgtttcaacttagaagcaccagagaattcttctgccatatcgcgagcaacgtgaacgacaccagttgcagaagcgtattgttccaaacaacctttcttaccacaagtacacatgtagccgtttggttcaaccgttacgtgaccaatttcaccggcaccaccggcaataccatggagtaaacggccatcggcgatgatcccaccaccaacaccagttccaagcgttacaaagacaacgtcactaccgttttcgccagcgcccttccaacgttcgccaagtgcagcaacgttagcgtcgttatccagcgtaaatttgatgccagttcccttttcgatttgagccttaactggttgtaaggtcttccagtttaagttgtaggcaccgataaccgtaccattatccaaatcaacggtcccgggagtccccattccaattccgataaattgagaacggtccatcttatataactcaatgtggtggttgatggaatcgatgatgttaggcacaatgtgggccccttcatctaaaatcgtggtttcaatactccacttttgttgaatatcaccattttctgttaaaatggcaaacttagttgtcgtcccaccaaggtcgactccgattaacttacgctccatgttgctaaatccctccattagtcatgcgccgcgtcttcacgggcgcgttctgcttctatccggtgctcatggctcaatacgagcttgacgcgggcatacatcttcgggtcaatgacaccagcttgatagagatgatcgatctcaatggccattaactcaatgtcccaaattcgcttgcctacgtacacgtacacgccaaattttttaagtaattgttggacgtcgtaaagtgttttcatgtgcatatcctcgattaattatacagttaaattagcatttgtaaaacccatttttagtaaagctaaccagccaatgactagaataaccgttgccacaattcgtttcagcggcgcaatcttgccaattcgtggtacacccagcagatagcctaacaaaaagccaccaactagacccccgacatgtccccagatatcaatgccattcgagaacatatcgaatactaaattcaaaacggttagtagtaaaaattggttcgtgagctggcgaatcactggattttcccagaacgattccccaatcgtcaaaaaggcaccaaagagtgcgaaacacgccgtactggcccctactgactgattattggataacgcgaaactcataatattaccactaatgccacccaaaatataaattgccagcatccgccaatgaccatacattgcttcaatttgcatgcccataaaataaataacgacaccattcagtgcaatatgggtaagtcccatatgtaaaaacatcggcgtcaccaatcgccaccactggccggccgcaattgcttgattgttcttagcacctagtgaattaaaaatcagcatggcgccgtcgcccatcagccactcgactaagaagactgccacagtaattccaagtagcacctgcgtgatagccggttcagtttgccaccagcgtttaattctcatcatgttgttcatcccctgctaccaagagttcgtctaacaagacgtcatattgatcaaccggccattcagcgtgttcaaaagccatctcgtcataagccagtgtcaacttcttacccggataatcagcgaggtaacgatcgtagtagccaccaccaaatccaatccgggcgtgccggtcacggctgtacccaagaccaggaactaagatcagatcgatctgttgcttggcgactggttcacccgtgacgggctctggaattccaaaagtcgttcgctcaagtcgatcagtcgcttggtaaggataaaaagccatttgacgatgcggcagcgtttttggaataaccaccattttgccctccgcccaagcttgttcaataagtgggcgcgtcgctacttcgatgtcactactaattgtcatggcaatgacctgggcagtttgccatgttgggcttgcaaataattgggtctgtaacgcctggttttgccgttgccggtcagccggcgtcatttggcttaatcgcccaagctgttgcttacgaaatgcttttttctccacgtacggcacccccgaaaataaaattggtataaaaaaatctcattcattaacatgtcaaattgaaaaatcaatttggcagttgccaacaaatgagaaacccattgtctgatgacaatgttacagaaaaaacaacaggagtccccgttgttattttgtttcacgatgtaatgtcactttgtgttcccgtggacaatacttcttaaattcaacccggtccggattgttccggcggttctttgaagataagtagttgcgttcatggcattctgtacattcaagtgtaatgtgtacccgcatgttgttgaccctccaaactcattcgcatattacagggccggaacccttaacttgaactactataccattaatgattgaaaaataccagtatcaattaagatactggtacgaaaaaagctgattttttacttgttataatacttccagaacgctgcataaatttgcttagcaacgaccatattataatcaccactagtagcagtaattcctggaaaggcaaccgctatcactactttagggttcttataaggcgcataagtcaccaaacttaaggtttcagtagatgtcgttccgtggaatgtctcggcagtcccagacttagctgcaaccgctggtgataaactagctagtgcactccccgtccgctgcgtcatactcccatggaccacatcccaatacccttggtgtacgacatcaaagtatgaggatgggacgtcaatggtattcaggacacgtggcttaacattagtcttaacagccccttgggacccgttagatttagtcccagtaatagcggaaacgatgtgtggtgcaatgcgttgcccaccatttgccattgtcgcaatgtattgcgccagctgaatagtcgtgtaagcatcgtagttcccgtaggacaagtctaacgctttaccaatatccttctgtgccgaagaaccttggtaacctgaggcttcacccggcaagtcgatcccggtcttaacacctaagccaaactcgttaaaataaccacgaagtttagagaagaccgaattagacatcgtcaaggctttcccagacgcatagctgaagttaccttccttcatggctaattgcatcatataggagttagaagaaacttccatggcagtcgaagcgttaagactcagactagttccaccattcttgttaaaccatgacgacttggtggccgttccggctaacttgattggcgtatcggtcaaagtactattcgtgggtgtaatcacaccatcttgcaaggcacccatgaccgtggcacccttaacgaccgaccccataacgaaggattggttgatggttcccaacgcattttcagtcactttaccagtggatagattccggctggcacctgctaacgcataaatggcaccagtgctagggttcattacaacagcataggctcctggcgagtaggcattactactccccaccgttttggcttcagacataatgatactttgaacctttttctggaacttcgaattaatcgtcagctgaacgttgtcacccttctggccaccgtacttcttaatctccttttgaatgaccccatcctgcgtcttgacctcagtctgtgacttggttccacgaaggacattttcgtactgcttttccaattggctttgaccaaccgaatcatcacgagaatagccttctgccagcaaggttttaatgctatcactcggtaacccttgcttttcggtcgtaactgtcccgagcacactactcaagtcagtcccattaggataactccgagtccaactcgttccgaccttaactcctggcatttcggattggtgctcaccgatttcagcaagctccgtactcgtcacaccagtcgatttgatattgaccgttgacagcgagtacgccgaactcatcttataataaatcgccgccgcattcttttgcgtagacgttaaattattaatgatatgtttttccgcataggcgacttcccgtgcgtacaaaacatcatcgtcgctagacgttttaaccttcttagcaaccgactttaaattagccgcccccgctaagtaataatcagccaagttccgatccgttaatgtatccgttggaatggttaagtactcacctaacttattcgccacttcgtacatcttagtcgacgcaactgacagccccttcgtgtattgaatcgcttggtgggatttgtttcccactaagacccgaccggttgaatcataaatcgatccccgttgaacgtttcccgttgccgtcgtattattggctgaattcactgtacttcggaacttctgtccgtagtcaacttgtaagtaagctaactgcgcaatcaacgcagcaaataacaagaagacgatgaaaaacaagaagttcagccgaaatggaatatgcgacttgttgggatcacgatttatcgtaattttcttaaacaatttcaattctcaggcgctcccattcttaatttggtaaacatttcgcaaaaatttaccagatgatactagcaatcctagataaataccatacttatgttattctaaacgatagacataaaaatttcagccgttattacggattttaatgtttttttgattatttttctgtttggctgtgaattattagagattgaggtggcaatttttgaaactccgtcgtttttttgacaagcgcacatggccattatggatcagcttttggttacctttactgatcatgaccggttattttatttatcggcacatggctccctttggatcaagcagtctgttaacggtcgatttaggccaacaatacgttgacttgttttcctatttccggcataccctactgcacgatccgagtgctttcttctattccttctccaaaacgattggtggcgagatggttggggtctgggcttattacttaatgagtccctttaatttaatctacttactattccctggtcaatcaatcactaccggcatttttatcgtcactgtactaaagtatggtttcgcagggctatccttcgcctggctactaactaaaacgcagacgcaaaagggttggttggtgccaacttttagtaccgcatatgcactgatgggctggatggtcgccaatcagctcaacatgatctggttagacacggtcgccattttaccattggtcattttgggactggaacgcttgtttacaactggtaaagtccgttacttcgctggctggctggccgtcatgctaattgacaactattatatgggctacatggtcattttattcagttgtttatactggttgtatggtgcaactaagtattggcaaaacgtgaagaccttagcaactcacgccctcaaatttgcttggggtggtctgctaggtgtcgcattctccgcatggttgctattaccaactttctgggcgctcattcaaagtaaggctcaatataatgtgaccaaggttcattggaaacttgaatacgcgccctggaagatgttagctaagttcgtcaccggtactttcaacttcgatcagatgccatccggtcaaccgaacttttacgtggcatggttagcagttctcgcctttgtgctcttcttcttacggcgccagttcaaatggtccgtgaagttgagcgccttgattgtaaccgcgacgcttatcttatcattttgttacgaaccacttgatttattgtggcatgcgggccaatttccagtttggtacccttaccgcttctcctttgtcttttgtttctgggtcgtctggattggtgcccaagcactgacagacaaaataacgatcaaactgtggcaagcgctaacgatgctcgcattgctggtcggtttgtttacaaccatttacttgaacattaagaaagtcacctacgtcacccaagctaatctcttaattacaattggcttggcagcaattacattgattttcttaacgttgcctaaggaacgacgtctcatttatcaaatcgtcgcgttaattttagttgcgactgatatgtcgatcaacgtggtcgcttcattaaataatatttcctacgtgtcacaaagtgagtttggtaaatacacgcaagtccttgacaatgccgtcaacaaaattaaagctagcaacaatcgtttttatcgaattggtaagacgtttacacgaactaaagacgatccgatgcaggcggcctataacggtgctgatcatttcagttcgaccttcgaaagtattatccctaactttttcggttcaattggtcagccggatggggacggtgtggtcgcctacaccaacgggaccatgattaccgattcgttactggacatgcagtactttatggataaaacagtaccgacatcccagactgataacgcgaactatcgtagctacattccggtcaccagtaccaagaaagatctgacgaattaccaaaaatcggcaaagctcagcactaacaaagtcacgacctacaaaaatccatacgccctgggtcttggtttcgcagcgtctgacaagattactagcttgaaagtctccaaaacaactggcgatccgattgcccggcaagagttgatttaccaaaccttggcaaatcgttcaaccagcggcttgatcagtgccgaaaactttaacgaagtggtcttccaaaacgttaagaaggtcacgacgttaactggcgccgtcttgaacaaacaaaatttagcgaaaacgggatcggtttactttaagttcacgccgacaaccaatgattcctactacatcacgctcgggcaaaacctaactacttcgaatgcgagttactacattaacggtaaggaactcaagcagtacccaacttaccggcacacgatcgctgttaacgttgcatcgaatagcaagagcaagaccgtgacattcgggattcagatgaagaagacttctctctggttacaaaacttcaccctctacaagttggataatacccaattcaagaagtcggcgcagaaactccagcaatccccttggaacatcacggcccactcaagtcgtaagattactggtacaatcaacatcaagcatcgtcaccaagttttgatgacgaccattccttactccaagggttggcatgccactgttgatggaaaatccgtcgcaactaagaaagtgattaatacctttgttgctgtcccattaagtaagggcaagcatacggtcaccttgacgtatcgaccgccattcttaatcactggtagtctgattactgggattagtgcactcgcaacggctggttggtttatcgtccggcgtcgacgccaccacgcctagcccagttcacagtcaaagatgtggtcagcaaaaatcagcgttacctgaattgttaattcaggcaacgctgattttttgtccaaatattaatcgctattggcaagcactcaccagaactactcgttattgggcgtgtagtcatacttcgggccgtcactttgttcatcataatcaactgtgagatcatagcccttaaagaaccattcatcacggtcgttgacatagtaattgacaccatccttttcaaccatggcaatcggttgatggggttcgtcatcacgcatgatcccgattgagaagccactgtgaactgctgtcttgccataagttttgccgtaaaagcgcaccccattaccagtggttacacccatgtcatcatgaaaccacttactggccaaatctgtaattgttattttcattactaacacctcatcattgaaatcgtttacagtaattgtgccctttttgcccataaaacgcaacattgacagtcgatgagcaagccaatgaccagttgcgttcctgaaatgaccgctaagggagtctttatttacagcgtcattgttttgtggtgtacttaaactacttaaggaggtgaaacccatgcaagtgaacattgaaacggatcccggcacctcaattccaaccgtcacactgcatgttccagtcgactaccccgaaacggccgccctcactgctgctctcaaaaatctttcaattgaggccgctacgttaaccgtttcacaacgtggtcaactcgtacagttaccgcttacttcgatcctattcatcgaagcaactggtcaccaggtcgccgcccatacgctggataatgtttatcgtgttcccaagtcgctgaccgctgtgggcacaggcttacctgcttactttcttcgcgtctccaaatctgccattgtcaataccaaacaagtctattccttgaccaagacattgaccgggaacttgattgcgtttcaccactcacctaaacaactgtacgcttcaagacgctactatcgccaactcaaaataagtcttgaacagaaaggactgttataaatgcataaaaattggttttggcccgtcttcttaattgccagcgccgtcgttcttatcgttagtcaactcagtctcttcacgctccacgtcagcatctggagtctcttgttaacattgattctagttgcggctttaattagtagccttcgttacttgaatatgccgggcgtcgtcttcgctatcgcattcttagccatgatctatgcgcaaccacttggaatcactaagctcgtaccatggacaattttaggggctgccgtattactcagcattggtttgggtcttttgattcatccccgttatcaatatcattatcgctatcacaaccatgatcatgctcattacaatcatcataaccacgatgacgtccatgaatcaacgagcacaatcaacgatgaccatgttaatttagatctctcactaggcaacagtatccgctacgttcacagcgaaaattttcgttctgcggatctgaacgtatcaatggctggtgccaaaatctacttcgatgacgctgacatcaaagaaggccgagtaaccatcaatgtcgacgtttcattaggtagccttgagttatacctccctcaaacttggcagctacaggaaaatctcagcaactcaatgggccacatctcatcgacaggtacaccgaccactgctggcccgggtgtcatactaaccggcagcgtctcgcttggtgaattacgaattatctatatctaatcctactttactgtcggccatatcctgatcaatctgtcatgaatcatgattaaaacataccagtttttaagttcaaaaagggccagctatggacccactggaaaaagtcgagttcgtatagacttgcttggttgagcgcgtcctacaccgacttccaggcatctctgccaattgctgaaacgtggtggacaaagatttaagccacaaaccacgtcttaaatactggtcttccacgctttaatgccatattggtgaaacgtgttcgggtcaggctgagacttccggttagctacgctatgacgccaagcggaaattcaccgcttaacgccctagctaggctaatcctcagccccggaggtcggaataggacgtgcaagtgctgatgaacagtaacccaaccaactggcatgttttcatcatagtaaatgctcaacaaaattgtaacgtgtccgatttactcacccgtttacctgctttgtgcagataagcgggtgttttgcttgaattccgaactcacacgcaaacgtgcttgttcagtaacgttcgttaaatagtggctggtaatcagtaatcgcgcttctaaaccaccaaaaaagactgtttcaaggtatccgctacctcaaaacagtcttaagcataaaattacgcgttttcaaccttcaaaattttaaccgtcatggtaccggctggaatgttgatggcaacttcttcatcaacgtgatgcccaatcaagcccttggcgatcggggaatcattagaaatcttgccaaccattggatcagcttcggcagcaccaacaatggtgtagctttctggttcttcatcaggtaattctttgaacgtcacgattttaccaacggagacttccgtttcgtcaatcttgtcactatcgatgatttcagcatattgaagcatgtgttcaaccgtcttaatccggttttctagcaagctctgttcattctttgctgattcatactcagagttttctgataaatcaccgtagctacgtgcgatcttaatacgattaataatttctggacgttgattaattcgaaggtcttcaagctctttttccagcttgaccttgccttcttctgtcattggatatgtcttatcttcagccaatgtgtttcactcctcaaatacgcaatatagttatcaaaaaccagcctaccatttcagattttaaaagtaaactcttaaatctaaaatagcgctggttaagacgttattttttataaaattgaacgaactttagttgtcaataaatcaatggcaacttcattttcgccaccttctggcacaattagatcggcataacgtttcgttggttccacaaactgatgatacattggtttgaccgtcgccaaatattgaccaatcacagagtctagtgtccggccccgctctttgatatcacgctgaatgcgccgaatgattcgaatatcatcgtcggtatcgacgaacaccttaatatccatcaggtcgcgtaaacgctgatcatctaggatcaataccccttcgacaatgatcacatcacgcggttcttgatgaatggtcttgtcgctacgcgtatactgctcgtaatcatagaccggcttttcaattggttgataggccagcaactgcttgatttgcttaatcatcaaatctgtatcgaaagccagtgggtggtcgtaattaacggcatggcgctcagccattgtcatttcactttgatcattgtaataggaatcctgttgtaagatcaacaatgattgaccagataattggttgtaaattgcattgctgaccgtagttttaccactaccggaaccaccagttaccccgatgactactggtcggcgatgtttattttcagtcatttaagttacgcctcattcttatttttcagcggcttcgttgtgcttcgaaaccttcttgatgtttgccgcgtgacccgcagcatcctttgcataatagacatcaccagtcttcaaatctgctacgaaatacatgtaacccttgctccgttgtgcaggatctaagactgccttgatcgatgttaaactaggactgttgaacggtccggggccgtagcctaagttcaaccgtaagttatacggtgaatcagtctgcaaatctttattcgttaacgttgacttgttagaattgatcgcatagaacactgaaatatcagaatccaagcgccacttagcatctaaccgattcaagaagacgccagcaatcaaccgccgatctttcgtcgtactgccttcacgttcaactaaggacgctaaggtcattacttcttgcacggacatcttcgacttcttaatttgcgcgtagtatggttcaagctcatcattagtcttcgaaaccatctgcgttactaattgtttcaaagttgttttcttaccaacaacataagttgccgggaacaaatagccttctaaacgatagcgaacttgcttagcactcatcgctgaattcaacaattgtggatacttcttggccaatgatttgatgaatgtttgatccttcattaaggctagaaattctgccgacgtgaaatcagtttgtttttgaaccgtcttcgcaatcgtcttaatctgactaccttcaacgattaggactttaccactagaactctgaaccggttccgatgaaccacctttattcaaggccttcgcaatttgagcaagtgacatcgaaggcttcaactgatagtagcccgcgtgaaagtttgataagttgtgtgctttcgtccagtattcaaagacaaaaccactcttgatcaccttttcgcgctgtaaaatatcggcaattttcttaccattagcaccgtacgggatatcaacttgaacgacgcgattgtcgctactgtcatatggttgcgtcgcattatcaaaatatcgataacccaatacccccacaataattaaaagtacgactaaaataccaacaacgccaccaataacgtgtttcgaaaatgatttccgctgtttttgttctgaacgattaggttcatttaccccacgatcttgtgaatcgttttgatccttctgatcttggttatcctggttgttattcaagactcgcccctccatttattgattaatcttatcaattatacaaaactgttgcccagtttgcactagttcgccattagttttatggttttttaggatcttggacacacattaaacgccgaatgacttcaaatcattcggcgtttaacaagactatcaacaaactaacgaatttcagcacctaattcatccgttaaggctgtcagtactttttcaaatgctgtcgtaacatcatcatcgactaacgttgcgttttggtcttgatacgttaacgtataagctagcgactttttacccgctggcacgtgactcccattataaacatcaaagagttgaacgtgccgtaaatgcgcgccgcccttcttgttgatcaaggcaaccacggttgcgttggtcacatcgtcatcaatcaacatcgccacgtcccgggtgatacttgggaacttggaaatcggttgatactgttgacgcgcttttggtaaggcaatcaacgccgttaaatccagttcaaagacataagtttcccgaatcttgtaggctttggcagtcgttggatgaacttcaccgacgaaaccgactaactggtcaccaacgtaaatatcagctgtccgaccaggatgcatctctggatgttcggccgtggcaacgtaactaacggcatcttgcaacgccagactcttcagataaccagccacgatacccttaatctggaagaaatcaacgggttgttcggcaacgccccagctcttgggaaccatggaacccgtaatagctccggcaatgtgttcaatttccttcggccggacttgttcaggttgactgtaaaagacccgtccttcttcatacaatgccacattgtgttccttacgagcattgttataagctaaatcatccagcaaaccagaaactagactcaagcgtagcgtggtccgttctgaactcattggaaagtctaatttagtgacgtcactagcatgaagcgcaaaggccttcgacttagtctccgtggtcaatgagtaactgatggcttgcgtgaggccagcactttccattaacttacgtgagtcacgaatcacctgttgggtctcattaagcttaccgattgttggttggcccgttggtagggtcgctggtaagttatcataaccgtatagccgggcgatttcttcgataaggtcagccggaatatggatatcccaacgccgtgatggcaccgtaaccgtgaacgtttcattagcaacgaccgttggaaagtccaatcgtttaaaaatatcactgaccgtgtccaatgacaactcagttcctaagacgtggttgatccgtgctaagtcaatggttactgtcgttggttgcacatcctcatcacgaccgatgaccataccactagcaacttgaccatcaccaagttctgcaatcatggctgcggcagcgtctaaggccgttgcggtcatgccgtggtcaatgccccgttcgtagcgcattgaagcttcgctgtgtaagtcatgattatgggcagttttacgaatcttaactgcatcaaaaaccgcaccttccaacgcaatggtcgtagtctgatcagtgacttcggtcgctaggccacccatcgtcccagccaaacaaattggttgatcgccactacaaatcaacagatcactcgttagtaattcgcgatcttcaccatctaacgtcgttaaatgctcgccagctttcgccaaccggacgttaatttgaccgtcattcaattgatcaaagtcaaaagcatgtagcggttgtccatattgcatcaaaatgtagttcgttgcgtcaacgacgttattgattggccgcataccagcattccaaattcgaatttggagccataacggacttggcttaatcgtaacgtttttaattagacgcattttgtacattgggacatcatgttcgtcggcagcgacagccacatgtagatcatccgcagccaccgtcgtagcatcttcatgcaaatcaactttcggcatcgttggttgttggtcgtaaatggcagcaagttcatgcgccgtaccattcatactaagcatgtcaccacggttaggggtaacggacatgtcaataatttcatcatccatccctaggtatgaaaagaccggatcacctggcgtggcatcgtcaggcagaatgaaaataccatccgcaacttcttttggaactaacttttcatcaaaaccaagttcgtctaaggcgcacagcatcccatttgatggaactccccgcatcttactcttcttgatcttagtgtgaccaccaatccatgaattcggtaacgccacgatcaccttttcgccagccgcaacgttaggtgccccacaaacgatttgcaagggttctgattcgcctacgtccacttgacaaacgtggagatgatcagaatctggatgtggctcacacgttaagacgtgccccactacaacttttttcaatccttcactgggacgaataacaccgtcaacttcaacggccgtccgttcaatcttttctgctaattcatcggccggaatgtccagcttcaaataatcgcgtaaccatgtcgtagaaattctcatgtggacgcctaacctttcttatagaactgtgacaagaaccgcacgtcattcaagtagaagttgcggatatcgtcaacaccgtatttcaacattgcaaagcggtctggtcctaacccaaaggcaaaaccaccatattcttctggatcaatgccagacatttctaacacgtgggggtgaaccatgccggcacccagtacttcgatccaacccgtttgcttacagattgcacagcccttgccattgcaattaaagcaagttacatcagcttctacggatggttccgtgaatggaaagaagcttggccgtagccgaacatcgaattgatcgccaaacaaagtcttggcaaccagaattaaggtgcccttcaaatcagccatcgtaatatgcttgtccacgactaacccttcaatttgatgaaattgatgggaatgggttgcatcatccgtatcacgccgataaacgcggccaggtgacaagaccttcagcggtcctttagaaaaatcgtgattttcaagtgaccgcggctgatcagcagacgtctgcgtgcgtagtagcacgtctttggtaatatagaacgtgtcttgcatgtcacgggcgggatggtccttcggtaagttcaaccgttcaaagttgtagtaatcttcttcaacttcatcaccatcaacaatttgatagcccattcccataaatagatcttccaattcagtaataatctgggtaatcacgtgaggctgaccttgtggaacttcccgacccggtaacgtcacgtccagtttttcggcagccaattgctcattaacggctgcttgttccagttcttcacggcgttcatcaatcgcagcctgaatccggtcacgaacttcgttggcataagcgcccacctttggccgttcttccgggcttaagtcgcgcattccgcgcaatacttctgtaatcggaccctttttaccaagcaaatcaactttgacttggttaacctttttcaaaacatcggcggatttaatatcggccaagccttgatcgcgtaattcggttaatcgatcttgtaaactcatatgctgcctccaatttttagttgcgttgcggacaaaaaaagaccccatccctgaaaagggacgaggtcatcgcggtaccacccttgtttgcatagtagtcactatgcacactcactacccgtcataacggtcgggataccggaaaattatttgtttacacaaacgcccaatttcagctcagagagtgaattcgtcaatcttggtcgccagggtgctttcaatcggtgacacccgtccctacgacgccgtaactaactactatttctcgtcaaggcttttatctacattgtcagtttatggcaaagtgccctgcacgtcaaccccgtattaggattcgaccgggctgaaccacttatcagaccagttatggaccgtatccatgacctgtcgtaaatcttgccccttcgtagtcaagcgatactcaatcagggcagagtcacaatgggttacccgactcacaatgccgttttcttccaattccttgagacgaacgaccagcacccgatcactgcacttaggaatccggcgtgccagattcttaaagcgttggggaccgtcttccagtaaaacatcgataattaaaccgttccactttttccctagaattgagaacgtcttttcaaattttggacacagttcgaaatccacgttggattctgttaccgtgtcagctagcatttctgacatgcaatgacccccaattattgaattaaccggcggagaccttgcctcggaaccgatctagttgtttggccactttcatacgtaatggtccaaaaaattcatgttctgcttcataatcatcaactaaagagacgagcaaactttcacgatatttaggcacagctaaagttgcaccaaacatatgcttcaaaatgatatctttttccatcggcgttaatttcgttaacttttcagcgttacgtaacgctacccgcggatgaataaatgcgtgcgagccgagatcaaacttggtttcacgccagtcataataaaacaaatcatgcaataatccaccacgcgccactgccgtcgtatttagatgccatttcttcgctaaaacataactatcatatgaaactgcaatcgaatgatccaatcgatttgaatggtggtgctgtgtaaactcagcaagccgctgaacggccggctgtgctaataaatcttcgacgatcgccacgtattcagaatcttgttgccacgcattattagttttcatctaaagctccctttgctaatatctacggctattctactaaaaagtcagtcattttgaaagtattttacctggattttagcattttcttactaattgtaagttagcgatataaaccgaacattaaaacgccagcagccacggctacatttaacgattctgcttgccccttgatgggaatgtataagttttggtctgtccgtgccaataattcccgactcattccattaccttcgtttcccatgatcaagccaaaactagccggcgcgtcaatatctaaataccgggctgcctgtggatttaattctgaaccgtagactggtgaaccctgcgcctgcaattggtcaaccaacttgtcgagatcagtactaatcagttgtaaatgaaactgactcccctgcatagctcgttcaactttgggttgatggatgtccaccgtcccggtaccgaaagcgacgccggcaaaacccgcagcatccgcagtccgtaccatggttccaatatttccgggatcttgaacattatcgagcagtaaccaaggccgcgttaaatctaattgtgatagatcttcaattgcagcaggcagggtcgccagcgcaaacaccccctgcggcgtcaccgtcgcactgatatgtttggcgacttcatcagagatttcaatgaccgctggaaaatgagtcaagtccggttcggtcgccagttgcttggcagtaatgagcaaggtctgaatcgcgacgtgtgctttaactgcttcgttgactaaatgccaaccatctagcaagtattgtccctgttgtttgcgtcccttctttgtttggagctttttccacgccttgacgtgcgcattttgtaatgaattaattttttccatcgtcaacttcctttaattaatcggttgaaacatcagccggtcttgtcaattcggggcaccctgtatcattcgaaagtgtccgttttatcccaagtatagcatatcgcccgttgaacatttccatgctattatataagtaatacagattgtactaattatgctaacacaatacaatcagcaatcagtacaatcaagatgctagtcacaggttagactagctgaacaagttaagtaaggaagtgacacaatgcgtgcagtaacattaaaagcaatcggccgggtccagggggtgggcttccgttgggccactaaagttgccgctgacaaatgcggcgtgaacggaatcgttcgtaacctgatggacggctcagtctttattgaagccgaaggcgaagatcaacgagtgcaagtctttatcgacgttgttcggcagtcgccaaccgattttggcaaggtcaagcacctcgaagtgcatgaagttgaaccacaaaactatcacgattttcggataaccaattgaattcccccgacatctttagtatcatcatcattatatgactttaacaaaggggattattaactagtgaaatcaaaaaaaggccttacgctcaccatcaccttaggaacgttagcactgtttctaagcggttgtgtgcaaacgaccaaagctggtaaaccatacgggtttgtttacgagtaccttgcaaagccagggcaaaacgtgatggaatggttgtcacaactattcggtaacaactacggttgggcaatcatcggcttgacggtcattgtgcgactcgttttactgccaatgatgattaatcaacaacgtaaatcaacctaccaacaagaaaaaatgtccgcggttcggccacagatggaaaaaatccaggcacggcaaaaagcagcgacgactcaggaagaaaaagccgcaatcagtaatgagctcatgcaactttaccgtgacaacggtattagcatgactggtggtattggctgtttaccactactgattcaactgccaattttctccgccttgtactacgctattcgctattcgcctgaattatctaaggcgacctttatggggatctcccttgggaaatccagtctgattctagccattttagcctttttatcctacttggcacagggttacctatccatgattggtttacctgaagaacagaagaagacgatgcgtctcatgctcattatgagtccggtcatgattttatttgtttccatgtccgctcccgcaggtttaggactttacttcttcgttggtggtttgtttgcctgcttgcaaacactgatcatcaacttcttccggccacgtattcggcgtgaagttgaagcagaactcaaaaagcaccccatcaaaacaccaacaccgacgcaaccaaagccgattaatgcaactgaatccaagcctagtcatcctcgtccgcaaaataatgcggggcgtggtcggaatgccggtaaacaacaacgacaccgtaaataaccactgaagcttaatcaacactaaagcaccgtcatgaaaattctcatggcggtgctttttacgttgcacctaaccggcacgcagccgtccccttaactgatttcgcaaacattaccacgagatgccaattaacgctgccaggccgatcagatcaatttcttacttagctggtaggaataacccacggtcaaaatcacgaccaacacgataatcgtaacaaagacattgagaaatgagtctgttgacatctttcccatcgctactaacagcggtcctgagattccaaataatctgcctgctagcacattagtccgatgccagttttcttctgacaaataggtccacggaatccggattccaaccaagcgattacgagaagtatatgccatcggtaatgcgacaatcgagatgattatcgcgatcagcgcaaagccaatcgtggaaatccggttgaaatcaataagtaacaaataaaataaaacggtcaagttaatatcagcaccgagatacgttcccttgcgccagttggaattctgtttacagatcaaaattaaactaatcccaattaaaaataacccaccaaccacggccaacggtgcattacgaatttgccacatgggcccaccactggccagtttaatcactactaagatgaccaaattgattaaatttaccatgataagcaatttaaccccaagcgtctgttgccatttttctggaatcatgagtaagcccccattctaaactgctagccagataaggttgcagcgccataattattccaataccgagtcctacgttatgcgtgactaaaacacgcaatcgctgaaagcaaggatgaccagcaaattactcacccgtatgttgcaatcaataattgctcaactagttaagcgcaattatagctgaattgcataataaggggtagaacttgcccactttcaagtttgtccgccaacattccaaactaaatcaaacgtatttcgtcaaaattaatcaactttgggcagacgacacttcgagacctgaaattttatgtaaatatgcgataatggaaattaacaattcaaactcaaggaggaactcccatgaagttactacatacagcggattggcacatcggccggacgcttaacggttattctttgttagatgaacaggaagcagcgttcaagcaaattctaacgattgcattggctgaaaaagttgatggtatcgtgattgctggggacatctacgaccgggccgttccgagtaccgatgcggtcacttcacttgaccacatgctgcaggctattaatatcgagcatcacctaccaatctatgccattgctggcaaccatgatggcgccaaacgtctcaactacggtcgtgaatggctagcctataataattttcatatcaatacgttactagccgaggccttcacgcccatcgagaccccaacggcacaaatctttatgttaccgttttttgaccccattgacgcgcgggtctactatcagcaacaaggtttgcccgaaaaacaagtcaaggcgattcacaccattcacgatgcgatgcaacgcgtggttagtgacctcgttgccacctttgatcctgaaaaacggcacttgttgattactcattttaccgttacacccaaagcagatgacgacttggaattaacaagtgaaacaacttccaaagtgggcggtttggcgacgctgaccaccgatttattcgcagacttcgactacgtgatgctgggccacattcacactcggttagcctcacccgacaaagatcgaattcgttatgccggtagccccgtcaaatttaacgtcaaggaagccaaccctaagttccatggcaaaggtgttgaaattgtgacaatcacacccactgcgatcacccatgaattcaagccaattcagccgcaaactgacttggttacgttgcgtgcgccttgggaaacgttacttgatcccaacttttatcagcaacagccgttaaagcaggcttggtttgcgatcaccgtccaggaattcgaccgtagtaagcatctgaacgtccgggcgcaactcgaacaaatctacggcaccattgtcgaactggactacgaatcgaaccaccaagccaccgccattagtggccccaaaaacatgaacgaactgagtcctgatgcaattgttgggcaatttttccacgcgattactggtaaccagctctcaacgacacaacaacaactcgttgaccagattttcgtcaacttaagaaaagaggattagccgtgaaacccgtttatttagccatgaactattttggcccccacgaacattcaattattgattttagcaagctagaaagtaccccgatttttctgattagtggtgatactggggccggtaaatcaactattttcgatgccatgacttttgccctctttggcagtacgacgaatgatgggacggatggtcgggcagccaaagagatgcgcagtcagttcgcccccgctgaccaaccgacaagcgtcaccttctactttgagcaaggcaatcaactctataagattgcgcgctcccctgaacaatacttagctaagaaaaaaggatctggactgacaaaaaagaatagtacggccaaattagctgtcgttgatcacgttggtggcgtggagattgagagcattgcaaccaagccggccgacgttggtcccgagatcacgaccatcttgaatttgactgctgatcaatttaaaaaaatcattctactcccccaaaatgacttctcggaattcttaaagtcaaaaacgactgacaaggaaaaaattcttaaaaagatttttggaacgcaactttattcagactttactgcggaacttaaagcggagtatcaaaccgccagcaagactggtgatcagtttgtcgccgatttgcgggtcgcactagcctcagcaacttggaatgatgcggaacaggctcaacttcaagcagttccggacgatcaaaaaattccactactacgagcatttgttacgacgcgtcaaagtgcttttgaccaagcacagcaaacgactagtaaaatcaatcggtctgttaaagcggccgaaacgacctaccagcaagcacgcgatcgccaacaacaatttgaccggctcacacaggcgcaagctgattatcaaactaaagttgaagaacaaacaccggcaattaccatagccaagcaacagttgcacgcgttaacttgggcccagcccctacaagccaccatgcaagccctcactcaacaaacacgtgaccaaaagcaattgacgcttgaccagcaagcagctatggataacgtgcaacaagcgcaggacgactatcgccaagcgcaagctgcagttcaacaattacatgaccaaagtgaagctaaccatcagcaccagcagcgcttggaacaattggccacgttgattccacaagcgcaacgcgttgaaagtctcatcgcacagctcgcaaagctcaagccgagtgtcgctgatctgaaggcgacttttgaacagcaccaaaccgtaataaagacattaacagccaaaatcaccacccaacaagcgaacttgccatctattgatgacttacacgccactaaagatttgctgattaaacaacgagaacagttcgtcgacaccctgacaccacttgatagtcaatggcgaggtgcgcaacaagaacagcagcgcgtcaccaagcaactgactgatttacgggcgcagcttgcccgcgatgaacagaatcagcacaatgcgcaagtccaatttgaacaacaacgtggtcaacgccaaagcttaatgattgcccaattacaacaagaactcgttgacggccagccctgcgtggtctgtggatcaaccgatcattcacagatgccggtcacaaccatcgttgcaaatgaagctgacttacgacaatccatgcaagccgttgacgacgctcaaaacgcgctggcggcagccaacaagcaagtggaagcaactcaacaacgtgtcgaacaggctgaaaaagaagttgaccaggctacgcagcaagtaaccaccgcccaaacgcaactaacttcaacttaccaacagttgattgaaaccaacggactagcactaaagtcaccctacgatttgaccgcagtcagggcttttttcgctgagcaactcgccacaattacgaagaagcttgaggcagcccaacgagtggttcaagctattgagaaatatactgctgaactggaagcacaacaaaaacaggcccaacaaacggagttacagttaggcgaacaacgggccttattgcacaataaaatagccgatttgacggtagctcaggcagccattggtacggacttacaagtcacaagcgctgacctgctggccgaaaaagcgcatctcaatcagatcgtcgcgacctaccaacaacgcctagaggccgcccaagccaccgttcaaaccagtcaacttactttatcaaatcatcaaactaagctcgatgatttaaacgaccggttgaagacaacacaggccacgcgcacgcagcttgagcaaacaatcgcacaggccttagctgacccagaagcaccgactcatgaccaaactgtacttgaaaattggttagaagaactcgccaatggtcgactgaccgacctgcaagtccaaattgccacctatcggcaagacaaggagcgtctgacaaccgaaatcaagcaactgcaaaccgccttaacgaacgttgaacgaccgaatattgcgggcatccaagctcagctggccgacctgcaagctcataaggatcgagcactgcaatcccaaaccgtggcggaacaaaccttaaccgacgcgcaaagttgtctcgaaaaagtccaacaaatcatgcaccagcaaggcacatttgcaaagcggttcgccgaaattacaagcctgtataatatcatgactggtaaagatggcaacgatcacaagctcaagttagagacctacgttgtccaaaactacttgcaacgcgtcttaaactacgccaatgatcactttatcaacctgctttccaataaccgctacacatttgaactagctgccgaagcgagtgataaccgcagtgaccacggcctcgatatcaatgtttacgataatgagaccggcaactcgcgttcatctaacacgttgtccggtggtgaaaccttcattgctgctctgtcgattgcactctcgctcagtgaggtcgttcaatcttcggctaatggcgtccaaatcgacgcactatttgtcgacgaaggcttcggctccctggatgatgaaactttggaaaaagcgatgcaggcactcgaaacaattggtgaaaaccgaatggtcggtgttatcagtcacattgaatcaatgaaacgaacgattggccaacaagttctcatcaaaaagatgggggatggccgcagtaccgtgcggttgatcagtaaatagccgccgaaaacaaccgcagtacatgactcacaaggtctgaaaaacagcgacacaaaaaacggcggccgtcattcagcaattatgctggatgacggccgctgtttttgtgaaccatcccaattaatcagaccggattaaaagaaaatacccaggatcagtccaagtaattgcatgccttgaaacatcatcaaattttgtggtgccgtattaaaggtggtttctttcacctgcaccgcgttaaaggcccgaatattcttcaaaatttttggtaaaacgagcaacactgccagctgataaatcggtagtatttgtaaaacaacactcatcagcactggcaaataacctaacagcgccagcgtatcgtagacccgtagtgaccaacgatgaccaatatagtacggaaccgtataacgttcattgcgaatatcctgttgtaaatctgaaatattatcagctaacatgatattcgcaaccaagaaaatccctggtagccccaccaaaatcatgaccaatatgttctctaaattccccacaatcgcaaactgcggccaagcaaacttaaagcccgccagtacgggggtcgcgacgttcatataaacactcagaaagaaaacgccaaatccttcgacacatcccgacagtaattcacccaacgggaagcgcgaaaacggtaccgggccataggtatagaagatagccacaccaatcgctgcagcgcccatgaacagtaacaataggtttgttctgacgactagcactaatcctaaaataattgcagttgctaacatcgctagcatcaaattcaatgatcgtcgtggtgataggtgctcacggccaacaatgttataagtatcccgataatgtaaatccttagccaagtagtaatcctgcacgttattaaaccccgtcacaaacaatgcaatcgctacttgtgcaactaagtaaattaacgaattgatccaattaaacgcatgaaaataatagattgaaaataaaataccaataaaatacggcaccacactagctgccttggcatttagccgaatgaattccaaaaaaattttgaacgtcattggccgataagttggttcgttcgtcaacaacttcgccccctgattaaattaactactcttccactataccaaaaaaggttacttgtgaaaatggtttcatgatgaacataccaacaaatatcggtcagcttaaatatatttcgagtcggatcaatctgaatcaggattaaacccagcctgctggtgtacaacctattcgtcgtttaatcagcatcttactgcgccctatcgaactgtcagtcgatgctcaatattgatccaggcctccctcaaaatcacgatatgatcccataggccgcggctttaaaattcattacagcgcaattatccatactgaaaacgcacattcaagttaaattaacttgaatgtgcgttttaaattcatcaatgattcgattacctagtggtcgtgctcatgatcatccaagggcgcttcatcttcatcacgagtagctggtcggattccggctggcagttccgacttggcaatcttttcaacatcattcgtttcagcctcggccttagctaagagcttcgcgtcccgtagaatcggtaactggaaccgaaagatcgagccctggcccaccacagattcaacactaatatgaccatggtaaccttcaactaaccgttgcgcaatggataatcctaacccgttaccacccttatcacggctacgcgccttatcaacccgataaaaacggttgaaaactcgatcgagattgtccttagaaataccctcgccaaagtcttggacggcgacttcaatgtagcgataatccgtggataatgataaatggatttctttacgtcgtgtcgagtacttgaccgcattatccaataaaataatcagaatttgctcaaggtgattacggtaaatctgagcatacaccggctttttaacatcatcatcaaacgtaaaatgaaagtcggggtgaatcatcgtaaaatcgttaaatgcttgcgtcactaacttctgaacgtccgacgtctcatggctaaaattgatttccaattgttcagcacgcgataagtccaacatttcttgaactaagctctgcattcgcttggtttctgacaaactagccgccaatgattccgacaacacttgcggatcatccttgccccatcgattcagcaactccatatggccctggataattgccaccggggtccgtaattcatgggaaacgtcttcaacaaattgctgctgttgattaatatagcgttgcatctgatcaagcatatcattgaatacgactgctaaatccgacaattcatcattgcgtttaagatcgggcactcgcgagtcagtttgcggatcatcattgaccgcattaatcgtctgtttgattttacgcattggccgtaatagaaacgcagctaagaaatagcccagtagcgtggcaccaaaaatagtgatcattgtcatcacaataaagatccagatcaaattctgagtcgttgaatggtattccgccaaattatcggtgacctgggtgtaaccaatcaaacggtgattgctagccgcataaatgggcgcccgcccaactaattcagcatcacttcctcggccaatcaccaccacctgacgcgtcttattcttagagaactcatgtgcatccttgcgggatagatagagtgtgttcccgtgtggatcataaaccgtcacagctaagtttgtacgggataaggctgttaaatcagaatctgaaaagattttactttgcagcacaccatgcttacgttcactcatggtagttgccggttcaacgctcgcttcgggttgcaatttagcggccaccgatttaatggtcagtcccttcgactccgttcgtaacgattgttgcaccgttgtaacagcactagccacgttccgttgttcttggcgcaataagaggttcgtgaaactcttatagaccaataatgaaaaacaaataaaaatgagcgcggacccaattgcggtcccgagcgcccatttccattttaatgaccaacggcgccgtggtttaggcgtcacttgattcgtatcagcgtcagtcattaagaacgaatcacgtatccagtcccacgaacagtttggatgtaactcttttctcctggtcggtcaatcttgttccgtaagtaacggatataaacgtcgacgacattcgtttcaacttctgattcgtaaccccatactttgtttagtaagacatcacgagcgaggacaacgttaatattttccattaaagttaataacagttcatattcacgcttcgtcaagttgatgacttcgtcgccgcgtttaacgactaagttttccttttcaatcgtcaagtctttataagtgacggtcgtttgtttagtgctttgttgttcactttccaaatcgattcgccgcaatagtgctcgtaagcgggcaagtaattcttcgatagcaaatggcttaacaatgtaatcatctgccccatgatccaggccggaaactcgatcaatcacggagtcacgggccgtcatcataataatcggcgtattcttgacttcacgaacccgccggcagacttccaaaccgttcagttccggtaacatcaggtctaataggatggcatcaaaatcttcagctaacgctgcgtctaaccctttacggccgttatattcgacttgaatatcatagccttcgtgttttaattctaattcaacgaagcgtgcgaggtttttttcatcctcaataattaatattcgactcatttacttttagtcactcctaatattcaacttatctaaaaaccgtacgaatcagtgatttatcaccactaacctgcattaagctagtacaacatgttattttaacatgaaaacgctgaatttcctacaccccaaccagggtctgctcctcacccaaatctaattttagtgaattctcattaaattgcaatctttatgtctcatcatctgacggttcggtttgcggatgttgctggtgccactggcgaatagcagctaggcgctgttgccaggctttctcctgtccctggctagtcggctcatagtaccggtgctgttttaactcaggtggcatcgtcgtcatcgtggttaatttggccgctgtatcatgggcatatttgtaatcagaaccataacctaaatctttcattaattttgtcggtgcgttgcgaatctgtaaggggaccggtaaattacccgtcgctttgatatctgcttgcgctgccgatttagccgcgtataatgcattggacttcggtgctaaggctaaataagtcactgcttccgtcaaattcacgtcacactcaggcataccgatcaactggcacgcctgaaagactgctaccgtcagtggcaatgcctgccggtcagctagcccaatgtcctcactcgcaaaccgaatcaaacgccgagcgatatacagcggatcttcaccgccggctagcatccgcatcaaccagtaaatcgccgcgtcaacatcactattacgcattgatttatgtaacgcggagataatattataatgctcctcgccatgcttatcgtagcgcaacgacttagtattgatcagttgcgataacccggccgtagtaatcgtaacgtgcttgccatcgcggtcaccgttcaaaacagccatttctaacgtattgagcgccatacgagcatcaccattagcaaattctgcgatcaaccgtagtgtatcaggctgcatcgtaatctcaagatccggaaaccccttcggattctgcaaagcgccctgtaagacagcttctaatgcgtcaggcgtcaatgcctttaagaccaatactttgcaccgtgataatagggccgcgttaatttcaaatgagggattttccgtcgtcgcaccaattaacgtgatactgccgcgctcaacatatggcaaaaaggcatcttgttgggctttattaaaccggtgaatttcatcaataaaaacaatggtcttttcaccaaaatctcgattagcctccgcttcatccatgatttgccgaatttctttaatgccactcgtcaccgcgctaaacgtaataaagtgcgactgggtctgttgcgcaataatttcggctagcgtggtcttgccgactcccggtggtccccaaaaaatcagggatggtaactgatcttctgcgattaattgtcgtaatagtttacccgggccaagtagatgctcttggcccttgaaatccgccagcgtcactggccggacccggtaagccaacggactactactagatttatccgggttaaataatgattcttgtcgcatggcgacccccactttcgcgtttattcattactctcaattttaacgcaaacgtacgttctaatccactcaaaccaacgatcattaccgcacagccacccacagcacaaaaaaactgcgcctaatcacgcgtaacgtcattagccacagtttagttcattcaaaatgattttattgttcttcgtaccaactgtaatggtataacccttcacggtcagtccgttcatacgtatgcgcaccaaagtagtcccgttgcgcttgcaacaagttagcaggtagcacttcggcccggtatgagtcgtagtatgacaatgccgcactaaatgatggtaccggtacaccagcttggatcgctaagctaagcacttcacgtgttgattgttgatacttggcggcgatgtcggcaaagtagtcgtccatcaataagttatttaaatcaggcttcttatcaaaagcatccgtgatgttttgtaagaattgggcccggatgatacaaccagcacgccagatttgggcaagttcaccgaacttcaagtcccaaccataatgttcagaagcgaaacgaagttgttcgaagccttgcgcataactcataatcttgctgaagtagagggcttgacgaatcttctcaaccaattcttccttggctggcaagtcaacgtcagcggttgggccagctaatttcttagaagcggcaacccgttcgttcttcatcattgagatgtaacgcgcatagaccgcttccgtaataacggattgtggcacttgaacgttcaaggcatcttcggaactccacttaccagttcctttgttgttcccacggtctaagatcatgtcaacgattggcttagtcttatccgcacctaaatcatccttacgtgacaaaatgtcagcggtgatttcgatcaagtaactgctcaattcgcctttgttccagtccgtaaaaatatcggacatttcatcaacggacaagcccgcgacgttgcgcatgatattgtatgattcatcgattaactcttcatcaccgtattcaatcccgttgtggaccatcttaacgtagtgaccagcaccgttcgggccgatgtaagtcacacatggtgcaccgtcttgaggcgctttagcagaaatcttttccaagattggggcaactaaatcataagcttccttttgaccaccaggcatcaatgaagggccttgtaaggcacctaattcaccaccggaaacacccataccaataaagttgattccggatttatctaagcgggcgttacgcgccatcgtgtcattaaagttggtgttcccaccatcaatcaagacgtcgcctttatctaatagtggtaataattcatcgataacggcatcggttggcttaccagccttaaccatcatgataatccgccgtggcgtttcaagtgaagccacgaagtcttcgatcttataacttggtactaattgcttgtcagcatggtccttaacgaccttttcagttttggcaccagtccgattaaaaatcgcaaccttgtagccgcggctttcgatgttcaacgccaggttcttacccatgacggccatcccaatgacaccaatttgtggtttttcattactcattagtttattgcctcccaatttttaatacgcaactatcgtaccaaaaaacacgctgttaataaagtaaatgaccgcaaattttaaaattaatttcatataatttatcttggaaagaaattaattttcataggaccatccaaaaaggttacttacctttcaaacagcaccaactgacaaagttaaaaacaccgtgctaggcttacagtaaaataaacggataaccttcatagatcggttcgtggtgtttaggctagtgtcctcattgttattctgacgttccgcactttttttattcgtacatgcccgctggtggccacttttaccagagagacaccctagcaccactaatcctgaccagcagtccaattcaagatgcgtaaggaggcccctaatcatgtcgatccaacgactgccagattggcatcaaattgaacagcccgttgtcatttcgcttaaaacggcccgtcaccatctctggggcaacgtgaccgtttatttgggcttatttattatcgagcttctaggggcacgctggggccactcacaggccctacgtgcggatgcctttaataatttatctggaattttttcgaccgggctactcatgactggtctattcatcgccagtcgcacgcacgatgacgatttatttggcgcacccatcgcacccgcggagcagcagcaattaggaccccgaatccagcaatcccgctttcgttttgagacgatttttaatttactagccggcaccatcatggctgccattggaatcgacattattatcaaaggcgtaatgacattcgccacccgtacccccttcaaaaacctcagcagtatcgccggcttggccgccgggttttccttcgtggtgctactggtcttatgggccttcaatcattattggagtcgcaaacttaacaatgctgccctgaccgcagcgagccgtgataccttcacggacgcgttgaccagtctgactaccgttcttacgatccttgtcacggtcaagctccaccttcagtggttcgataacctgattagtatcggcttagggctatacatcctcaatactggcaccaaaatttttcgagaaagtagtctgaacctagttgactatttcgacccttaccttgaagatcgctatcaacggcgaattgctgatttaactagtgtccgcaaagtcatttttctcaaggctcattatgatggtaatctcatcatgctgcgagccacgatcgttgtgccacctcggatgacggcgattgaaatcacacgtctgattgaaaccatcaatcaaatcatgtggcaagaattcggtgtgatggaaacggacgtgatgattacgactagctattgatcaaatcagtgatttacaaaataggcgatacgtttagccggctgaccatttcaagactagttgctgacaaaatgaggctacataccgccccttttcaccagcaaccacgtggtactaatcgtcgtgctcagtttccaaaatatgaccttcataggcatcaatcttaatatcgacttgctgctttccttgatgtacctggacctcccagtaagtggtgccattgtccttatcgagcttgagctcgctagcatagccaccgttacggtcatggatggcaatcgccaccgctttactaggactgattaccttgttaagattcagccggtcaccctcagcgtcagcttgatcatcttgatccagcatctcagactgcttactgatgaccttcccggttcgcccattgagttgtaattcatgttcctgggtgccgccaacgccttccagcgtgtaaaccggtcgaccgagttggtcttctaactcaatactcgtcacactggcgtccggatattgttgctgaaactttttgatggctgcggctaatgacactttcgttttggctgtcacacttttggtcgaactactttgactgctagtcgattggcttgtcgccttattttgcgtcgactgttgggtgccacatccagctagcagaaccacggtgagtagtgctaacccgatcccatattttttgctcatcatctccataacccccttgtcgctgcgtcagtaacacttattatgaagccgtactcatatttgatagtcttagtatacggaagggagacgcctcatcgcaatcaatatgcaaagccactcgcttgaccgcgctggcagttcagtcaaaccttatttcaagaagtgctggtcccaactcaaacttaattgaagacaacaaaaaaagcccacctaagcgggctttttgatcgtattatggtaacaaaaagtttcatgcgccatggccgcaatgcaacttttcaccaactaacaattagttgtttacttttacgacttgcttgccgttgtagtatccacaacttgggcaaacacggtgtgatacacgtaattcgccacaatttgggcatggtgccaaatttggtgtagccaatttaatatgaccacgacggttgcgtttacgcatcttagatgttcttcttgctggtacagccatcaacctacacctccttcaagtgaattcacataatgtgtgttttgatacgcctagctaacttaatccttgtcttcctgatcagggaacaggttttttaacttagctaaacgcggatcaacagttttaagttctgcagcttgcaacgcttggtcgtcctcggagagaacttcccagcccttaccagttggcattggggcgccgtcttgttcagcttcagaaagaatctgcatggggatgtgaattaaaatattatcctccacagcgacatcaaaatctaaaatatcatcttcaggtaaaataattaccgtatcagtttcttcatcaaaacgactcagatcggttccctgaggaacataatattccgtcatttgaaaagccaatgggacatccactggcgtcagcgagcgactagacggcaatgttaacattgcgtcaatcttcgccgtgattaacacattatccttatcataactcgctaacccagttgcgtgaactgacttaacatcgataatttctggataacggctcatcaaggagtgttttaaatccaatgcttcatcaaactgaagtggcgtttcacggtatgttttaagctgtgaaagtgaccatttcatttaaaaacctcctaatgcaacgtgataaattatacctgtgtaaaaatcctttgtcaatgttttttccttgacagtccaaaatgcccgtcattagacctaaccatatcaagaaagcccgccgcggtcaaccaattgttaccggtaaccgccatggttgtcgatataaatcttgcgattgcccattaattaattgatagacgcgccccgcccgataatcgagattcagagcatgctggcgtaagtcttgattgattttcgtatacagcggcaacgggagctgtttcttcacttgatgcaaataagcctgccccttaggtgtgaagcctaagacgcgcagataattatgtgcctgtgctttctggacttctgcctgagtaagttgtagtagtgcggctgtcgccacccgctgcaatcgtgtatacgtatagcgttttgacttgacctgatgaataaagtcatcaaaagtcgtggcgtgttgggccatcgcctgcatccggtattccaagccttccgccatctgatcatactgtccactacgggcaacgtcaacggtcagcaattgatactgtaaaaacggccaaaagtcgctccagcgctgcagtcgttgcgtagtcagcgccgtgaacgtgtcggccgggacaactggtttcagcgccgcccaatcctgtgcaagtgccgcttggcgcaccgctgtcccactggcgtagcgactatcggccgcaattgtcgtcgtcgcgtgatccgcttggcgacgcttgatcggcagtaactgcatcggatgtgccagggtctgattggcagcgtaataacagaagctcagcatatcattggctgccgtcaacgtcacgcccgtggcagcttgcaaggccgcgttaaactgagtggcaaaagtcgcattatagtgggtaaagctgccctgccgcgccgcaattgccgtggccaaccgttgaaagtccagctcaggatgttccgcaccaaaaacaacactcgtacagtccagtgcactgagtagttcaataccaccccgtgcaaataaatgggcaggttgggttgcaaaaaacacgggcagttcaattactagatccgccccattttccaaagccagcttcgcacgtgtccacttgtctaaaatggccggttcaccgcgttgcagccaatcaccactcatcacaacaataacacagtcggcattggtcaactgttgtgcttgccgcaaatggtagcgatgcccattatgcaacggattgtattcagttattaacccgactgcttgcattcttgttcctcctactacttacgacacttgaagaaccaccgcgtggtctgatcatccggttgttggcggccaaaatcggcgctgaccgtgacatgattaaaaccggctgcctgcagagcttgttgataatcagccaacacataagtttgttcttgatgtaattcactgacctcgtcgaaggcctgcttatcatcattataaataaagaacgttaaatcgtgctcagcactgtgcggctgttcaccggcatagcttgtccacataaaagcccgatcctcatcgcgataattgtacatataaccaggatagacctcatccgtctgataaggtgtaatgacgtcgaataaaaattcgccggccgctgtcaaatgttgagccacttgttcaaatgcacgttggactgtcgtaatatcgggcaaatagcagaacgaatcagcaaaacaggtaaccgcatcaaaggtcccaatttcagataaatcgagcatatccccttgtaatagcggtaaggtcacggctgcctcgtccgcatggcgctgtgccagtgctaacatgttctccgacaaatctaaaccggtgacctgatagccggcttgggctaacaacacccctaagcgtcccgtcccacaagctaattcgagcaactgaccatcttggttaggatactcacgacggacaaaatccagccattgctggtacatggctggatcaaaaagttcgtcataaagttcggcaaacgtctgataaatcatgcatttacccattgtgcaacgtcgacgatgggcgcatcagaccataatttttccaaattatagtgtgcccgcgcatccttttggaagacgtgcacgatgacgtcaccggcatcgatcaagacccattcgcccgcagtccgaccttcgacgctcttaacgtccgaaccggccttgcgcacaaagtccacgatattatcagcaatcgcttgaacttggcgcttggaatccgcggataagatgacaaaatagtccgccatcaaactgacttccgcgacgtctaaggccacgatatcgtcggcacgcttatcgtcagcggcctcaacagttaattgtaaaagttccttgctatccataaaactctcccttaaatttaattggcaaattgaggggccacaccgccgacccacgcgttataggttgctaacgtttgtgggtagactggcgcacccttctgaatcagataatctagtgtatgttgaatctggaaacgaacaccgtcagccaacgacttggccgtcgcttcacgagccgcttcaacaccggggaagtcccgggctggttcaataaaatcggccataaagatgatttggtccagtttagtcatataaggcgcaccgaccgtgtgtaaccgcaccgcattcaaaattggctcattgtagatgtgcaactcatctttgatcagttcagcgccaacatagccatgccagaccccgttcccatacgaaaccaggttggggtccatgccatgcgtcttaatgagctgaataaatgtttgatcatcgcgttgcttggcgtagtcgtgtaataaccccgcaattccagctaactcgacatcaacaccgttgtcagcagctaactgccgcgcagtctcctcgacccgtaagcagtgttgatagcgtttgtcagtcaactgggcggcaacttttgccattagctcctcgtgacgatatggaacaatcgcttcagtatactcaatcgttttgctcatacaaatgatgctccttaatataagcggccacggcttctggaaccagataacggaccgaatgcccatggctgattttttgacgaatctgagtggaactaatatcgatcaacggtgcgtcgacccaaataaccggatattgactcgtcgttgggtacccggttcgtttgataccaacaaaggtgactaatttaactagctcgtcaatgtgataccaagtatgcaaataatcgaccatgtcgccgccaatgatgaaatagtactgcgtgtccggatgcttagctttcaaaaacttcatcgtttcgtaagtatagcttttgccaccccgctcgatttccgccgtctccaaccgaaatagtggattatcaacaatggcttcttggaccatattcgcacgatcttccaccgcaatcgtcttcttttcgtcgacatgcggtggttgagcgtccggcataaagcgaacttcatccaaacccagttgatcaccaacttgctgggccatgatcaaatgtcccaaatgcggtgggttaaacgtgccacctaaaataccaacacggcgatgcggaattgccgtcaccgtttccgtcagaacttttgtcgctgtttgattaaccgtctgcacccgtcattcctcctataacttagcaacttccaatgaatagtgctggtcttcttcatgactagctggcaagtataagactaacacccggccaattgtttgaacgaccgtaatcgcggttttctgttcaattgcagctttaacttcagccgttgtcacatcagcattttgtaaaatgttgactttaattaattctcgcttatccagcgcacccgttagttgggtcaaccattcgtcagtcaagccgtttttcccgacagcaaatagtggccgcatgtggtgggcttcaccacgtaaatagtgtttttgttttccacgtaagttttccattaagtttgatttactcctataattttctgtttgataatcgcgaatcagattctactccgaccacaactcatcaacgcttgttgatcatagctgggcgcgtcaagactgcaacaccctttggtgcccaggccgctacacgcgtatccgcagccaccgtgacccatccgaggccttcaaagacaatatcactgatttccgtcactttgaattcgtggcgaactagtggtggaaagtcagcgacagcatcgccagttgggggggtaatcagttcacccacatgcttggtataaaagttgtccgcattctcggtccgggttcggtgcaaggtcaagttattatcaacgtagaccgtcccagttgcttttaacgtatcaacaatatctaaccgtgccaccccacctaagaacaaagtttgaccgttgcctaattggaaaccctttgggcgaatctcgcgttgtggtgagactaacttcaggtcatcgcctgataacacgtgggccatctgttcaggatgaataattccgggtgtatcaaccatcatatgaccatcatccaacggaatttcaatcttgtctaacgtggtccctgggaaccgggatgtcgtgatcaagtccttcaaaccagtattgttggcaataatccgattgatcaacgttgacttaccaacgttcgtgacccctacgacataaacatcgcggccacgacgatatttttcaatcatcgccaagagctcatcaatggaatgccccttcttggcactcgttaacgcaacgtcgaccggtttgattccctgtgcacgaacttgttgattcatccattcccgcaatttcgtccggcgtaactgacgtggcaacacgtcttccttattaccgactaacaaaacgggattatccccaacaaagcgctggagaccaggaatgatgcttccattcaaatcaaaaatgtcgacaacgtacacaaccagtgcgttcgcatctcgaatcgtggctaacaaatgacgaaaatcatcatccgttaagccaaccggcacgatttcgttatagtgccgaagccgaaaacaacgttgacagtataaatcctgtgcgtcactagctaatgatttttgtaacgcactgttcggtgtgtagccggccgccttaggatcggtcgtttgaatcgccgcaccacacccaatacagtataaagtttcttctgatgtttcactcacttattaaggtcctcctgaaaatgcatttctggataaacatgtgctaatcgtaatttgataaatcgttcaaagaaacggtttatccgggtattccacgcgtccgtcttcacgattggctggactaagatactgggcacgcccgcaagatgggccgcccacatgtcggtgatatactgatcgccaaccatgaccacttcatttttgtgtaagcccaggtcatgacgcgccttactgatccccagcggtagtggtttcagtgaccgcgaaacaaatggcagttccaggctttgcagcgccttagcaattcgcgcttcggaattgttcgacaccaccactaacggaatgcacgcgtcttgtaacgcgtgcagccactttttcagttccggggtgccatccggattgtcccatgcgatcaacgtgttatcaaggtcggtaaataccgccttaatgccctgcgctcgtaactgcgccggtgtcacattgtagattgctggtatcatccaagttggtttaaattgcttaatcatcgttatccccttcgcttctcgctggattttttggttattggcataaccccactagcccattttatcatactattggtgaaataccggactaaatcaggtctggagccggatttcactaggcaattgtgctaaattttagtcatcattatataataatttgttttttgaaaataagcaacgaaaatccttccaagttgtcgtaacttgatgacaccacctggatcaaatttgactaagttgatcgcacccgcatttatttgataggttggggcccgagtaagacattgaaaatagcactaaaagtcgccagtaaattcagcgatgttttgccggttgcccttttctcgccagtttatttgcaatggctaaaccacaagttgacattcaattgtcgcactgaccgttttgtcaaattagattaacaaagtatcccattaagtgtatattaattaaagatacgtggcttttacttatatcatgatactgatatgtatattgattgcacatcaatgcaatcctcatgtaagcttattgacatggttaaatgttcagattgttctaaaactgttcatcgcagttaatgttaggcgccctggtgttgttctatgtcgataaactgacaatatcagtaatgatataaactatatgatccgcacgatcactaaacaatatgtcatctcggaggttcgtttatggagaaaaaagatgttatgaaacaatacgttaccgataaatatttttccaaggggcactggtggacgaaactttggcaaaccctagtcgcaattattacttggatctgcgttgccgtacctgtctactggactatctcgtcaacgttacttgcgaataatccccagttcattcacgcctggaaatacgaagaaggtaagacgctgttctacttttttgaccggttctttattattgcgtttaacttaatcgccattgtggtcattgtctccacgattcacaataatcaccgggtcaagcagcatatcagtaaagaacggcaatacaacgaagaccagttagatattcggaagcggcaactaaataacttttatacccaacgattcgggcaggccactttccggcaacacgtcaagcactacacggttgaccccgaacaaaatctcgatgttaacgaaatccacagattgtatgaggactagccaatggaaataatgcaaacacttaagccctttgaaagtatctggaactttgttctattactattagtctcctacccaattctcggtgcatttgcctggtttatcggtgtactctgctaccagctgatttaccgccatcgccacaaagacgatattgaatttcaaccgctaacgcctgaagaacaaccctttatcacgatcatgattccagcgcataacgaagaagtcatgattgaacacacaatcaactatttaatgaacaatttaaattatgaaaaatatgaagtgctggtcacagacgatggttcgactgatgagaccccagctattttagaacgtctccagagcgtgtacgacaacctacgcgtggtaacaatcaagaaaaatcagggtaaggcccacgcgttcaacgtcggtgtcggctttgcccgtggtgaattcattttaagtaatgacgctgattccattccagaacccgatgcactgtggaaatatatgagttacttcatgggcgaagaacacgccaatacggcagcggtcacggccaacatggacgttcagaaccgaagcacgatcatcgctaagtcgcaaaccgtagaattttcaagtatcgttggtgttatcaagcggagccaagtcagtgctttaggtaacatgtatgcctatagtggtgccaatacaatgtaccgtcgtgacgctctgattgacgtcggcttattccggcaagatcgcgcgaccgaagatatcagtattgcttgggatcaccagttgaatggttggacgaccgttttctcgccagacattctattctatatgaacgtccccgagaatctagacgccctttatcatcaacgcaaacgttgggccaaaggtggtaccgaagtgctgttgaccaactttaaacgggttgtcagtcatcccggtaagtatttgaagcaatgggcttttattactgatcaaacgctgagcatcatctggtccctattcttctttgtctcaacactgatcttcctgatctcgctcgtcaccttcttctttactggcaattacgagcgcgtctatcatatgttctgcatggccttcatcttcgtgaccttcgaaatgttcgccggcgtcttgcagctattgtccgcattgatcgttgacgaccgtggccgcaagtttaaatatctgattttcatgccactctacatgctgatttactggcaggttaacgccctcgctctggtcactacgctgattccagccgttaaaaccatcctgggttacggcagcggcacctgggtcagcccagttcggaagcaccacactgaataatcgagaacacaaagtgagccttcaattgaaggctcgcttttttgttgtgcgggactgtgtggagacggacccaaccttgcatgtgcgagaataggctagttagcaacgatttgagcgcttacaattttactattcttcatgtatacgaaagtggtgttataacagctacaatcacacgtactaaatagatcaaaaatcatttttatccagttacctgcaccctcctaccgcctaatcgatggccgccgacgaagtatcaacgctggcttagttgcctgtgcgcgttggacggttgctcgagctagttcatactgtgcgtcaataattcgttcagaatcatatggcgcagcatcctgagccaccgacaattcggtgcagccgagaatgacggcgtcacaatcagcagcattcaataattgatcaattaagccatgaaatttgacccgatctacaaaatcacgttgcttgatgtcgtcataaattaaggtcatcacttgagcttgctgctgcttattgggtatcacaggaatatgtccattagaccgaataagttgttgataaagttgcgactctagtgtccccgttgtcgctaaaataccgattcgtaacggtcgcggttgctgtgatcgacaggctgctgttaccgctaaggccggcatattcaaaattggcacgttagaaagcgccgtcaatgcgggaatgaagtaatgtgctgtgttacacgtcatcacaataaacatgacccctaattgattaagtagctgcacatccgcttccaatgatggtaacgggttggcacagttatgatccaaaatatatgcggtgcgatctggtatctcagcatcatttaaaatgacgtagtttaaataatcctggtcacgatgggtaacggtcagccggttcacggtatgcacaaagtcctccgtcgccattgttcccatcccaccaatgattccaaagcaatttttcataatggcacccccatttagcgaacgagattcacggccatgctgcacttcattaagttgttaataattatctaacatgcacctcctaacaagcaactaatccacaacctatctcagacttaatacggtatcattgcttactgcaaacccatgattattcaagaaatgctgccaaacagtgatctatcggtgtactttttacgtcagactcccgttttattagattagaaaacaactaggctagtaaagaatcacatcaattctttactagcctagttaaacagtcactattaatgcgagcaaggcaccaagcacaatcgcccctaacaaaaccgacaacaattccttgaaactcacactatgcccgttctcacattcctattgacgaggttttccattcactgaattatactgtcggccccacgtctccatagccataatcaccggtttcaaggtctgaccaaatggcgtgatccaatattccgttttcggtggcacgaccggataaactcgttttgcaatcaccccgtcttgaaccaattcttgtaactggcgagctagcatccgccgcgaacaacccggcagtcgtttttgcaaaatgctgaaccggcatgttcctgccgtaaataaatgatacaaaatcacgctcttccacttgccggcaataacttgcaaggtactttcaaccggacaacccggcgtacaatcgtatacttgtcgctgcatctaacttcccctaccttaattaagtgtcttgattgtagcacaactaataggcgtgacaaatatgtccctatgtggcaaataattcacgtcttgtttattcctcactggtaacctatagtaatgtcatgaaaggggtttgattaataatgcatgcaattggttttaccgaccacttacctattgaagatcctgctagtctacgagacgtgacgattgcaaaacctagcgctcaaggtcatgacttacttgttcaagttcaagccgtcgctgtcaatcctgttgacgttagcgttcgtaaaacggggcatgagcacctcatgcgacccaagatcctcggttgggacgccactggtattgtgaccgctgttggagaagctgtcaccctgtttcaacccggcgactacgtcttttatgctggctcatttagacgtcccggctgcgacagtgcttatcacctggttgatgaacgccttgtcggtcacgcccccgcgacattaacaaccgctgcccgtgcggccatgccacttacttcgctgaccgcatacgaggcattatttgaacaacttcacattccttttgacccagctaaacctaattccgaaaaatgcaatcaaaccattctcatcatcaatggcgctggtggtgtcggttcaattgctactcagttagcaaaattagcggggctcacagttattagtagtgcttcacgacctgaaagtatcgcttggacgcagcaacacggcgccgatttagtcgtcgatcatcatcatgatttggttagtgaagtacatgctttaggtattaaagatgtcgattacatcctcggattaagcgatcttgacagtcactggaatgagatatgtacgctcattaaacccggtggccacatcgcatcaattaccgaaaatcggcgtccaatcgaccttaaaaaactaaccaagaaacgcgggacatttgcttgggaatggatgtactcaaaatcctactaccacacggccgacatgattagtcagcacgatatcttagaaaccattgccgatttacttgaccgtggcttgcttcaaagcacgctatcgcagacactacggccaatcaacgcgcttaacttgcggcaggcccatcaacttatcgagcaacatcatatgattggcaaggtagttattgaaggatggaaatgagttgacgggtattacggctcgcgcgataatgatcaactttaactcgccaaatacgctgtccttttctgtcttttagtgcttacaactgatgttgcactccccgggattcgtttaatctgttttccgtatacacggggggtaattccaagctattaatctccccaagctgactcaataccatctacgaaacaatatcgcctttctcattcatcaacaagcatgaaaacttaaatcaatacaccttcaacccatcactcgagccaacgtcaaacctatggtatcagactcactcatttcagcatcgttccccgctaacctgccaaactttctttttcagtttccaaaatattagtgctatgatgatagcatcaatttgactaaaacacttaatcagaaaggactttgaaattggcatttaaaacaccactggctgatcaaatgcgcccgcaatcactggaacagatggtcgggcaacaggatctgttgaaggcaggccagccattacgccagattattgatcaacatgttaatattcccctcattctgtgggggccgccgggaactggcaaaactagtttggcgcagattattgcgagtcaagacgattatccattcgtggcttttaatgcttcgaccgaaaataaggcacagctgacgaaagccatcgcacaatacccagagcaatcgtttgttctattaattgacgaaattcaccgaatgactaaaacattgcaggattttttgttgccctacttagagaatgggcacgtgatgctaattggctcaacgaccgaaaatccgattatgtcaatcgttccggccattcgttcgcgctgtcaaatttttgagtttcaaccactgagcgatacagatatcgagattgctttacgccgtgcggtaaccgacatttacaacctaaccgacgatcaggtagatgctaaagccctcaacctgatcgctatttcggccgaaggggatctgcgaattgcgttaaatatcttggaaacgctccacgctattgaccagaagcaaatcactgttgctgcggtacaacactttgcccagcaacagcattttagctacgaccggaaggcaactaagcattatgactatctgtcggcttattcggattcgatggctggctcagatactgacgcggcgctctactacttaaccattttgttaaaaaatgatgacttaccctcagtggtccgccggctacgtgaaattccatacacttatatcggcttagctaacccggaacaggtcacacaaattgtggtcgctgccaatcaagccgaaaagattggcatgcccaaagcaaaatatccactaatgtttgccaccatgctgatgtgcatttcacccaagtctggttcgtttgaccaatcttgggaaaaactagaccaggacacacaaaatccaagtcagcaccccatgccccgtggattgcgcgatatgcactacaaacactccgaggaaattacaggtggtggtctgatcgataatccattccaaatgccacatcagattgcccaacaaaactacatgcctaaaggattggctggtcgtcgttattattaccctaaagataatgaaaatgaacgcaaactcggtgcacaatacctaaaactgcatcgctttatttataacgaagattatcacgaatagacaatggcagactggcttaaccaatcagaaatcacactcgattttcataaatcagagtcgcgcactaaatggctcacttaggccgttatccacgtatactccaagcggcatcaaaaaatggactcagtcaaatgaccaagtccatttttatttggcatcatcttttatgaatcagtgcacgccagagaccaagtcaattcgcgtcacactattatgccaaagttcttgggccgtataaacatccttttcgaacaacacgacagtgccatccgattcaatccgagcattggcacccaaccattcccaagatggcattaaccacaaattgcgccgctttcccttaccctttttgggtgaccacgcagaaacatagtcatcaatgaaatgtgtacgcatgtatcgaaactccccattatcaaactcaatctgcaagatgttggcgcccatccagaccttaactgctttaggtaaaactgttgccatggtgacaccccttctccaaagctcccagctaaataattaatcaacacataagtaagcgcttacatcattactatatcacaataatgtgtcaaatcaatctcaagattcagtaaggacgtcaacacaccgaaccatcttgtccaggaatcgtgccccttaatcaagcgtcaaaacaaaacgaccgccacccatacaggatgacggtcgttcaaacattagagcaagccctaattaagttttaaattaagcaagtgcctttttagcagtgtcaaccaatgccttgaaagcatcagcatcgttaacagctaaatcagctaacatcttacggttaacgtcaacgttagctaactttaaaccgtgcattaattgactgtagctgatgtcgttgatccgggctgccgcgttgatccgggcaatccaaagacgacggaagtcactcttacgccggcgacgatcgcggaaggcgtataggtatgacttcattacttggtccttagcaaccttaaattggatgtgcttagcaccacggtaacctttagctaattttaaaatccgtttgcgacgtttacgtgttacagttccaccttttactcgagccatgttatttcctcctagatttaactaaaacgttgtgaattatttttgtaataacttgtggtatgtcttgaccattggcttttcgataatagccgtaccacgtaattggcgacgttgtttcttagtcttaccatggaaacgatgactagtaaaagcgttggcgctcttaatcttacccttagcagttaccttgaaacgctttgcagcagcgcggtttgtcttttgttttggcataatcaataatcctcctagaaattacttatctgtttttggtgctagtactaggaacatactccgaccatccatcttaggataggcttcgaccgtagaaaattccttagtagcttcaatcattcgatttaagacttggcgaccaatatccttatgggtaatagcgcggcccttaaaccggatggagacgcgaaccttgtcaccttttgacaagaacttttcagcatgtttcagcttcgtgttaaagtcattggtgtcgatagctgggctcaagcggacctctttgatgctgaccactttttgcttcttacgggcttcccgatccttcttttgttgctcgaaacggtacttcccataatccataattctggccacgggtggtttcgctttcggcgcaaccaatactagatctaaactagcgtcttcagcaatctgcattgcttcttgtcgtgacttgacacctaattgttcaccatcgctggcgatcaaacgtacttcgcgagcacggatgccgtcattaaccattgaatctttagctatggtaattcacctccgaaatattttagagaaattcacaaaaagagcgggcgcatagtacgcccgctcaaccccgttaatgggaatcaattcatcgttcatctgcccgatgactctggtcaccaaggcgagaagcgggtgcttctgcttttttctcaactccaatatattaacaagaaccacggcccttgtcaacccatcaatcaatattgatgccattggctgttaattatttgcttgcaccacgactgtaatgcttgatttcttgcgtgatggcaccaatgaacatgtcaacggcttcggattcagtccgttcttcaccgtacttccgaactgaaacactcccgttagcaacttcttggtcaccgacaactaacaagtatggaaccttcttcgtttgtgattcgcgaatcttgtaacccatcttttcgttacggtcatcgatacttacccgaacaccttcagctgccaaacgacgacgaacggtttcagcgtaggcaccgtgcgcaccattgttaactgggatgattgttacttgcttaggtgctaaccaggttgggaaagcacccttgtaaatttcagttaagtaagcgacgaaccgttccatcgttgaaacaagaccacggtgaatcataactggacgatgttcttcaccatcagtaccaacgtacttcaagtcaaagcgttctggtaacaagaagtccaattggatagttgataaggtttcttcaccaccaagggccgtcttagtttgaacatccaacttaggaccatagaaagcagcttcaccttcagcttcgaagtaatccaagcccatatcatccatagcggacttcaacatcttttgactgcgttcccacatagcgtcatcatcgaagtacttttccttgttttcaggatcacggtagctcaaacggaaccggtaatcagaaatgtcaaagtcttcgtatacttcaaccatcaaactcaagatttttttgaattcttcttcaatttgatccaacgcaacgaaggtatgaccatcgttcaaagtcatttcacgaacccgtgataatccagttaaggcgccagacttttcgtaacggtgcatcatgccgagttcagcgatccgcaatggtaattcacggtatgagcgaatgtgatggttgtaaatctggatatgtgatgggcagttcatcggccgtaattccaattgttcgccgtcacccatgtccattggtgggaacatgtcctcacggtagtggtcccagtgaccagattgcttgtaaacgtccaagttagctaaaactggcgtgtatacatgttggtagccatttgcaacttccttgtcgataatgtaacgttcgatttggcgacgaatcgttgcaccatttggcatccagtaaggcaagccattcccgaccttaggatcaacgaagaataagtctaattcgttaccaatgacccggtgatcacgttcgcgggcttcttgacgccgcttgaggtcagcatctaagtctttttgctttaagaaggccgtcccgtagattcgttgtaacattggattgctggacttaccttgccagtatgcaccggcaacggataataacttgaagaccttgactttccccgttgaagctaattgggcaccgtcagataaatcaacgaagtccccttgcttgtaaacaacgacttgatcattgttggcagcggcacgttcgttaactaagtcttgttggtaagggttgtcaccaactaaagctaaagcgtcagcctttgataagacttcgcgttcgattggtaaatcttgtttgataattgcagccatcttatcactgatggcttccaaatcatcttcactgacttgtttaccgtcttcgtcaggattgtcggtatcaaagaagaaaccgttggcattcccttcaccactcccaaaatgaatgttagggaataattgtttaaccgcgttagctaatacttgggcagccgtttgccgtaaaacattgaggccgtcttcactatcagcagcgataatttcgatactaccatcggttgtcagtggttggcgatagtctacgatctgatcgttgaacttaccagcaaccgaccgtttagccaatgaaggactaattgactttgcaattgcttccgtcgttacgccggcatcaaattgcttttcagcaccatctgggaacttaacattaatacttgccatatacttgacactctccttaaaatttacccactcaccaaaacaccgcgccgggacgacaaaaaagtccctaatgccagactgaactagcattagggacgtcattgacgtggttccacccgatttttcagtgtcatcaaagacactgactcattagcgctaataacggaagcgttccggctcaattgagcatgttcacaaaagtggtatcttcgtaaacccggtccaagacttccagaacaaggtcttggtctctgcaatccatggtaaacaaagcgtgtcttttgcatctgttttcattaaaccacttttaaactaaaagtcaactcttgattttaagcatcgggattgagtcgtcgattacgaccgaccatctcaatctcactcgcaaggtaacgtacccgttgcatgattcgctgcgctttgactggttcttcatcacccttttgtgagagcgtcaaataaccatcttgcaattcttgcatcgaaaaattagacgaaaaacaagttggcagttcctcctgcattcgatactccagaataacaccgagcacatcgtcccgaatccaagtcgacgaagcatccgcaccgatatcatcaatcatgagaatcggtgcccgtttaatcgcatcgaccttatccgccgacgtattgttactaattgagcgcttcatctcgaccgcaaaactcggaaaatgaatcaaggtcgtattgaaacccttagcagccaacgcgttcgccatcccaccgagtaaataagttttaccgacaccaaatgagccgtagagatataagccccggtgaaaacgcttgggcgcttgtgtataggcatcaataaaatcaagtgctgccattaatgctgtcgcccggtcaccatcttgatcatacgtctttaagtccgccgtctgaatatttttcggcatgctgattgatcgaacccgctgttgcaatgcgtgagcagcttgctgttcttgcatttgtggtgttggctgataagcaatgtcaatcaagtgattactcatcactaatgtcggctgatacccaggtgcttgagttggctcgtgccgcgcaattttacgtttctcttcacaaaattcatataatttagccgctgaacgttctagcgcatccgaagataattcgttttgatgagcagctaaaaactggcgaacatctggatcttggtacacagttgtcattaacgcctcataccgatgattcaagtttttccgattcattaacgtccggagtgtttctgagatattctccatgttttagtcctccttttccgaatttgtctcaagctttgctagtcgatcagcaagctgtttgcgttgggcagcagtaatttgtttaccggtctgagctggttgcttaccactctcagtctgttgctgttgttgggcccactttggcataatctccttacgcgtcggtcgattgttcttgcgccgtgttggtgttgatttcggctgtttacgttgcttcaaatatatcaaagccgcttccggcgtcgtaatgccgtgttgttgccaatcattggcgactgtttctagcaaattacgattaagggcagctaactcccgattttgcaataagtagtagatcaccatgttgatgacggcattgggtaataccccccgaccaattaaatcatgaactagccggttctcaccgctcgtcacaaaaccatgtttctcctgcttcaaagctgataaaaagtcatacggcactgtctgcttagcatacgtcacgagttgctgctcagccgttgagagctgtgctgaagccttgttatccttagtggtcgtcgttgcaaccgttgcttccgtagcgacctgctgactcgaaactgcgggccgttcatagcgccgcgcaatcaataatttcaattgattttcatcaaactgacccgttgttaaactagccacttcactgattaacttagccatctcaatctcactgatgccgtagacccgactttccgtaatgatcagttgccgtgaactcgcaacctgtttgagatcaacatagttctgcttcaaaatttgccccaacagttgccagtcaaagtcatcgtcactgagcacgggcgagtgatcctcggccggttcattggccgccaattgggcgcgcaccttttgcactgaaagaggtggcgtcgtaactttttgactatcaacgtgaaacacatctaagatatttgccgtcacgtctttggcagccgtcaagtcaatcggctgtgctgcaaaatcgccagcaagttgttgataacgtaactcaccgaccgtatctaacaataggacactcaatagatcatccgcaaagaattgtaacgccagtaatggtgcttgtaattgataaatgtacatggcacccaattcatcttgttgataatagctgcgcaacaagccagttgcttcaagtttacgccgagccgctaacaccgtcggcaagtccacatttaggatgccaagcagttccgcgtgactgcgtcgattgctcagctcattctcgctactctgtaagctacgtaacgccgcgtacaagctatatgccaatggccccatcagtggcaagtataattccgccaatacagcttgttgcgccgcactgagcgctggtgcttgcgggaccactaacccagttttgggtgttaagggttcatcatttggcatgttgttcaccattctttttcactaatctttttttcgtttaggtgcgtgggtcgtcttcgctgacggttttgccagtttgaccttatcacgctccatcatatcttggagttcattcaagaagacgtgcatatccttgaattgccggtaaacactggcaaaacgaatgtacgaaatttcgtcaatatctgccaattgctccatgacatactcgccgataacttggcttgaaatttcattttcgcccagtgaccggaccttattttcaacatcatcaacgacgcccgtcatggtttccatgctaacgggtcgtttctcggccgagcgaataattccgcgcaagactttttcacgattgaattcttcgcgggcaccatttttcttaatgactaataatggcgtggcttcgacccgttcaaatgttgtgaaccggaacccacagttttcgcattcccggcgccgtcgaatcacgcgaccatcatcagttggtcgactgtcaaccacgcgggagccattatgatgacaatgtggacattgcatagacttctcaccccttgtaacaactaacaatcagtttttctttatttagtaatagttttcagccattttaacacggctgctttagttttatcaatgttaaccccgttatcaatgacaacgtcagcccttgcgaccttctgtgcaagtggcatttggctgtcaattcgtgcctgagccgcctgttgcgataagtggttacgtgccattaaccgctgcaatactacggctggtggtgccgtcacaaccaacacttgatcacaaacatgttgccagccactttcaaataacaacggcacatctaaaataattgcgtcgggctgttgctggtttgccgcgacaatcgcttcgaacatcgcgtactgaatcggtaaccgtgtaattgcggttaaggcttgtaaagcttgagcatcgttaaaaaccaactggccaagccatggccgattcagccgcccgtctgccagcactgcttgctgaccaaagtgcgccacaatcttttgggtcgtcggttggcctggcccttcaacctgccacgcgattttatccgcatcaacgattggtaacttagttgccagcagcttagaaacagtcgacttaccagtggcaatgccaccagtcaatccaatcagctttgtcatcttgatcacctacaaccgttgttctaacggacaaaaatgggtccctcgctgtgccactttgattttctcaataatcgtgccacaccgttcgcaaggttccccttcacgaccatagacgtgtaagtgattttgaaactgaccggcctcaccaaatgccgttgaaaatgaatgaacagtggtgccgtgacctttaattgccatcgccatttcatcaataatgttttggcgcaatgttgcaatctcatcagtagttagtgaattagcaggccgcattggatgaatcttactcatccatagcgtttcgtccgcataaatgttcccaatgcccgcaatcttactttgatccaacaatagtggtttgatcatctttttcgacttgccaaaagtggccgtcatataagccagtgttaactgttcagcaacgggttccgggccaattgtccgcaatcccgccaccgtgttttcttcaccggtcggcacgagcgtcattcgcccgaacttacgcgtatcgttgtacaacaaatcacgatcatcggtcagatggaagatcacgtgcgtgtgtttaccttgatcttcaccacgcggtacaacattatacttgccttccatccgcaaatgcgacaccatcgtcagaccattgctaaagcgaaacaataaatacttcccccgccgatcaatggtctggatcgtttggttggctaaacgctgtttgaaactatcgacatcattattaataattttcggccaaaaaacctcgatactagcaatcgttgccccgctaaccagacgatttaagccgcgacgaacagtttcaacttcaggtaattcaggcatggtggttccccctattttgcatcgtaccaagtatcaccgtagtggctctcaacctttaacggtacggctaactgtacggcggaatccatcacgcttggcactaatttttctaaaactggaatttcttcttttggcgcttcaaaaatcaattcatcatgaacttgtaacagcatggttgctttcaaacccgcagcctgtaacttatcttgcatcttaatcatcgcaatcttgataatatcagccgcactcccttggatgggggtattcatggctgtccgttcagcgaatgagcgttggttgaagctcttggaattaatatctggcaagtaccggcgtcgatgtgaaatggtttccacataaccttgttttttcgccgtttggacaatttcatccatatactttttgacacccggatattctttgaagtaagcgtcaataaagctgcgagcctgtttacgcgtaatgccgatattttgtgacaagccgtaatcactaattccatagacgattccaaagttaaccgccttggcttgccgtcgaatatttggcgtcacctcttcagctgagttcaaatgaaagattcgcatggccgttgcggcatgaatatcatcacccgctttaaaagcggcctgcatattttcatcatcagtaatatgcgcgagaacccgtaattcgatttgcgaataatcagacgagaaaatctgccaaccttcatgactaggaacaaaggcttgtcgaatcttacgtccttcttccaagcgcaccggaatgttttgtaagtttggatcaacggacgacaaccggccggtttgggtcaacgtttgcaagtagcgcgtatgcactttttgatcagcagaatgaatggcatctaacaaaccgacaacgtaggtcgattgaatcttcgaaatctgacgatattgtaaaatattagcgacgattggtgcttccggtgctaacttttctagaacgtctacggcggtagaataccctgtcttggtcttcttgattacgggtaatttcatttcttcaaacaagatgtgacctagttgcttaggtgaattaatattgaactcttcaccggcttcttgataaatcgtctgttcaatttcactcaaccgttctgtaaactgactgcccatggctttaagtcgactgctgtcgaccgtaatgccggcgatttccatctgagctaagacattggccatcggtttttcaatatcatcgtaaagttgatcctgctcattagctgccaattcctttaataactgtggcttcaaactagcgatcgcggccaatttccgggcgagatgactaaagtagacatcatcatcttcaggaatggcacgcttaacgcccttaccataaacggtctcgtcactcggcaagtcagtgtacccgtgttgctcagctaaacttcccaagtcgttactgttatcatttgtatctaataagtatgaaacgagtaagagatcaaaatcgactttacctagctgaatacccaaacgattaagcccgaccgtcgtgcgtttcatatcaaaaacgtccttggtaatcgttgtgctactcaagagatcagccacagtcggttgcattaataattccacatcccgactgatgtaccagtgatcatccgctccgatggcaaagccagcaaaggccgacgtgtggtagttcggcgttggcatctccaaataaaagtccacgtgatcggtaaattgttgcaattccgtcaggttagctttcgtcaagacggtataatcaatgggcgttgctggttcgtccgactgtaggtgtaatttcttcaaaaatgattgaaagtccatcttctgataaaacgcggccagctggtcaagatccgggccatcataggataaatcagccaattgaacatcaatcggcgcatcccgcttgattgttgctagcaccttagcctgcgccgcttgttcgcgatcctcaatcagatgttccttcatcttgctctgcttcatggcatcgatgttttcataaatgccttccatcgtaccatactgtttgagtaatttaagggcggtcttctcaccaaccttggtgacacccggatagttatccgaggtatcacctgtcaaccccttcatgtcaataatttgtgccggtgtgatgcccagcttttcttcaacgtgcgccggcgtatagtgttccacttcagaaacacctttaacggtcacggccaccgtggtatgctcggtcgtcaactgcgtcaaatcacggtcaccagtgacgaccgtcgtggtgtagccggtttgatccgcttgaccggccagtgtgccaataatgtcatcggcttcgtagtcttttaattcataatgtttgataccatacgcgtctaatagctgtttgatatacggcatttgttcagaaaactcactaggcgtcttagcccggccacccttgtaattatcgtacatggctgttcgaaacgtggtcttacccgcatcaaaagccactaacatatccgtgggttcgactgccttgatcatgtggtcaagcattgtattgaagccataaatggcgttggtatgcaggccgtctggattcacgaaccgttccagttgactatgcaacgcaaagaacgcccgaaatgccacactgttaccatcaatcagtaataatttttttgccattagtttgctccccatctcttaatttaaatcatcatttttatgaaaatccgtcactcagaccattaataccactcgattggcggtctgattcgcagcgcctgtcagtacaggctgaacgactaattatttacccttataattgtaccaaacaattaagtaaaacgggagttcggtccaccgaaaacccgtgaaataactcattttcggtaaattaaaaggattatgacatcttggtcataatccttaataattatcttaatgattagtcgcggcttgagccaccgaagatttggacgaagtagaggaacaagttaacgaagtccaagtataattgtaaggccccagtaacggccaaaccagtcgatgaaacctggtcaccatattgtaaatacatgttgcgcatccggttagcgtcccacatggataagccggcgaagatcaatacaccaatgtatgaaaagatgtaactaatcatggcactttgtaagaacatattgaccagtgaagcgacaaacaacccgattaaagctgcaatcaagtgcgtcccaatacgtgaaatatcacgcttagtcgtcgtcccaatcaccgccatggtcgcaaatacagctccagctgcaacgaacgcaccggtgataacggcacccgtgtataaggacaaggtcactgacatttcaaccccaaagatgatggcaaagagcatcagtaaggtgaagctcatcgctggattgcgtgtcgcgttgacttgaatcccaccaatcatcacaaacatgctgacaatgaagatcatcaagaagatgaatgggtgttgtgaaaaggcggcattaatttgtgcttggaacgtggtcatcgctaagtaaacggtaaaggccgaaactaacacggcgattgtcataaacccatacattttagttaggaaactacggaggccaacttgtgtgttgatggtccgtggttgtgggtcattttgaaaattgttcataaaatccctctttcacctaaaaattgactactcgttactttttccgagttaagattaaaaattgagtttgtgcatcgttactaacgcagactgcgctagtaacaacaccacactagtttgtcaatcatttgcctatgactagccatctcaatcagtcacctcaactttcttaacttaagtctatcaaattagtcaaagaaggtaaaatagtttgtgcctgtgaatttaataagaatttcttatgtctaagtgaattccattcaatcattgtctttaatggattaccgctacattaggattttccggaatgggacaccataagcgtttataatagaacttcaatcggtaggactttttgcgggacatccggggaagattttttaggggcgggcggcgtcatacataacttcttattatttaatgtacaaagcattgattagttttagcatgttggaaactacaataaaacactaaatctagccattgtcttgttaattgttttctgaagcagcaataccctgcaaatatcgttgtcgcaatgcagctaccttaacctcaacaacttgattatgattaatccgtgcaaaagcttctgtttcactcattaaccgcttaatcaatttatccgaaagttgttgcttaacagcattctcggtcgctaagtatttcaatcttggtaagtaatacgtgacatgttcatctgagcaaagcgctaccccatcatctattagacgattacttgtgacgaaatcaccactaattgcgtaatactctgccgtataaaagattagggttaacagccgtaagtaatcatttgcatatcctgatgagccagcgtgctcgacatagtatcgtactctcctgaaataaaattgagctttctcaggctcagctaaccggccatacatgacacccagaccgacataagctagcggtgtgaaaattgtttggtgagccctatccaaatcatcaacgatttgcgagaaggaaaaacaaatatcactggctgttccattaatcaacgaacttagcatgccacataaatagtaatattgcatccgtgaaggtaccgcatcaatttgctcaactttcaggtctaccaatgattgcaggactgattgataatcttccatcatcagtcgtcgctcaatctcatcaagttgctgtcgaatttgggtcactgaattagcctggttttcacttagatcatcaactgtcaatcccagacgagcgcagagctgatttaaaattgctaatgctggtactcgcccacgccgttcaaacttacttaaagtcgcctgcgtacaaattccgtttgataatttgacttgtgaaatttttaaagcttttcgccgggcaataaacttttcaatatccatcgcacaccaccttgtctcacccgttagccatgaatgccaagggcaaccttagcaaaacgactcattttatcaattccccaagcaggttcccagaccaagtcaagttcacaattcttaacaccatccacactcataattgcttgattaatttgacttgccaataaatttcctaatgggcaccccatcgtcgtcagcgtcatcgttaccgtgcagctaccattatcgtctacgtcaacaccatagatcaaaccaaggttaaccatgtcaacgcccagttctggatcaatcacctgctctaacgacttcatgaccgcgtcttcaacgggtgagagggccttatcctcgccaagttcgtctgccattctgccacactcctgtctgtttaaaactgtttttaattataccattgttagaatatacgttaataatcctaatttataataaagtacgtcgccaatattaacgaaaaggcgaatcagcatgataaaaacactaaccgagatacaattttaaattactacaattatcaaccatcctagctggcacgattataatggctaacattcatcaacaatcatttaaccaaaaaactcgaatcgcaatctcgcatgccactcaagttttattttaacatcagcttaaccaatcccccttactacccgattgaaccttccatctcaaagctgattagccggtttaattcaacagcatattccatcggtaattgcttcgtaaatggttctacgaatcccatgataatcatttcggttgccttagcttctgaaattcctcggctcatcaagtagtagagctgttcttctgagattttggacaccttagcttcgtgttccatcgcgacgttagcactgtcgatttcattatacggaatcgtgttggaagacgactggtcatccatgatgatcgtatcacactcaacatgcgctttggaaccgtctgaatgcttggcaaaacgcacggttccacggtaatcagtcgcaccaccagtcttagcgatggacttcgaaacaatcgaactggaggtattcttagcattatgaatcatccgagcaccagaatcttggtggatgccattgctggcaaccgcgatcgataacatggtcccgcgggcaccttccccattcaaataaacgcttgggtacttcatcgtaaccttcgaacctaaattcccatcgacccattccatcgtggcattttcggccgctgcagctcgcttagtttccaggctataaacattgtcagaccagttttgaatcgttgtataacggcagtaagcgttgggctcaacattgacttcaacaacggccgcgtgcaaactatctgaagaataattaggggccgtacacccttcgacatagtcgacactggcaccatcttccacgataatcaaagtccgctcaaactgacccgagttttcagcatttaaccggaaatatgactgaattggcgtcttcgtctggacacccttaggcacgtaaatgaaggacccacctgaccagaccgccgcgtttaaagccgcaaacttgttatcggttggtttgacgagtttcccaaaccacttcttgaacagttctggataatcgtgaagcgccgtatcggtatcggtaaaaataatacctaacttttcaaaatctttacgcatattgtgataaacgacttcagattcatactgcgccgatgaaccggctaagtatttccgttcagcttcaggcacacctaaccggtcgaacgtccgcttcaagtcagctgggacttctttccagtcacggaactttttatcggtcatcttctgataatacagcatgtccttcaagtcgagtttcgtgagatccgggccaaacttaggcatcggcatctttaaatactcatgataggcatttaaccgataatccaacatccattgtggctcatgttttgccgcggaaatttcgcgcaccgtggcttccgttaatcctcgcccagttgaatatgctggtttgacatcgtcatgaaatccatattcataatcacggtcatttttgaccacgtcaggtacttcactcatacttctgattcctcctcattgccattttcagcaagcaatgcccgttgcaaagcccaccaagctagcgtggcacatttgattcgtgccggaaattgcataatattcgataaaattgcggcgtcttctaaggcatccatatcggcctgcgggtgttgcttgccaatcgccatatccgaaaatgtcttagccattgccaatgcctgttctttcgacttacccatcaccgcatccgtcatcatactggccgatgcttgactgatggtacagccctcacccgtaaatccaatatcttcgatttgatcatgcgcatccaattgaatagccaaattgatgacgtcgccacaagttggatttttcaacgtaatggcatgtgttgcgtttggcaacgcatttttatgatgcggatgatcaccatgatctaaaatcacttcgcgatataagccacttaatttagacagtcccatgttcgaaaaactcctttgttgcttggagtgacgttaataattgatcagcgtccgcttgtgtattgtaaatgtaaaaactagcccgtgcagttgctactaagccgagcgctgccatcaggggttgtgcacagtgatgacccgcgcgaacggcgacaccttccatatccaacgcggtagccgcgtcgtgcgggtgcaaaccgtcgatattaaaggcgatgacgcccgtatgatgttggggatcttggggaccgtagaccgtgacaccaggcattgcaatcaacttaggcaataagtaattgactaattgctgttcgtgttgctgaacttgatccataccgagttgcgtcaaataatcaaccgccgcgcccaagccgagcgcaccggcaatgttctgagtgcccgcttcaaacttccacggtagttccgcccaggtactgtcatcacggtgaacaaagccaatcatctcaccaccaaattgatacggtggcatcgtagctaataaattctcacgaccatatagaacgccaataccggttggtcctagcattttatgccctgaaaatgcgtaaaaatcaacatcgagtgcctggacatcgaccggcatatgaggggctgcttgcgccccatccgcaatcatcacggcaccgtgttgatgcgccaatcgtgctaacgccttgattggattgaccgttcccaatacattactagcatgggtcactgaaacaatttttgttcgatccgtaatcttgttggcagcatcggccatgtccaattcaccagtcgccgttaactcaatatatttcaaggtggcgtgcttacgcaatgctaactgttgccacggaattaaattactatgatgctccataatggaaatgacgatctcatcacccgcttgaatattggcttcgccataagtactggcaatcagattgagactatccgtcgtccctttggtgaagacgatttcatccgtttttgcagcattgatgaaccgttgcaccttggcgcgcgcagcttcgtattgactagtggcccgctctgctaaggtgtgcacaccgcgatgaacattggcattatcgtgttgataaaagtgaacgagcgcatccacgacttggttggggcgctgcgcagtcgccgcattatccaggtagacaagtcgttcatcattcacttgttggtttagaatgggaaaatctgaccgtaacgtctcaaaattggatgccatcttcaagcttcctttcaatcgtgttcgttaagcgagtccggacagtcttcgatgggatcgcaccaatcacggtacttaagaagccccgaataaccaaccgttgggcctgtggtttatcaatcccgcgactcatcaaatagtacatttgattttgatcaatttgaccaacacttgctgcatgtccagctaacacgtcattttcatcgatcaatagaatcgggttcgcgtcaccatgggcatcatcagacatcatcaaaacccgattttcctgttcagcatgtgcaccggaggccccgtgaataatgtgaccgattccgttaaaaatcaggttagacttttccataatgaccccacgttgtacgatattgccgtcagtcttcttaccacggttagtgacccgcgtattaacacagacatcctgggccttggtcgtcactgtgatgaccttggcatcggatttggcgccctcaccgatcagttccgagtcaaagtccccgaaagtgttaccgttattcatcatcccgatagcccaatcgactttggctccccgactgatcgcggcccgccgattcaaataagcagtcgtgttggccccgagttcatcgaacgctgaaaaatgcacttcactgtcagcccgtgccaaaatttctacaacacagttggcgatattatcgacgtcacccttcgttgtcaggtgctgagttactgcgaaatgactgtcttgttcagccacaatcaagacgtgactaattaacggttgcactcgggtactatcctgaatcgtggtgatctcaattggttctttgacagtaacccctttaggaacatataggaagaccccggcgttcaaaaacgcggtatggtagctggtcaaccggtcctcgtcagttttgacgactttgcccataaaatgtttttcagttagctgtggatgttcgcgaaaagccgtgaacatatcggtcaaaatgacaccctgatcatctagttcatcaggcaaattgacggtcaccgttgtctgcccaacttgtacgatttggatatgaccagcttcagccgttacatcagttgctaaagttcgatccgaacgactgaactttagtggttggtcggtgggcgtcagtggccagtcgcgaatactaaagcgatcagctttgggaaccgctaggccttgcatcgcatctaaagccgctaaacggcgttcaacgagccagtgcggttcaccatgttcgttagcagccgcagctagcgttgttttgatagtttcataatcagcagttgcttccattactgccaccccctaatcttcgtcgtcaacaagtttgacatcaatgttcaaatcgtcacgtaaaccagcataaccttctttttcaagggtctttgctaagtcggcgttaccagtcttcacgattcgaccacccatcatcacgtgaacgacatcgggcacaatgtagtttaacagccgttgataatgcgtgataatcaatgagccgaaattatcgccccgcatcgaattaacacccttagaaaccacttgtaacgcatcgatatcaagcccggaatcaatttcgtccaataaggcgaatgatggcttgatcatcaataattgcaaaatttcgttacgcttcttttcaccaccggagaaaccttcgtttaggtaacgttccgtcatggattcgctcatattaagtagtgccaagttcttgtcgagttctttaagaaaggccatcactgagatttgatcatcagctggtcgacgtgcgttcattgctgcccgtaaaaattcagcgttggtgaccccttgaatttcagctggatactgcatgccgaggaagagtcccttacgtgcacgttcatcaactggcatgtttacgatactttcgccgttcaacaagatatcaccctgagtaacgtgataagccggttggcccataatagtttgtgataaagtggacttaccagtcccatttggtcccataatggcatgaatttcaccagttttcatagataaattgacgccttttaaaatctcacgagactttttttgctcatcatccgtcacttcaacgtgtaaatctttaacttccaaggttgccatttaaatcatcctccaacaattgaatttattacccaagccgttattccttccgtatataatgattagtcaacggcttcaacaaaaatagcgtaacatcggcctttttgtattctatacttagagtataaccgttttcatttcaaaagaaaataaggcttttccccatattaataaaagccctttcatgctatgatgtaggtataatatttttgatgaattattcactattggaatattcagaaaggactgagccttatgctaagtcaatccgttactaatacatcacaactacatattcaacaattcacaggtttggataatcagaccgttcaacgattgcacagcttagggctacatgtcggcagtccgctggccgttgtccgctactatccgtttcacggaccagtaattgttcagattgatcaacaacggattgggattcggtacaccgtatttcaaacgttgattggaggccattaagatgacgacggttgcattgctcggaaatcccaatactggtaagaccacgctattcaatgaactgacggataaatacgcgtacgtcggtaactggaccggcgtgaccgttgagaagaagatgggccggattcggcactctgaagttgaaatggtcgatttacccggagtctattcacttaatccaatcaccaaagatgaagcagtcgtcaccaactatctgctacataaccaccctgatctaattctgaacgtgaccaacgcgagtcagctcaagcgtaacttactactgtcgatcgaagtgttggaatttggcgcaccggtgattatcgcactcaacatgattgatgacctcaaacggacgggccattattatgattttgacacgctagctgaacaacttggctgtcagatcaaagcgactaacgcccgcaataaagaagggctgcatcagctacgcgaagacttattggcaggtccccatccggccgcgacaccgctcaaactcaactatcctttcatgattgagcaagccattcgtcaggctagccaacagctcatcaaaaaatttgatttgacagcagacttcgcacggtggctgacgattcaatttattaatcaaaataagccaattcgagcctacgcgaaacacatgggattgacaccactcactagtcaagccgcttattacgacgctcaaaaattcgacgagcagatcttccaaacccgactagactttattgagcaaaccttagccagcgctagtcaaaacttggcaagcaccagccacgtcgagatgactgctaaaatcgacaagtgggtcaccaatccgtccttagggctacccgtcttcgtgggaatcttctacttgatgttcaaattatcctttgattgggtcggcacgcccctgtcagatttgttagatagcttcgtctccggaccactatccaccaccgtgagtcactggttgaccatggctggagccatcccggtcttgcgctcactgattgttaacggcctaattgcaggggtcggtggcgtgctcgtctttattccccaaatttttgtcttgtttgcctgtatttcaatcttggaagattcaggttacatggcacgagcagcactagttacggaccgcttgatgcagatgattggactcaacgggaaggcatttatccccctaattattggatttggatgcaacgtcactggtattatggccgcccggacaattgaacaacctaaagaacgcttaattacaacgctgatttccccatttatgagttgctccgcccgtctgccaatctacagcctatttgtggccgcttttttcccgaaaaatcaggccctaattgtcttgtcgatttactttcttggcattgcggtcgccctcggtatggctaaattttatcaactgattttcaacgtcgatgatagttccgtcttcatcgttgagttaccacagtatcatattccccgggctgacattatttggcgtggcacctgggataagggtaaagggttcatcaaaaaggcaggtactatcatttttgccggtacggtcttgatttggttactttcctcattcggtactagcggcttagtcagcgacatcgacaacagctttgccgcgacacttggcaaaacactattaccgctgttcgcgccactcggtgtgactgcttggcaagttatctcagccctctttactgggattctagccaaagaagtcatcagctctagtatgatggtaatgttccacagcgcaaatcaggccggcttgattgccatgatggggcgctttttcacaccgttatccgcatacgcgatgctcgtcttcatcttgctatatgtcccgtgcttcgccacgattgggaccatcaagtccgagactggatcgaccaagtgggctgtttacgccgtctgctcgagtttggtcattgcttacaccttggccttcgtcatttaccaagttggtcaattatttatctgaaaggagtttgattcacatggcattattcgttaatttcttaattatcgcactaattattggggctgctggctatcagatttatcgcgtggtcaaacgtgctaaaaagggcaaatgtgcggcctgcgactatgattgtgaagctaagaaaatgttaaacaaagcccagaagcaacaaaactaagactactgcacctgcctcactaaccacgtggttaatccttagaaatcatacacactaataaaacaccaatgacggagattctagtgaattatcctcattggtgctttatttatcgactgcataagttccattaaaacttgtaaggtcaaaataggtcgcacaactgttgtctagcaataatctaacatctctcatagggtttcatcttggatgctaacgccggtttacgctaaatcaatttaaagacagactaaaaaagcggccctgctggggccgcttttttaaaaattatttcatttggtcttcataaattttttcgtacttttgaatgtcaccagcacccataaagacagcgacggcattgtggtaagccgttaaagcagacatgtcatcggtcgtgataatttcaccaccattgggtaacttagcagctaagtctttggaggaaacatcaccagatttttcacgggcagaactgaagatattggtcaaaaagacgtgatctgccttgcttaagctggctgcaaagccatccatcaatgctttcgtccgtgagaacgtatgtggttggaatacggccaagatttccttatccggatacttttggcgtgcagcatccaatgttgctttaatttctgatggatgatgtgcgtagtcgtcgatcatgaccatatcgccaacttgatgttctgagaaacgtcgtttaaccccactaaagtcgaggagttcccgccgaatttcgtccaagttcaccttttcaaagtaagaaaccgcaatgacagccgtgctgtttaagacattgtgttcaccaaacaatgggatttcaaattcccctaacgattcatcgtgatacttcacttcaaatgaagaccccttagtcgttcgtttgatattaaccgcttgaaagtcgtcacggtcattcgtcccgtaatagtaaattggggtatcaacatcgaggtgtcgtaaactttcatcgtcaccccaagcaaagatgcccttcttcacttgattgccaaattgttggaaagcggattgaacgtcagctaaatccttgtagtaatcaggatggtcaaagtcaacgttcgtcatgatggcataatcgggatggtaagcaacgaagtgccgccgatattcatccgcttcaaaaacgaagaaacgcgcgtcaggggtgcctttaccggtcccatcaccaatcaagtaactggtgggagcaatatgactcaaaacgtgggacaacaaaccagttgtcgacgtcttcccgtgagtcccggccacaccaatactcgtgaagccttccattaattttccaagaaattcatgataacgataaacgggcaaccccatttcacgcgcctttttgatttcaggatggtcatcagtaaatgagttccccgcaatcactgtgaggccttcgcgaatgttatcttcggaaaacggtagcatcttaatgccagctgcagctagacctttttgcgtaaacgtatattgttcaatatctgagccttcaacttggtaacccttgtcatgtaaaatcaaggctagtgagctcatcccagagcccttgatcccaacaaaataataaaccgttgctttatccattatgctaataatctcccatattcacaattcatcaatcatgaggtgaatcgctttatttttaattatgaattggcttgtaatttagttaaatctgctgccgtgaaataaacatctcgtggtttggaacccttagctgctgaaacgtagccgcgactttccaaatcatcaataatattggccgcccgattatagccaatcgagaagtttcgttgcaacttcgatgttgacatggtatcttcatcggcaatgtaagccaatgcttcaggcatcaagtcatcttcattgcgtgctgcttcctcgtgcttcattaggctgtctggctgaaattcatagtgcggtgctgcctgatcacggacaaactgagtgatactgtcaatctcactgtccacgaacgtcccctgcaaccgaatcggtgcgggttgaccgttgccaagatacaacatatcaccgcgtcccaacaggcgttccgccccactcgcgtccagaatcgtccgcgaatcgatctggctggcaaccatgaaggccacccgcgttgggatattattcttgatcaaaccagtgaccacatcaacacttggccgctgggtcgcaactagtaaatgaatccctgccgcacgggctttctgggtgattctggcaatgtaatcctgaacctcactagaagcaaccatcatcaaatcagctaattcgtcgattacaatcacgatatacggcatttttagagccggctcgtcatgttcgtcggccagtttgttgaattgctcaatgttccgggcaccaccagcggcaagtttatcataccggttgtccatttcatcaacgacccatttcagcgctgccgaagcggctttgggttctgaaatcacgggtgctaataaatgtggaatctcgttgtatggtgctagttctacggccttcggatcaattaacaacaatttaacttgttgtgggttcgctttgtacagaatcgaaaccaggatactattgatgaagactgattttccagaacccgtagcccccgcaatcaaaccgtgcggcatcttccgcaggtcagtgacttgtggttgcccgaataaatcgacaccgagtgcgaccgtcaatggtgacttactgtcgcggaatttgtcagaatctaaaacttcagacagcatcaccggccgcgatttcgcatttggaatttcaatcccaatcgtattacggccagggatcggcgcttcaattcgaatatcttttgcagccaaggccaatttcaaatcatcatttaagttggtaatcttgctgaccttgacgccacgagcaggttttacttggaactgagtcacggttggcccaatcgtccaatcgacaacgttggcattgacaccaaatgcgtccagagattcatctaacgcactggccttctgctcgatccaatcatccatctcagattcattagccacgatcggtgctttcaacagattcagcggtggcaaatgataagccgctaattctttatcctcaaggacgggggccgctgaaccgccactatgaactaactcaggttgtgaagccactgcagatgtctctgacaaagcgggactagttgtaactgcagaagtagccgcctgtgacggtgccatagtcacactagccgctcccccactttcctgtaaaggtaccgtggatgccacaacgctgactggcgtggccgttgccgacgtcacagcaggacttgtgctagttggccgcatgccaaccggttgataaggttcttcgttaacgtgtgaacgagtctgcgcagtacttgactgtggtgctgcagaagccgccgttgttggctgatccttaaataacgctaagtccgcctgggcatcgtgctcagcggtcataatatcccctaaggatagtcctagcccatgtgctgacttgggtgtcgcactagtcgcagcagattctattttatcatgatcagcagccgcattaacagttgcagcagattcagcaagcgcgggatcagttggttcaaacacttctgtcggccctgccgatactgccgaacttgccgcgctaggcgcatttacggcggccgccgacgctgctaaacttgggtcagtgggctcaaatacttccgtgggccctgccgatactgccgaacttaccgcgctaggcgcatttacggcggccgccgacgctgctaagcttgggtcagtgggctcaaatacttccgtggggcctgccgatactgccgaacttaccgcgctaggcgcatttatggcggctgccgacgctgctaaacttgggtcagtgggctcaaatacttccgtgggagccgtcactaccactgaatcatcggttttaggcgtattaattgccgcagccgacacagctaattcaggagtagtaggttcaaacacttccgttggtcgcacaaccgtcgccgaagctgcggacaccgtggaatcactgccggtctgtgacgtgttagccacgaccgtttgagcagccccgctcgatgctgcctgactagttaccgttgtcgggtcaacacttgaagccatcttccgttccgcttgactaagaactgccgaatcactcgggtgttcaacttgactcgtgtccgtcccactatcagaaagcggttgttgcaaatcaacagccggtaaatcattagctgctgcatccgcaaacaataagaaggtctcgggccgcttatgcaagctcgcttcaatttctaaataattacggtcatcgtgatcctgaatgataccgccatttgtcagcgccgcactaagctgggctggtacccgggatgggtgaaaagtcccatgggtgccaccgttaaagagggtcgcactagttgcagcactgctactcgaagtagttgcctgactcgtcacctgcttggcgctagtttgactggctgcccgctttggcgtcgcactaggtgcaccagcagtcgattgtggactagccgatgccgctacaggagttgattgactggccgctgaattattcacttgtggtttgttaaatcgatatttccggaaaaatgccgggccatcataatggttcattttcaatcatcctagtttttaatatctgcaaattaagcggtaaataacgtctgagcgcgtttaaaatcgaatgccgcacccactggctgataatcggcgggcaaaatcaaagctcctggccgttgtggcgcgttcggtaatcgtaattcccggcctgaaacaatcatgccatcactctcaacgccccgtaattcgcccggccaaataattaagccactgggcatcattgcaccgaccttggcaacaacaactaaaatattcgcctgcatattaggtgaaccactcacgatttgaagtggttgttccaaaccaacattcgtcttggtaatctgtaaatgatcagactttggatgtgcttcggctgattccacatagccgaccacaaacttagggtcagtgtctaaaactaattcaggttcaaaatcattggtttttaataaattatttaattgctcaacttgttcggccgttaagtgaacttgaccattggcatctaagtcgcctaacgtcttggaaacgtcaaagaaattatagcccaaggtttccccactgtcagcatcgctaatacgcgtcacattggcatgtgtttcaatcgtttgggtggccgcatctggtcgtaaaatggtgattaacgtgtcacctaattcggatggattataacttgtaattaacatgtgaaacccctttactctcattttagcgttcaatatattattatagcgtattttacttaaatcatactgattaattatgacttttctttgtattctcgtcaatcattggtatactaaatttaaataaaacatttcctagtcaagttagctgaaaggagacgcaacatcatgaataaacaattacaatatggcggcttgttagcggttgggatggctggtatcgccgggggcttttccgttggcggcctgttcaagcggttgcgccgccccacccctaaccaaattcttagccaagtcaagcgcgcgtttttgaaggaagcaccgattgaaggctcgtggattgaaatgaaaaaatccccattacaaaagttcgcattgcgcacggatgtctactatggcggcattacccgctatgaagatggtcagctggtacagtacgagtttttggccgatgcaaatactggtagtattttagacatttaccggctttaataactcacaattgactatccgcatcaaaaatcaaaaatgagcttctggaattaaaattctggaagctcatttttgatgtttccgacaattacactcaattaaaaaacagcgatcgccgacgcgtttcgctgttctcattcagtctattttgctgggaaagttgcaataatcttataaattgggcccgccgcactgaacttctgttcatattcagtctcgacgttatcctcaggtgtggcaaccgcatgcaagtctaaccaaacttgttcaaattgcatcccaaagttattcatgctcgttaatgaaaattcgaatagcccccggttatcagtcttaaattcaatctgaccgttgggttttaagacttcccggtaactgctcaaaaacgacttgtaggtcaaacgccgcttttcatgacgcgacttcggccacggatcagagaagttcagatataagcgatcaacttcatggggttcgaaaaaggcagtcaccgcttgaccgtccgcatgtgccaattgcaggttaggcagcggggcctcgactagctttttcaaaataatcgcaatcaccgaggtctgaatttcaatggcaacgtaatttatctcaggatgacgcttagccatttcaatgatgaactggcccttcccactccccacttcaatctggagtggctggggtttggcaaaacggctttgccagcggccttttaactgagttggatcttcggtaataagttcgggatgggcggcaattaactttggcgcccacggtttatttctgacacgcatcttgattgactccttcttcatttgcttactcaacaaaatcgccgcgaattccatctgggactcgcggcgattttgttgctcgtcgttacacttcgtactgcgataattcttctaaaaagataatttcatggttcatctgatggtactgattccgataataattatctttgatattcaatagtaaattaatcttagcataccagaccactcgcgtccgtaaggcggtcgtcatagtctcaccgtattcactaagccactgttgccaatcacttaacgggacatattcgcatagtagcatactaatatctgacgccggatccgcaaatcttgcggaatcccagtcaaccaagtacagttgttggcgatcagatagtaaccagttcttgtggttaagatcaccgtgacaaacgcgataatcagtggccggtaaagtgggtgcggttcctcttaattcatccagaacccgggccattaacggatggtgccgtaaatcatctggtaaatcttgtaagtattgctgaataaagtcttgtgggcggacactctgaccaccgacttttcttaacatccggtgaagcaactcggaattgtgcacacgtgccaataaatgcgccacttcaggcagccgcatttgttgcttcgttaaagtttgaccattcaaccactcttgggctgtcagcgtatccccgctcgagatacgcttcgtccagattaatcgcggggtaatttcttccatcgacagcgccgctaggaacggcgaggcgtttcgctttaagaacaatcgttggtgattttttttgcccatgaaagctttattcgtattcccatagatcgggtaaacgtcccagccatcatcaagttcgaaatccatcagccccactcctctcaaaatttatttaatgactcattattatttgacttaacaatcacattttatagacgaaagttgaatccgtcaagtcctttttaacccttgatacatcaaggttttaagctaatcttaattttaaataccaagtaactaagagatagatttcaatcacgttaatgatgagcaaaatcccaacttgagctaacggtgcgttgcttaaccagaacgcaactaaaaagattaatcccgtcaaacttaacacgtttcgcaataaccgctgaaagtttttcacccgctgtttagttgccagcggataaatgtgcgtaaaaactatattatcgtattgcttgtaaaacggcaacaattgaaacccaatcaagtaaataaataaggcgtccaacgccatcgctaaccaaccgtgcccactaaagtacagtagcaccgcaccaataactgtcaaacgaaccactaacccgctaaattccgtgccgcgcaacatgccacgtgtatataggtagccaaacgcatgctgctggtccttaggtaaccaccgtagtaaccaatccaggtaccgacgacgtttgacactgccttgcaccattggtacatccgtaaataaattaaagaatcgataaatccctaacatacggttggcttcggctttgatgtcgtcacgccaagcaatcaccgtggtcgaccaaattcgttggtgcaaataacgttgtcccaccgcaatcgcgatagccattacggcactcaaccacggcgtcactagtagtcccactgccaacgtgacgaacgcgccggcccagttcagggggcgcaaccaccgcttcatgcttggcttcacttgatagagatgcgtcacgctcagcgttaactgggcatcctttaacgccaactgggtgatgagtaacgccagcaacgaccagcccgtcatctgatcaacgatcatgagcaacggcacggtcaagccaacaaaaatcacttggactgcttgcgccaaccaccaactgtagcgccacgctttcacgaagtacgcatgcacatctcgttcacgtggtaacaggaaaacggtatcggccggttctaataacgttgcgatatgactgacacttaggcccgcccataataagagaccgagcacccagacgatccacgtctgctgagggccaagcgtcttgagccaattggaataagccagcccgagtccgccgacaaaaaacatcaatgcaatgacaaagtgatcattgaacaccaatcttaggtagcgcagcatccgacgcagatgccgctgcaaccgcgtttgaaataactcattcatcacgggtcaccccggtcaatgaaagataaatatcgtttaacgactcacccgcatccggataattcgctttgatttcagcaaaagtcccctgtgtctgtacttcaccagcatgcaataatacaaacttatcacaagctttttcagccgtgtccaaaacgtgcgtcgacataaggacagcggctccctgtgctttgactgtcgcaatcaatgccaacaagtcgtgcaccgccaaaggatccagtcctaagaaaggctcatcaataatgaacaacttagcgttagtgatgaacgcacaaacaatcatgactttctgtttcattccctttgagaagttcgcggggaaccaatccaacttgttagccaatcggaaagttttcaataagtcatgagcccgttgccaagcctgttcttggtctaaaccatacgccagcatcgtcatttctagatgttcttttaatgttaactcttcatataagataggtgtttctggaatgtacgcaatttggcttttatagctttgaggatcttgtgctaatgtcacgccattgagcgcaattgatcctttcatgggcgtcaacaaaccgataatatgattaatggtcgttgacttaccggccccgttaagtccgatcaagcccactaattcaccgggctcaacttgaaaactaatatcttttaagacgggaatttgcgaatacccaccaactaagtgttgtaccgctaatgtcataacgttaacctctttctgtgttggtataagtgctcccattatagcatagccatcacgacaccctctatttggttggctcattgatccccgactttaccgaaacttcagtaatttgtcgtcaatcaagctacctagttttgattgccgcaacatcgatagtgtataatgaacccaactaataaataaagaaggttatcacatgacagcttttgaaccaaaactcgatgacgattgtatcttttgtaaaataattaagggcgatattccgagctataccgtttatgaagacgacatggtcaaagcctttcttgacatctcgcaaggtactcctggtcacaccttagtcgtaccgaagacgcacgttgccgatattttcggttacgatcgtgatcttgccagcatcgtgtttgcgcggattcctgaaatcgcccgcgctatcaaagcaactgacgagaatatcattggcatgaatatcgttaacaataatggtgcggtcgcttatcagtccgtcttccactcccattttcacctcatcccccgctacagcgataaagatgattttcggatgatctttaaggacaacgccaaaaaatatgacgaaaccgactacactcgcttacagaacgccattaaaactgaattagctaattaggaggtctcccatggcaaagtttattcgtaacagcctgatcggtctgggtctcagtgctgcgacctacatgttgatcaatcagaaaacacctaaagcactctacacagacatcaaaagttacgtgcaagacgttttagatgctgctgataacttacaagacgcacgtgaagagtttagcgatgcccagagcaatctcagtgttcaaatggcccacgctgcggaagtttttgatgacattcagactgaattggataaatttcaatttaagattgaaccccacgtagccatcatgaaaaaacgtgcggatcacttacaagacaccttagaccatttaaccaagacaaccgactgagcaagtaatcgtgaggtcgcattaggcccacgatttttttgtttgctatcttaacaagctgatttcgtttaaattcactgacgcattaggtagaatttatgaagaggctgtgaaatctctgaaaattttgtaaagatttccatatgcatgcagaagctttaatagatatggtatagtagtcgttgaagtctgctaacgcagaacgatttcaagaataggatgtgttttaggaatgaagaaatggctcattgcccttgctggtgtcttactaaccttcaccttagctggttgtggtagcaagaccgttgcatcaacttccggtggtaagattaccgaaagccaatattacagtagtatgaagggaacctcttcaggtaagcaagtcttgcaacaaatgatcctgaataaggtgctcgaaaaggattatggctcaaaagtttcgactaagcaagtgacgaagcaatataatacttacaagtcacaatatggtagttctttctcaaccgtcttatcgcaaaatggtttgacgaccaagaccttcaaggaacaattacgttctaacttattattgaaggaagccgttaaagacaaggtcaagattactgataaagctttgaagaagcaatggaagtcttacgaacctaaagtcacggttcaacatatcctagttgccaaatcagcaactgctgacaaagtcttagacgctttgaagaaggattctagccaagccaactttacgaagttagccaagaagtattcaactgatacaacgactaagaatgatggtggtaagttatcagcctttgataacactaacacgagctactcatctaaattcttaacggctgctttcaagctgaagaacggtgaatacacgacttccgctgttaagaccagcaacggttatgaaatcatccggatgatcaagaaccctggtaagggtaagatgtctgatcacaccgctgatttgaagaaacaaatttgggacaatgatatgagcgactccactgtcttacaaaacgttgtttctaaagtgcttaagggtgggaacgtttcaatcaaggataacgatttgaaggatatcttatcgtcatacctttcaacctcatcttcatcaagctctaactaattaaattaattaagccaccctgacgtttaacatgtcagggtggctttttgtgtggaatcatgattttaaacgcttgttttttgaaaacgactaacgttattcgtgagcgctttgcaccaggccaccgataaatatatcccgggaacgcctcccaagctacttaatcacatccaaacaattcacgccgaaagactaaccgtcagctagctgctcgcaaatttagcagtaaatacctcaaaatgggcattgagcagtttatgatttaaggtttgttgccaccacttcgtatccactgtaatatcaggatgccaagcagcagttaaggccgcggtaatcgtggcaatcgtatccgtatcgccgccaaagttaacagccgctaacaccgcttcccgtggcgtctggtagtttaaagctaaccagcatgcggccaacagggtatccacaacgtaaccgctagtccgaatgactccggcttttgtttgggcgaagtctggtgaaaataacgcgccatatgtgctcagttcacctaaaagtgtcatatccttgattgtactgattagcaattcatgcaccgataccagtgcagcaggcaacgcttgtccctgatgaagcgcatgcaacacttccaaataaattagactcgccacaactgaacgagcatgaccatgtgtcaacatcgtgtaatttctagttatcgtcagtcgatgtgcgacgcttgtgtcattctgcagagccaccgctaacggcgctaagtacatcagcgcgccgttgccattcgcatgcaccgaaggatcaccgcattggcgggccggaaactgattgatggcataattccgaattgcatgagcacaagtccgaccaatgtcaaacagttcaccacgcggcgtgttcgttccaaagcgcatatagttctcaaatcgggacatgagatcatcataatcaccaccgctaaccaaattctcaatcaatcctaaactcatcgatgtgtcatcagaccagctccctgctggctgtttccaaaagtcacttgcgaccatttccgtaattaacggataagttccccgttgacgattttccgcgggcaaccctaatgcgtccgctactactgaccatcgtaagccattgataatttccgctcggcgcacgcccatcactcctcccgttagttaaccgattctttatttattcatatgacttaattatacgccattacacctagtgctgcacatcaacactgtcctacatcatcgtggcctgattgataagctaatactaatcaatattcatcaaaatatatgcgtaaaaatagccgcaacctaatagattatgctagccctatagcaacgataaacgcaagacaatcttctggccaggagttgattatcgttaccaaacatttgttgatcaccgcaggcacggacaaccaaaaaggagcgatccatcatgaaaaaaacagtgcttaccgcgaccatgttgttaagcttactaggaatgcccgccgtcatggcaaccgccgattcaactgcgaacacaactactaatttggaattgacagaaaatactggaccaactatcccagtagatcccactaacccggccaatccacaagttccagaagatccagacaatccagctactggtaatactggtgctctaacattagacgtggctcctcgaactttcgacttcggctccgttcaaacttatgccgccgaacacacttataaggccacgacgaccactaatgggcaacaatatttacaggtcaccgataaccgtgggaccgatgaacagggttggaccgtaaccgtcgagcaagatcaagatttaaccgaaactagtggaagttcaccgcatgttttgaccggtaccaccatccacgtaccagctgcgattgcacgtaatagtctggcaactgaccctacggcggtcgataccaacctaacgactacagctgccgatgttaccaatacgagtggtgccgtgaccgtttttaatacaacggccactaccggcgctggtaaaggcacttcggttaaagtttgggatccaagtgatgtcactttgacgattcccaaaaacacggccaaaccaggagcctacagcaacactttgacatggaccttgaccgctgctacccctagctaaccataaggagggattgccatgtttaaccgcttttgtcttagtacggggttagcgattttagggttaatggcaaccagtttgacggctctcggggcaacgactaatggtaccgtgacttttcaagatgatactagtgccacggccccagttgatcccactagtcccaacgtcccgttgacaaccaccgatccgaataatccggcaactaacaataccggaacattgaccctcgatgtagccccaaaaactatcgactttggtaccgtcactacgtccaacgcagcccaaaacttacactgcaattggcaactacaatcaatatctacaagtctcggacaaacgcaccactgccaacggctggcaagtcaacgttaagcaagaccggacgttaactaacgctagtaataatcacgtgctgactggtgcggtgattcacctaccccaaggaactgcgcgtaattcgctaaacgagcccgcctcagtagccgattccaatttagttgttgcccccagtgtaagcgtcaccaccgctgaccaagtcgttttcagtgctcccaaccgggcgggtgttggtaaagccacttccacaaacacttggaacgcgggtgccgtgaccctttcaatccccaagctgacagcccaagtcggtaactacacgaacaacttagtttggacgttagtcgccgctaccactaactaggaggtaatcatgaaaaaattgatgtgcttattcggcgtaattggtggcttggttttcatgagttggacctcaccaagcgtccaggccaccgctaccaatgccgaagttcaatatagtgttaacagaatcagtcccggccaagaagtcgatgctagcagtccgtttttcgaccttaaggccaaggcgggcaccactcgtaaaattcaggcgcgggtctataacccgactgaccaatcaattacggtcaagacccagctactcacgacatttacgaatgattcaggccaaatcgcttacacccaaacagccaaacgatacgatgccagcttaaaatatcgttttgatcaaattgcgactttggcagccggttccgataaagtcacggtccccgccaaaagtaaccgggtcgtcagcgccacaatcaacattcccaaaggattcgataccggggtaatcttaggctcatggtacttcgaaaaaatggggcaaggcgcgaaaaaagcatccaagggcgtcaatattaaccaaaaatatagttatgcgttagcggttaaactgacggccaaagaaattgcacagcctaagttgactttggggacggtcactcccggattacgcaactatcgcaaagtcgtgctcgcgaccattcggaacccagaaccagcagtggtctcgcaattaaaactgaccactaaggtcacgagaaaaggcagttccaaggtactctatcagaacagtagcgacaacttgatcatggcccccaattcgaacttcacttaccccacttttttagacgatcaagtcatgcgggcgggtgattataccttatccgtcaccgcaacgactaacgactccaaatgggccaaaaaaacttggcattggtcccgggactttaagattacgactgaacaagcacgtcaaaataatcaaaaagccaagaatgacccggccgcccccatcagtatctggtggtacgtcctaatcgtcattgtaattgctggcttatccgccggaatcgtttatctaattatgaaacgacacaatcgcagaacctaaataagcagttaattttagattatcttctaacttggtactcaaacaaggaggttatcgttatggctaaattcaggcggctagttttactatcattaagccttggactagccctcgctggtggctgtcggagtcccgatgccctagcggctaccccaactgacactagtgtgacattgaccgactggcaagccgggacggacctgacaaacttccagcacccccgtccctatcaatatctagcggtgcccaacatcatcgccactgctaatcaacaggcttcgactcagacaccatcatccgcggcaatacgtccagatcaatcagtgctaccacaaacgaatgaagcccgccaactgttagtctggttaggtctgttgacagctgtcttagccggttggctcgtgtggctcatgcaacgccgaagggagtgagcaatttgcaacgaccacgaagattaataacggcttggctcgggttactcgttctcttaatgagtctactcgttgtcaacggcggtgccatttatgcgacagcgaccaccacgaccacaccaatcaaattcgaggaaccacccacggaattagtgattgggcaaccttttacacttcagttggccgtacaaggttcccaggaacaccaagtcatggtcgctattcctgaggccctcaccgttgaccaaactaaaacccggcaagccaacagagcgagcctcgctgagctggattttgatgctgacaaccggaaactaactttgacgccatctgatccgacagccagtaccacgttcgatttggtattgagtgccagtgaagcgaaaacctacaaagtgaccgcggaagcactgattactgggccagcattagcgaccactaccgcttcagctgtcgccagtagtgaaaaaccgacgacccacaccatgaccgctgaaccaataactttcaccgtggccgcgggctccgcagtcgactcacctcctgaagaagccggcactgaatcagcacgtgaggtcagcaatgatgccgaaagcacctcttcggccagtcaagacccgaccactgacgattcgtcagcaacagcaacacaagcggctaccacgaaacgtgatgactacaatgccacaagcaaatcgtccgaacagtcgtctagtaccaccgcgacatcggacccgactgctgacaacgacactgctactagtcgcacagcgcaggctgattcggaagtagaacggacaccgaaagcgactaaagcgactgccaccaaagccgctaatgatatcacgaccgcagcaatcgtggtcaatccagatggtagcacgaccgtctcaacttatgatgatttaaaatcagcgtataccaataccgccgtcacgacgattaaattgggggccaacattacccacacgtcaacaagtgctacagaattaggcactcgtaccaccagcctgaccatcgacgggcaaaatcacagccttgatctcggcatcggtaacttcacattgggttccacaaccacggcccagacaatgacagtaaaaaacttcagtagtattcgtggcgcaattgcgagtggaacaagtagtggtggcgccgccggaatcattcaaagtgggaccgatggtggggctaatgctggtggagctcgttggacaattacagtgaccgatttaatcactaccagcgacgtttaccgcctcgtcaacgctcctggtaatcaagtcaatgtcagtggcgcagtcaccgcaacaaccgtcgctgaaaacatgattactggtggaatgacctttgccgccagcagtacctacatcggtcgcaaggcgaataacagtgccgccaacaaagctttcttcaacttcacggcaactagtacagttgggactggagaccgtaaagtcactattggtagcgctgctaatgttaacttgctaggtagcgcatcagacgcgactcggggtattttctatgaccagtatgatgccgtcacggtgggtaccaacgctatcctaaccgccaagatgtacggtaacgtctatcgggcagaaacagcaaacacgtttaccgccaacgctggcagtaaggtcacgtttgagaacttagccacaactagtagtaatgcgctctactacgttaccccgttgattccgcttggcaacaacagtacgtttaccgtgacgggtggcgagttgtatatcactagtagtggctcagcccctatttttggtggctacatgtccggtttgagcgtcttgctagattcccctaaggcctacgacattaaaaatacggactttgcgcttctcgttcaaacggggtcaatcgtcgagacgaccattaaaagtttcaaaatcacgaacagtaacctgagtatgtggtcattgtccttattgaacctgttgagcgccagtgtgacctatcaagggatcaccgccatcgaacagaacggggtcctgattaccaacagcggtagcgtcttaccgggactactcaccttctcggctgcgcgccgaattgcgaacaccctctcattaccgactgtgcaattcagctcaccgtatacgagtgacttgaacgcccagctcgtcaccaatgccgacaagaaggtccgcgttcgcgttatcaccggttatacagaatcgaatggcacacaaacgccgatttacgctggaacgggcacggcaaccgtcaagttaacagatgatcaaggcgcaacgcaaagtggtacgactgacagcagcggttacgttaatttcaccttagatcattttccaacggccggcacgactatgacagctcaagcaacgaccacctatacttcagatcctgtcaccataaccgtccaagataagacgccaccgacgccggtaaccgttaaagatggaaaaatcgttgccgaccaaaaaacgattgccagcggttccacgacgacggctggtaacacacttcgttacacggttaacgggacctccgcagctgatagcaacggcaatgccatcacagcaaccgctgccagtgatgggagttggtcccttgcgatgccagccactaaattaaaagctaacgacgtcattcagatttttgtgaaagatagtgcggggaacgaaaatccggtcaccagtacaacttatcatgatgccacgtttgccgccgctacccaatacaccgtcgcaccggcaatcggcccgacagcaccaactgagcccgagcaccctggtacgaccaataccagtgggagcgaaaacactgggaccggtaatacgggcgaacttcgtttagactacgcgcccagccaatttaactttggcagtgtcacaacaagtatgcagcctaaaacttacgccgcccagacaatcaacggtgtcgcgaaacagtggctccaagtttcggataatcggttagcaactcacggttggaccgtcaccgcccgccagaacagtccttttactagtactagtggcgcccaactcaccggcgcgaagttacacattcctgccgggcagacctataatgaacgcgctacgggccagctcaaaagctacgcggtcgatctcacaaccgccgaacaacccgtctttgcagccccagcaacggccaacgtggggaaagacctttcaaccaacgtctggcaacccacccaagttcaattgaccgttcctggcaacaccgcccaagcgggccaaacctataacacaaccgtaacttggacgctaacggctaacgtgacgaactaacaattaaatgtgccaaactgaggctcctcggccgtacaccttaagtactggccccaactctagcaattggaagcgcgacttcaaagcaccattagaccaccacaataattgtcgatttcatcacttaaatttgaccgtcgctggattgcccatcattattgatgacgcgacggttttttcctgtgagttcctaatgagctaatcatcagtaaccactagttttccatgtcatatactgagcttaagcaacacatcaacttaaaattgccaagtccgtataatgggcttggcaataatcaacctagttagtggctaaagtttgtaacgcctgtaaactagccgtactgagtacatccaccggctggcttaatcccggttgaaagaaaaagtcaccataggctaattgctcgagcgttgctcccatctggattgcgagcgaaacggtattgatgaccgccgttaattctgctgtagacattatttgtgcacctagtatccgatgagttttatcataaaacaacttaaaatgaacggtcgcattcaatcgagctggtgcggatgccaccaatcggggaaccgcgatgtaagttgctaacaccggttgttgcatacggacagctagttgcgtgtttaggcccgtagcagcaaagtaatatcccgccgcattaagcgcggacgttgcctgaacgccgggaaacacaattcgctgatccgttaacaagttatgcgctaataaccgaccggcatgactggccgcgctgcctaaagtgatccgctctttagtacccgtgggcgtaaaccgaactttagtcgcatcgccaatcgcgtaaatatctggaacacttgtttgaaaataatcatccgtctcaattaatccctcagaatctagcgccaaagttccccgtagccatgcagtattcggtcgattgccgactgcgacaaggactaagtcggcagcatactgaccacgattcgtttgtaccgctgtcacgtgtgttgaacctaatacggccgtcacccgctcttccatctttaattgcagcccattctcaacactcgctgcagctaaaatttgcgtaaattctgaatcaagattgtgactgaatggccgagcgttcacatcaataacagttacttgcttgccggtttgtttaaataaggctgcaaaattcatcccaatatagccgcctccaatcacgaccacgtttttaatggctgctgacttagcggccaattttaactcattgatgctggcacggttttgaatcgatcgaacaccagataattcggctccgggaatcggtaactggattggtaacgatccaacgctcaataccaatcgatcgtaatgatcagtctgtaattgcccccgttgattacgagcagtaatcgtgtgggtcgctggggtaattcttgtgaccgtcgtttggtcgaatagagtcacctgctgggacaaggccaaccgctctttttcagcatccgccggagcccaatccaaagccgtcgcgaattgcccgtgctcgtaccaatgaatctcattatccgtattagctgctaataagccattgaccgtttcgcagccgccatgtgcagccccgacaataataatttttgccatattttccgcctctgattacttaaattattgttaacaacgctatttaagatacacgttgtctttaactacaacaatcgtttggctacggaaatcactattattaaggcacaaaaagcagtaaactgtttctaaaaccaattaggagatctttttgtgacccaactcaatcaacgtcgacgtggcaaccgactggaaaacgcgatttatgacaccacctataccctgcttagtcaatacggcctcgaccaggtcactttttcacgagtagccactgcggccgctaccagccgcagtgttctttatcgctactgggattcgacctttgacctcatctttcatactattattcatcaaatacaaaagactcccattgcacttacgaccacgccattagatactggcagtcttcgtaccgatctcattctgttagcgcaacgctttatccaacaaactagtacggggcccttccgctattttcggctattgtttgccacagccttgaacgcgcagaaccagcgcgatctcacgcagttagtgactcaaattgatcatgccaacttgaccttgatcgagccacttctgacgaatgcacaaaaccacggtgaacttcagatttggcctaaccaagccgcacaattagtattgtttcaacaattacggtactgcgacatcatcaaccaaccgatgaacactgatcagcaactcaccaatctcattgatcaagtcgttttgccggcattgcgagcaagtggcgttgctaaccggcattttcatcattaaagaacctcttcctcacaagtcaaataaagtctgatttcctagcccatactgcgttggaaatcagactttatttttaatattgaaccagcgtcacccttaactagccaaaaccaggcgacgcccccctttatccgtctaacaaattgtaatctggcgcttattgacgataatctgcccttcagccgccaattgtttaaactgacgactcagggtttcgggagtaatccccaaaatattcgccaattccttcttcttcaacggcaattcaaattcgatttgtccggattcaacggcacaatcgcgcaaatacgccatcaaacgcgctttagcatccagcaaatctcgtcgcaattgattcttctcagcttcaatcaattggttcccaaaattattgatcattgctaatgataaactggctgattcacctaataatcgctgaaaatcatcatattgaatggaacagacccacgcatcactcgtggcttgaataaatccctgattctcatgcggtgcaaatagccagtgttgtccgccgacatcaccactacgcaacaactcaataattttctccttaccattagcagctaaggcataaattttagccgttccctcatctaaaatgagcatgccttcctgatggtcgagtggctgacgaatcaactgccctttttgataaaatttccggtgatgggtcaccgtgattaatttggctttcaccgctggcgctagcggtgaaaataatggtgaacgactcacacaatccatttttgaatgcataatttctccttttcttgatctatgtcaatttttatatgattagactagcatatactgaccatataatgaagaactggaggaattattcatgactaaaaaatacgttgctaacatcgtcccgctgaacgccgaaggaatcggtactgccccacacggcacagcgactttcactgaaactggtaaccaattacacgtcaccattgaaatgttcgataccccggccaacacgcaacactgggaacatttccacggctttccaaatggcaaagcggcacagattactactatggcccaagatgtcaatcacgacggctttgtagacttgcctgaaactgaacctgtttctgggacgacgatggtcccatttgataatgcgccccatcatatggacgtaccaaatgataattacccagttgccgacgcgcagggccacttcgcttatgaaatcgatgtgcccttaggcgacctacaggctaagttcaaagaagtcttcggtaccgatgacttagaactagacaagcgggtcatttatattcacggcgtcccacaagacttagccctacctgcatcagtcgctggtgaagtgggcatgtatgatgctcacgtaaccctaccaattgcagttggtaagattgaggttacggaagactaggcaattattacttaaactcacaaccaaaaactaagaccgcttaccactatcagttagtagtggtaagcggccttaattttttatgaaatcagcaaaagcaaatcctttatttgaattgcacgatatcattactatgttagactatttttaaccaacattaaattgaggtgttttcaatgaccaacgaacaacgagttattcatattattaaaacaactcctgctttaatgacgattcttcaattaattcaagactgtcatttaaaacaaggcgcattggcggctggtagcatccgtaatactgtttggcaagtactcagcgggcagccagtgatgttcaacagtgatattgacgtcgtcttttttgaccctgagcgaccagccagcgatgatttaaaaatctatcagcaacttactgataaagccccacaataccaatggcaaataaaaaatgaggtctatatggcacattataattttgataaggatcccgaattcacttccgttaccgatgcaattggtcactttgtcgaagttccaacttgtattggcgcctttttagacgaaaatcaaatcaagctaatcgccccatacggtgtagacgatttgataaactttcgctgttccccaatcccctactatcgccaggatgccaagcacatggcaatctatcagcagcgaatggcacagaagcagtggcatcaacaatggcccaagttacaaattgatggtatttgaaatattatgcatacccttaatttacgtcatttaggccaagtcagcttttaatattgcccgctgcacgtccaacgtttctaacaaactgaccgcacagtcagcacccttattgccactcttaaagccagcgcgatccatagcttgttcaatggtatccgtggttaaaacgccgaacattatgggcgtatcggttgccaaactgacggtcgcaatccccgtcgtcacgccacgacaaacatagtcaaagtgcgcggttgcaccccgaatgactgccccaagtgcaatcacgccatcatagcgcttggttgtaatcattttttgaaccgtcagtggaatctcaaaagctcccggtacccaggccacgtcaatatcggtttcattgaccccatgctgtaccaaactttcttgtgccccagttaaaagctgctgcgttacaaacgcattgaaacgcgccacgacaatcccaatcttaagcccgttgccattaattttgccgttaaaagttgtcattcgtgtccctccgttagtgtgagttgatgatgaaatcgatcacgttttgtttttaagtaagcttgatcgtactggttggctggtatttctaaggggacccgttcaacaacatcaatccccgctgcacgtaactgctcaaccttgtcaagattattagtcagcaaacgaacccgtgtaatccccatttggcgtagcattaatgccgcaatatcataccggcgctcatccggttgaaagcccaactgcacgttcgcatcatacgtatcaaccccgtgttcttggagtgcgtaagctgctagtttgttagccaagccaatgccgcgaccctcttgccgtaaatagacgaaaacaccgcgctgagcttgactgatcttttggagtgcggcgtgtaattgatcaccacagtcacaccgccgcgatcctaaaacatcgcccgtaaagcattcagagtgtaaccgcactaacactggttcatcgccactgatatcaccagcttgcagtgccactggcaacgccgtatgaccgggggcttcgaaaccagtcatcgtgaactgaccatccttggtcggtaagttgacactcggggtcgttgttagctgggcggcacccgtttgaatcacgtaggtggtaatatcttcaatggtgattagcggtaattgtaagccctctgccaaagctttgagatcacggcgccgcgccattaagccatttttcttgataacttcacaaatataggccgcgggggtcacacctgctaattgtgctaacgtgacggccgcttcagtatgaccacgccgcgctaacaatccaccagtccgcgcaatcaatggaaaaacgtgcccgggatgatagaaatcagcggcctgactattgggattggctaacgcttgaatcgtggtcgcccgatcagctgccgagattcccgtggacgtcgtatggtgatccgttgagactgtaaatgccgttccaaacgcatcgtgttcactagtcatcggtgtcaaatgtagtcgcgtggcgatacttggcgccatcggaacacagagtagtccccgcgctgatgtaatcatccgattcactgtcgcagtggttgctttagcggctaggccaaccatgtctccttccgcttcacgcgtctcatcatccgcaacaataatcaattcgccccgttttaatgcggccaaggccgctgctacctttttcattgtatccatcttaatgactcccctctaatgctaattgccgggccaagtacttgcccagaatatccgtttctacattcaccagcgttccaacttgtaacttagacaaggtcgtcaccgcttgtgaatgcggaattaaatcgacttcaaacgttgtctccgtgaccgctacgaccgtcaaactaaccccatcaactgccaccgaacctttagtgactactagtgcgcgatattctgacggtaaactgatcaacagacgcaacgcgtgcgcatcagattgtcgctgcatcacttgaccacagtaatcgatgtgcccctgaacaatgtgcccatctaagtgcgcgttcacttgtaacgcacgttctaggttcaccaatgaaccgaccacaaggatctttaagttcgttcgacgcaccgtttcaggcatcaccactacactgaaagcatccgcttgtcgggtcgttaccgttaaacaaatgccgttcaccgctatactgtcaccaatcttaagactcggtgtcatcagcgacggtgcggtaatcgtaagggtcatttccaacccttgttggtgcacttggctgacgcggcccttggtttgaataattccagaaaacatttacttaacttcctttcgaacggcccgtagccggatattcgtccctaaacaagttaccgttggttgttcaaatgtcaacggtgtcatcgcagcggccccggtaacggctggcaaacccgtcccaccaatcatcattggtgcgatgtagctgacccattcgtcaatcaattcagccgcaacaaattcagcttgcagatgagccccaccttcaactaagagtgactgccagccttgttcgacacatagttgactgattgcagcgggtgtccagttgccaatcaggacgtgtacattgggactgtttcgaagttggtcgtcactagccgcagcctgacgacaaagtaaccaggttggtgcctgaccgtcctgaacaagccggtggtttaacgccacggtactcgtattcaacaccaccaatcgaaccggtggctgcaccattgccgtcagtcggacggttaattgtggatcatcaatcgttagcgtccgttcaccaatcagaattgcttgaaactgtgaccgtaagcactgactatcgatataactagcatgattggaaaccagcgtccgagtcggcgtttcagtattaattttgccatcaagcgttatcgccgtttttagggtgatccatggtcgctgctgcacataaaaatgattgtagtgggggttcaacgcgcgaactttgtccgttaaacagcccgtcaccacatcaactccgtggttcaaaagatactgacgtcccttaccacccacgattggatggggatctaattgaccaatcacgacttgccgaattccagccgcgacgattcgcgcactacacggcggcgtcttcccatagtgtgaacaaggttccagtgtgacaaataacgtggccccacgcgcctgttctggtgtgacctgccgcagcacatccacctcagcatggtcaccgccaaaataatgatgataaccttgagctaacacgtggccgtctttgactaataccgcaccgacctggggattttggtacgtcgccacccccgccaatttggcttgatcgatagccatttgcataaaatcagttaacattggttcacctccaacaagataaaaaaacacccaattatcaaatcatcgataatcgagtgtgaagtgttcgccaaatagatttcaccagtaggatccagctaaataaacctacttaaaggtcgccaatagccactactgcctagtaaaattcaagcaataattttcttctcccatccagactatactgtcggtcccagacttgcactgggtccaccgctcacgcgggtcacggacttcaacttacgttgttaccgtcggtcgggaattgcaccctgccccgaagaaatcgtattcagttttcaccttttataaaaacactttcttaatcaattgtcaatcaccccttttagtttaacctcgtgaactgctgtgttaaactgctagcaaactttataaaaatgataatgactaacactaattcttaacttttttcagaaaattgttcgcttttcttaactagttttcaagtttcagtacggtacaatgaaatcattcataatatcggagttgaataaaatgtggcctaattatcaaacaaggcgctggcaagtggcagtgacagctggattactgtcccttgctatcatggggattgtcttcgcaatttgggggatcacgcccttcggtaaccataacttattaattagtgatatgggtggccaatacttatcatttttcaccgcgtatcggcatgccattttaacgcatagttttcaattatattcattttcacagtcattaggcggtaacgcactacccacgattgcttactatctattaagcccatttaacattttgatgttgttgtttccggcggccaatttgccaaccggacttagtctactcatcatgttaaaaatcagcttgattgcggtcactatgacggcttttttacaaacgcattttcaaacaaagcggtggtcgactgccatttttggtgttgctttcagcctctctggcttcgttgccctcaactattttacgatcatgtggttggatgcattaatttggttaccactggtcattcaaggactcgaccacttaattgcaactagtcatcccgggcgctttttcggctggttatgggtcagtatcgtcaccaattactacttaggctatatgacttgcctatttgtgatttactattttatttatcaactatttgaacgcaaacgccctcaggacagtctttggcaaactgttcgtcatcaattttcgttaattcggcacgtcgtggtcaccatgctactcagtgggttaagcacgatgtttgtcctgatccccactggtttaggcatgctgaccacggctaaatctgcggtcaaattatcgagctacttaccggtcccacaattcggtttagctgttttgagtcaatttggcttaggtgccgccaattttacgactcggctcgtacacgcaccaaccgtcttcagcagtagtctggtcgtcttgctggccctaagtttctgggtgcagcccaacttgactaaagctcacaaatggcatagcttcggactattacttgcactcttcttgagtatggacattcgtaccttagatacgatttggcacatgtttcaaacgcccgctggctttccataccgcaatgcttttttctttagctttgtcttgatcatgatcgcttttgaagcctggttagcaggtccccggcggatcgccttgcgctggcaatggttgttaccgacactcatggtcagtgcgctgatattaggctggtttgcccaacgaactgctaagcaccccttaacaacttcaacgctggcgctcagcttagtcgctgtcatcttaaccgcaattgccttattcgcaacggcgaagcggtggcaaacgctcagcttggcaggtatcgtcgccttagaattagggactaacagtaccctcatgatggcgaagtcaccactagggaatcaggctaaatttgtaactgcctatcgaaccgaataccgccaaatgcaagccgtcaacgatcctgatggtcaattataccgcgttgaaaatcaaaatacgctaatcaatcaggcctacaattatgatagcaagtatcgtaattacaacgacccgatgttatttaactttcacgatattacctactacagttcaacttttgcgaaccaaacacgtctcatgttgaagtcacttgggctattttctaaaaacgcccggcgtgtcagttcagaaggcctaaatccggtcactgatttactcttagatgtaaaatacgctgtgcaattaaacgccgtgggtcaagcgacaacgcggctccgtagtcaaaacgggttagggtttgccgtgccaacagcatttagacagttaaagcttcgtcagaatagtgccattatcaatcaagaacgcctcttacaaagtttgcggccatcgaaacgcgcctattttggcaacgccacgacgctctcagatcacgtcatccaagattcacaggccaaacgctatccgtatttgcatacggttaaattaaggatgacacgcaccgggacgctgtattataacgacacgactcgtcaaacaaaatacaccacgatgcgggtcaacggtcacttagtcccgactaagtttaatgccaacggtgagttagtgctccgatcgctaggttattttgacaaaggcgctgtcgtcacgttaacggtcaaacgtacccaaccaacgcttggcacccatgtccacatcgccagcctggatcaagcccggttcaaccaagtcaaacagcaactgctatccacgcgctttacaccgacttaccacgtctcgggcattcataccgtggtcagtggtcaagtcaccaatcgctccaagcaaaagtggctctacgttgctattccagccgacaaggggtggcgcgccacggtcaacggcgtcaaagttactcctaaaacggtcattggtgggatgttagccctaccgattcagcccggtaagaatcagattcagctaacttaccacgtcccgggattgctgggcggactactgatttcaatcataagtggacttagcttcattctttggcgtcaacgatatcgccaccattagaatcgtgtcaatcaaaacaatcggactgccaagctattctgctaggcagtccgattgttgttttaatggtcgccgtaactgctaaaccagtcgcgttaatatcggttttagataggacacaattcttatattagtcaaaattaattcaggtttcatccaaagaaaggccatatgttcagtaagttctaagttgattgccggtctagtaacgaatgcctgtgtgctatacactaaacgcgtgtacacctgatttttagccttgtcaaaggtggcatcttcccaaataacgcgctcagtttgaactttcaagcctgtctcttcccaacactcgcgtttggccgctacttgcggtcattcattagctaatgcactcccaccgggcagatcccaatagctggcatcaacattcggccgcccacgctcaaactgattgcgttttaaaattaaaacgtcgtgcccggcagtcactaaagtatgcgcaataatttgaaccatttgaattcacctcaccttgataagtcacccaaattaacggctattatatttcgtttaaccacaaataaaagtcccaacactggcaacaccagttattaagactttcgcttcaagttttattattcagtttctggccgtaaccgacctaacgccaaaatggtcgccagcgccacacagccgacaactgctagactggcggcacccgttgttaacgcgtgcggcttaataaactgctgttttatcacgacttgtaagtacgcgtgccgcttagccgtcacccggcctgttaacgggctgtagttggtcgccatcacaccataccggacgggcgtctgaccaatgtttttaatcgctaatcgcaggttgcccgccgctgtcaacggataattcaaagtggtcagctcattggccgagccccgccaccgtttgacaacatgcgcccccttagtcaaggtaattgttacgcgcccatgcgtcgcaactggcttcaaccgtaaaacattacttttaccactaacggctaacggcgttgtaacagcgtgacccggtccaattttttgaaccgtggacacaacataacgcccatttccctgattgccacgtaccacatcagtaatccgcgtcgcctgactcgtctgccacaaactaaccacactgattgccgccaatacgacgaccaaccacgtcagttggcgccgcattactcggttaaggtgccacaccggcaactcacgaccacccacaatactgaggagcatcaatcccggtaatagcggcaacgcatagcgcccttctacttcccaaagtccgacatgaaaagccgttaaaccgagaattgccagggcgacgaacgtcacggcccactcgcgccgcttcatcaaagtcacgattgcttgcaccagcatcgtcaggtaaatcgtttgcgtcattagaaccagccaaaattgaagctggcgttgatgattcaaataccagcggggcgcacgaatccactgggtggtcaacttaaagctatcaaaatcgccagtcgcccagaagacccgcatctttttgagtaaatgtacgagggtccccgtaacgcccatctgatgtaaccgctgctgaattatttgctgggtctgttggcgcttggccgccgcagttggcatctgattaacgcgcgcaaaatcgccatgtcggtactcacccgagctttgggggttcaagctcatcgcaatccagctggttgccggtaaggcggcatcagcttggcgcgtataacccgcttgctgttgggcagttcgcatcaccgcaaacatcaccccgagtgtcatcactaaactaacgagccagcctaacatttgccgaccactgaattgtcgttgccaccacaagatgatccccatcaatacgagagtgagccagagcacaatgagattagtcttcatcaccacgcccacggccaccaataacccatcaccaatcaaaacgccccaacgacgccagccggttaagcttagtccgagtgtgagcaaggccaagctgtctggaagtagtggcaaaacgagggcgtccgtatatgcaaatagtccaaatgcggccacgggaacactgacgagccacaacaaactaaatgagaccgcccccggttgccagtaacgccaacggtttagtaaatataacccactgattagtccggtatcgatccagataaatcggatgacatttaataatacccagggcgtctgcgtcagtttcaataatggcttgagcagattcgcaactaataacgtaaaattcacattattgggataaatcataaaataatgttgccaatgatggctgccctgcgctaataacagtgcctgctgccgaacgaaaaacgggtcggcccgcgccacgtcaacaaaactagtggcaatcaatatttgcacgatggcgattaagccgaccagcccaatcaacagccaacgatactgacgagatgataactgtttgagcacctgccggccagccatcgtcatgaccaataatcccagaaccatggctaattgaacgaccggtgacgcccagtccgggttgccgaagaagtgaatcggttgcaaccacgccatgccaactgcgacgaccaataccgcggccgccagccaattgacgctcttaaccacggccttcatccgtgcacccgttgcgaattcacaatagctggctgttgagttgccgtataatcatccgtttcaataatatagcggggccggtgcttgacttccgcaaaaatttttcctacatactcgccaacaatactaataccaatcaattgcatcccacctaaaaaccatagacttgtcatgagtgaggaccagccactcgttgcggtccctagtaatccttgtattagcgcatatagcatcatcatcaaactaccgccactaatcaccataccgaacaataaaattactttaatcggtgcgattgaaaatgacgtgatcccatcaaaagcaaaagccaccatcttacgtaatggatactttgaaacacccgcaaaacgtggttggcgatgataataaagtttagttgttggaaaacctagtcgtggtacgattccacgcaagaataaattggtttcctcataggttaacagtgcctgaactgcccgttgacttagcaaacggaaatcggcatgattaggtactaattgcacaccaatacgcttcattagccgataaaagccgtccgcggtccatcgtttgaaaagtgaatcactacttcgatcattgcggacacctaatacaatatcactaccagcacgatagcgtgccaccatttctgggatcacctgtgggtcatcttgcaaatcagcatcaatcgtaatgactatttcagcagtcggactggcgacctgcatcccagccatcaacgcgttttgatgaccaaaattacgactaaacttaagacccgtcacggttgagtactgtttttccaacgacttaatcagtttccaagtcttatcttgactaccatcgtcaacaaataataacttacttgccgcattgacctgtttgtgttggatcagatccgtcaagataccatccaagatgtgtgcagacttaggtaacaccgcttcttcattgtagcaaggcacaataatggttaaccgtggattttgcatgctaattcccccaatatgactcaaatagttttacgaaataacaattataattgcaactttcggtatcattagcgccattcgattgtggcccaaattagacacttaacgaaaaacattccggtatcattaataacgcagaatatctgcccccacaactatccacgactaattttataatcattaatgcctgacacccacaatcctcaaaggcaagcttacgactattactgtaattatttatctcaatcatccaaccattgacctaggcaactgtcagtggtcacacagctcaatagttcaaattgatagtaccaatatcttcctcgcaattcaaacaaagcaacgatttcggtaccaaccattaacaaattatccgaacttaacccccgtgctagtaccacccattattacgaaccggtacaaagaaaatgcggaaataaccttgtgttacgaaccattcagaattccaaccgaatcttcaaaaccggtttatttaagattaagtgacggacttattattaaccacaacaattcatttaagctcacaaaaatgggccttcataatttctgaaaccccactgtataactctaaatccattgcattctaatttcagtcaaacaataacttatttagctggtaaccatacaagcatcaacaacaataaggcaagtccaagtattgcaatgagcaagctctggtgattctcgctcgtttgtggtaacgttactgccttcgaaacttgaccggattgatctgtggccacaagctagtagttaaaaacaaattgacgttgacccccaaaatctctaaaattaagccattagtctttttactaaattaactttaaggagtatcttcatggcacaaatttatattgctagtccgtttttcagtcccgaacaagtgacgcgggtcacacaacttgaggaagctttagcaaaaaatccaacggtcacggatttttattcaccacgtctacaccaggacgctcaagccgaacagttcaccaaaacttgggcgaccgaaattttccaccgtgacatggcccaaattgcggccgcgcaagtcatcgtgactgtcttagactttgaagccaaaaacttagattctggtaccgcctacgagctaggtgtggctaccatgcgcgacttgcccatcatcgccttgcaggaaaaagatgaggccgtcaacctgatgattaccgaaagcttacactggtataccaaacaagtgagtgattttgaaacttacgacttccaacaattacctaaaggcgactttatcggtgaaattttataataaaaaacgaagccagactttcgactattatcgaaagtctggcttcatattttgtagttcttaattttacttaccagtgggccccaatcgtctgttgccaagcaaagtacggggtgccctttgtcaatgcttcaaattgatcagccgtcaaattgggccagtctatgtcactggttgccaattgtaacgaatcggttaagtgaagatgaaagtcggtgatccaagccaacagcggtttcaacactgacaaatcggtatttaacatctgataagtagcggtatcgctggtcaacgtcaccgccaatgtgtaacgggccttcattcgtacgccattaccaagttgccgcacgattgagcgatacaatcccagctcgacgtccgtgatgactgtgggtattggcgccaaggtttgaaagactgtgccgcgctcatcggccaaactcagccgactaggcgtgatcgtcaaacgcccatgagcagccgcgccctcattcaacgctttcaagataaacggcgtctttttgcgcgcggtcgaatacttgtgatcatttaaaacaatcgtcatataagctggttggtgcgtaatattgtccgcaatgttcgtcaccgcgactggcattggtttttgcatgtgataatctcccttgtcgatctgcttctctctacggtcgattatacactaacacgactcaaccaacgtagcgacttaataattgccttaggccgtcaccggatcaacgtgctcagcaacagcatgagccgccgcgattcgaccgaacgtaaagatatcactaagcgagttaccacctagccggttacccgcgtgaattccaccggctacttctcccgccgcgtatagcccgtcgataatctgaccgtccgtatttaaaacgtgagcatccggatcaatcttcaagccccccatcgtgtggtgggttgctggtttacgcggcgttgcgtaaaatggtgccacggcaactttcaaatcaaaggccgtcttatgaaattcaggatcctcgccggcatcaacgtaacgattgtaatccgcaatcgtcttggtcagggctgccgggtccatgccaatttgttgcgctaaatctgtcaaagtatcagcacggaacaaggtcccattcgccacctgctggtcaattttagcttgtgtcgtgttgtaagccgtctttttaatttcatcatcggcaattagatagaagagactcccattatcaatggccgcctgagttaactcatcacgactgccgtactcattgacgaaccgttttccttgctggtttaccatcacaaagtttgccggtggcacttggagcccactgaataattcgccggtctccggatcagataccggcatcatttgtgagaagcccatcccaactaatgctgcaccaacactagtccctagccgaattccatcaccagtcattgcgggggaattagtcgtcttgacatcatcgtcgatggccgtccagtacgtattgtacttttgtaacattttagtattcgctgcgaaaccaccagaagctaaaatcaccgcatcagcatggacaataactttttcatgagccgcattagtcgcaatgacgccacgaacttgcccatctgtcaccagtaattcttttaccggcgtttccgtcataatcgtaccaccctgttgttcaacaaaggcccgtaaagtcttgatgtaagcaaaccctagatcgcccattggcttatgcccgcgccgccagatggctccaactggcattgtcacttggctttcatcaaatttcacaccaatcgattgtaaccacttgactgaatccagggcgttatccgtcaattcttttaccaaatcatactgaccgtgaatctcttgaccgttcaaatcagtccgttgaccacctaaataagtttgaatccgatgtaacaaggttgaatcaaataaggtgcccttttgattggtattggcagtcaggtatgcgtcaatctgctgtttcaatttacggaaatcagcccgatattcaggtgcaattgtactttcatcacgctcactcagatccttcaacgtttgcttttcacctggcaaagctacaaactgtcgttgccaatccggatcagccgcattcatgggccccccagcgcgaacggtattaccaccgacagctgggtatttttctaggacaacggcttgatgaccagcctgtaacactttggccgctgccgtcataccagccccaccagcaccaaccactacgacatcagtcgtcacttctttgacagcaggttgagcgacctgcttagtcgcacgccgtttcttcaaatcatcaggattggcaccagcttctttgaccgcacgagcgaccccatcgataacaccatgactggtaattgaagccccggaaatcgcatcaacagcgagcgtttgacccgcaataatctccttgggaatgcgttcaaaagccacatcggcaatcccctgcgtttcactactggtatcaatttcaatattttcaatccggtcagcggagagggtcactcgcattggcaattcgccattatgtccagtggccgtcacctgataagtacccggggcaaagctaagcgcttctggtgcccgcatctcggcgacgatggtcgcaaacttctgaaactttgcaaaacaactgtccagaaaatcaaccgtcccttgcacctttaaattaccttgatcgtcaaaagccgtttgggcacgacctaataagaattctgaaccgggcatgacactggcgttaacaccgggagcgtctaaaatctggcgcaggtgtagttgcgcgcgtgacgatccttggacactgtatgaagccccaacaatcattactgcttgaccatctaatgggtgaattttgaatgataaccattcaataatgcttttcaacgcggaaggcacggaatgattgtgttccggtgaggcaatgataaccccgtcagccgccgcaattttagtggcaaagttttgaatgatggtactgtcagtttgatcattcgattcatcaaacatcgggacatcagtcaattctaaaatttcgatttcggcttgtgtcgcaaaatgtcgttgcataaattccagcaacatccgattgtacgaatgctgagcattcgttccaacaattccaacaaatttcatgtttattcctccccagtcacttgccgccacgagaactgcttactcttttcgaaaaactgactcgacggcatgattttattcgttaaatctacaaaatcaatgaattcgccaaacgcattgtctaattcctgaactttatccggataagtcaggtcgccctgatcatcaaaagcttgtagtgaacggcctagtaagtattcaatatttggcatcaccagtgcttttaattccggcgcctctaaaatctggcgtaagtgcgcttgagcgcgtgaggttcccagtgagccgttcgaggccccaacaatcataactggtttattaattaacggccgcgtggtatatgacagccattcgattgcactttttagtacggccggaattgaatgatcatactccggcgtggcaaagatcacgccatctgctgcagtgatcttatcactgagctgttgaattgctactggtgctgttcggtcttccggttcattaaaagccggtaaatcttttatttcacaaatttcaatcgtggcttgttgctgaaaatgccgttgcatatattgcagtaactgccggttggtcgatttggttgcattcgtcccaacaatcccaacaaatttcataatttcagatcctttcaggatgatttaaacagtcgttttcgacgagtagctattgaatgattggccactcttaatactgattagtgtacgtgaaagcgctccgcttgtgaaatatttatttatctataccccgataacaaatttactatgtcgacgattcgcgttaaaattaatcatgttaaaatggttggtcataatgctatttagccactatcgccaggatgttgacagaacttattgaacatgttttgaacgtccttatggcgatgcaactaactcaacatgaccaaatcagcaatcaaacgaatactcacctaattacaatgcgagaggaaggcgctttatgccaaaatcagattctagcgaaatgcgacggtttttagatgtgttgctcaagcacggcaattttacccgggcggctaaagatctctacatttcacaaccttacctcacccaaagcatccgcaatgttgaaaaagaattgggcgtcaccatcatcaatcgtgaagtcacgccactgcgactgaccacggctgggcggacttattatcaatatttgacggcgctcgaaaacgagaaggattactttaataagcaaattaggcaatacacacatgccaaccagcaagtaattcggctgggcgtcttatctagcctcggctattacttattgcccctattcttacctgcttttttgaaagcccacccggccactaagatcgaattaaccgaagatatcgctagtcgcaacgaacagcgcgtgctccacggtgagctggacttcttaattggtcaaaatccggaaaccatcgcgccggggcttgaaagttatgaccgcggtcgggacgggtactacgcgattatcccgaacaccgtcaactggtaccaaccccatcaggccttcattaatccgggagcgctaccccttaacgacctgctacaagcgcctctagtcttgtctccccacgggtcatcgattcgacgccaagttgactacttattacaaaagcacaacgtgacaccgaatatcgtaattgagagcacgaataccgccaccatcaccaaactagccactgctggactgggtattacctttttaccagacagtgtgcatacccagcctgatccagaacgctataacatcttacctttgccccaagcgttaatgtccctgaattatttcattgcctttccagccgagcattcactgaaccaggtggaaaaagacttggtgacgatcttcttaacccagttagaagccgatctggcacaatcgtcaacaatttcatgatacaacaaatacccatctgcttagccgttaagacggccaatgtagatgggtattttaacagtaaccattatttcaaagacgcaccagttaagatatgcttttcgttgcgaaattttgacgccacgcctacactttagctaaccaatacatgctaatctagtcacgaaaagtaaggatggcttatcatgataacgaataaatgccgttacggactggtaggtctaatttcgatagtcctaacgtttggtctttccgcttctaatcggctccgtgcgtccttcaacgctatgccggctatcacctacatgtcaaaatatggcattatcaaccatcgcacgcaatggcaagccatgctacatgcgactgatcatggtcgcaaaatcacgtcactgacccaactcaatcaaattctgcgcgctgcaaatttacattcattcgccgtcgccaatctccgccaagtcgaacatgccacccgtccgaccaagacaatgagtgccggcctcaccatcatcaatgtgccagcattttacagcagtcagcaccaattacaaaaacagtattggacacaactccagcacctgattaaacaaactaagccgacaaccgatttaatcttaaacttcgcagccaatactggtggtagttcggcaccgatgattgctggcctggccgccatcattcccgacggcctcctctacactggcatcacgaaccatcatcgcaaccggccgcgtgtgatgtaccatggccgcatcactggtggacttggtcaagatgactttaacttttcgcaaccaacagcggcccactttcgtcatatttatgccattattggtaaccagacagcgagtgccgcggaggtgaccatcatggcgctaaaacgtaacccgcacgttactttagttgggcgttcttccgctggatatactagtctcaatggtggcgtctttttaaataccgccgtggccgtcatgacgattggcacgctcaaagcgaccgtcaaaatccatggtcagcaatacttcaataaccagccgttaaagccagacataccaacgttatatcagccattggcaccattacaattaggacaatcgccccatttagatgccgactttctgtccgagttacgaaccatcatgaagcactaccactgacaccccgtcctttcagcttcaactactagattcacaaacttcagcctagtcaatcggcactattgtgattcagttggccgttcagctgcactaaaaaatcagcttacgcagccaccgccatccccaaattacaattgtaatcagaatagctgtgaccagccaagcaactaacacgataccaatactgacggtagctgccagtgcacggttcgccatcttcacagttgccataccaggcacactctcaggccgcagtacaccgtaagcgactaagcgcattgcaatcaaaacggtactataactcgcaccaagttgccaagctggccgagccgcgccatcttcttcactctcgtcttcatagtcgtccgccggatcaaaccgtcgggcccactgttcagttgtcaacggatctgctaaatcccagtgttgccaggcatccgcccagttggctgtcgtctcatcattgagcgtgtcatcgagcgtgcgttgcatcaatttattctgcaaagttgccttggcagtcaaatcaccgtcccactcaagctgatcaaataactcaatcgctaacgacaagccctgcatgcgcgtaattgcggccggatcaatctgacttttcgccacaagctgtgaccattgcgcgtccaaatctcgatcagcacttttttgccattgttcaagctggttaaccaattcaaaaatctcaaaagagtcctcagtatcctggtacttatcgaaaaaggcccacatcacggctggtaattgttcagcagtcaacgtcagcggggcggcaaactccggatgcatgctctggcgatgtgcacgccacacttgccacccggcaccactgacctgagtggccgcccgtttaccaatttcttgcagatattcctgatcttgtgcctgcaaaaacgcgttcatcgctgcataggcttgaacttcttctaattgacgttctggtcgtaccccagctggcagcactaattcatcctctccgtcggtctcatcaacttcatgttcagcatgatcattgggcgtaagcacggccctaactgcccgcttccatgcttgccacattggatcatccgccgttacctcataaattgccccggcttgcatccgatttagtagtgacttgacggcgtcatcgatttcatcgtcgtcaaattcatcctcaagtcccagatagctagtttccaaccaacaatccgcgagccaataaaatgtcgttacatatgcttcttgttcgttcatcccgataatctcccctaatgcgtgcaattttaaatcatttgtctctgtgacggtcccgtcacgtgccacagttgccggattatcgtttaatcaatcagtctggccgctagattacgcgcatcgtgcacgccaatactgctcaacgtgccctaattcaacacgtatgcaatggtcaacgataacaactaatcactcgtagtaacttatcatgtcaggatattaattgcaattaaaatttttattttatctttaatgacggcccacgctaattaatggtgcaccgtctcacccaccccaatggaattcgtcatcaaaaataaaggtcacaaaaaaactgttaaaatcattgatttcaacagttctttcaaacaccgtatcgatttagttagttttgttcgtctggtaattcgcccttcgtttgatcaccagttggccggtaaaagttacgaccatccatagcaaagatccgctccgtatacgtgcccggctctgcgtgtccaagtgaagtctgcatcatttgaatcgacgcgtccaactcgtccaagtcatgtaagatttcagcttccataatatgaggccgaacgggtgacccatattctaacaaaccatggtgcgcaagaatcgtatgccgcaagactaaaacagattccgactgctcgtcaattttcaactgttgacaagtctccacgatttgttcatcgatcaggacaatgtgaccgaccaagttccctgccaacgtataagtcgtcgagaccggccccgacatttcaatcgtcttacccatgtcgtgcaaaatcgcaccggcgtatagtaaggcccggttaacgtggggatactgatcggcaactgccttagctaagcgcaaaattgataacgtgtgataggctaagccaccggcgaacgcgtgatgatttttcttcgccgcgggatagctaaagaaccggtcatgaaatgtcgttaacatgtggcgaacaattcgattccaattaggttcagtaatttcaaagacaaactgattgatttcatccgccatcgtgtcggtctttagtggtgcgtgttccacaaattgttgcacttcttgcggttcgccactatgagtgagccgcatttgttgaattttgatttgcggattaccctgatagttttcgcgtttacctttcagatgaacgatccgacctgcctgaaagttttcgacatctgtatcgcttgcatcccaaaacttcccggaaatctcgccggaagtatcctgaaaattaatggctaaaaacttcttgccgttcttggcgatgcgaacttccgaatctttcaacaaaaaatagccatccacggtttcatctaattgataatcaaataacttctttgccatgttatcccccctaggttaactgctgtacagtcgctgtcttcagttgggtcagtgccgctgtctcattcgtaaagtagagcacttgatgatgctgagcaactgctgctaagacttgccaagcagcttgcttacgttgctcatcaaaattcaccaagccatcatcaatcattagtggtagctgagctgcttggcccaaatgattgatcaacgctagccgtaaagccaagtacaactgttccttagtcgccgttgaaagttccgcgaccatgaactgcgttgttgccgtcttcacaaccatttcatcaccgtctaagtcaatcttattataccgctgtgccgttaattgcgcgaaaatcgtggttgctgtggccaaaacagttggtaattgctgttgtgtcaatgcctgtagcgccatatcgatccagttcgcacccaactgccgcgttagccattgacgtgccatgactgtgatttccgtttgtagatccgcctgttgctgacgtagcgtagcgtactggccatccgccgtcaactctttgagttgtgcttgcgccgtggcaatgtccgtagctaactgtgtcagttgctgcgccgtttgggtacgttgttgctgtctttcagccagtaccgcttgcaacgcttcaagcgacgtatactgctttaacgccgatagctcagcagaactgagttgttgctgtaattggtgacgactcgtggcgttggccgtttgcttttcggcatcactaaccgctcgcgtcaacgcgtctacatccgctaaaccgttagtcgttgctaacgcctgtagctgctcggtcagatcacggacctgctgcgtcaactgctggacctgccgctggacaaaggcaaagtcggggccggacatggtctgctgttgcatcacttgatggacttgatcatagaattgggcaattcgagtaacacttgtcgttaaatgatcctgatcaacaggaatccatcctgccgcaaattgataaggctgaatcaattgccagagtttggcagcctgtgttgctaatgcttgatcagcagtcgtgaccgcagcttgtgcgcgttgcagtgccgcgactagttccaattgctgtaaggcttcactggcagtcagattcggtgccagaccagcagccactaattggtctgataagtggtcggttgcttgcaccggtttaccctgactacgggtcatcccaaaccaaccaagtagggccacacctgctaacatcaagatccatttaaagccgcctaatggtagcaataatcccgcgacaatcccgattgcaccaccaatcaagcgccaatcaagcgatggactattcggggccggatgttggcgacgcgtgttcgccgtcgctgccaacgtcgccttcaaggtctcgattgcggcctgtttgtgcggagagaggcaacctaacagctcaggatgtgcattactttgcgcttgaaaatcagccttggcagcacttccctgctgggtcaacgtttggtattggcctaaggtttgttgcagggttggtaactgagcttctaattggtcaaactggtcttgatgttggacgtagaagccaactagtccttgagattgtgtatcaactggttgctgacttaattgctgacgtgcactcgccaaggcgtgttgcaattccgttcgctgttggcttaattgttgatagcgtgtcctagtcgccgtagttagtgtcgtcgtcatattagtggcttgcagttgctgcaattgttgatagaccggccactgatttcgtaaattggcgagctgttgttgttcatgatccaacttggttaaatcacgttgggtacttgtccgttgtgcctgcaaatccagcaatcgattttgtaatgtttcgtattctgggtaccgttgcttggccgccttgacctgttctgtcaacatgcgatagtgctgcaatgcttgattcaacctgggtttgcggccgcggggcttatataacgcctccgcatctgtccgtaacgtagtcgccgtttctcgccatggtgcactgcccaccaatccgacttgttgtaattgcacgttcaaatcgctggcgtgcatagttttgagcgccgtcaattcagcctggttaaacgtaaacaatcgcaaatactggtcacgatcataaggcgctaaccacttgtcaagtaaggccagcggttgagcggcctgcgtctgcacgttcaccaaggtagcgggttgatcacctaaccgggtcaaccggtatgtcgtctcgtcaaccactagctctatcgaaccaccgtactgattcgtaccttgtggttcatggcgttcaagtgggtgacggcgggagggaaaaccaaataacatgccgagaataaaggcccgcattgttgatttaccactttcattgaggccgtaaatcacttgaagcccatcaccaaactcgaactgctgctgttgaaatttgccaaagcccgcaatttcaagacgcttaatctgcatcatcattcacccccgtcgttaaatggtactgatcatttaagagtcgcaccacttgttgttgccaagcagtgggtgacatatcttccagcaacgcggtgttcagaaagtcttcatccaagagtttgcctgcaagttcagcgactgcttgatcggttacgacctgctcaccaacttgttgccaggtcgtcgcgttaataccaaacaagggggtcatcgtatccgtcgttgcttgctcaatcgcaaccggccaccaatgttcatttgcctgttcctgcaactgggctagaatggccccctgatttaaggctaattccgccatcgcactcagttgaagactagctggtaacgtaatcgttactaattttaagccggtaaccatcttcaatgataattgatcagctaactgatggacgatatgtgaacgggacatgggttctggactagtgagcgttggcgtccaatccgcccattcaatatcagtcaaggcgttaaatactggttgcaaggtctgatcggcctggctattcacaatgaggcaccccttcgccccagtttcaccgcgatggcgcccctgcgtgttgccggcatatacgattggtggttgcgaattgagcgtttgccgctgatgaatatgaccaagtgcccaataatcataatgtttcgttaataattcactaacgttgaacggggcgtagtggtcacccgccacaccaatctgaccgtgcaaggtaccaatctgataatcaacgcccgtggctttaacaggataatcatcaactgggtccgtcgtcacccaccgctgcgcatagctaaacccactaatcgcgacccgttcttgtgccacagtcgttaaggtagccgttgttacctgcgggccaaacacgtgcacattggccggaaagtgccagcgacttaaatccgcttgaaaatcatggttaccgaacgatagcagcaccggaatcgaagccgtattcaaccgcgctagcgccgtcatcagtgccgcctgggcctgaacactttggccctgttggtcaaacaagtcaccaacgagcaggacgaaatcgacttgctcagccaccgccaaatcgactagtcggctgagtgccctcagtggtgccgtcactaaccgttcctgcaaagctggtgttaagccactcagtccttgaaacggtgtatctaaatgtaaatctgccgcgtgtagaaatttcatgataacccccactaaaaaaggggcaatcacggaacagattccgtcattgcccctcgatccttaatttacttagttctggtataattcttgaactggtttagtgataatttgatttaaatcattcatcaattggttcaagttacgttctttacccattaaggacttaatttcgtcaacgttgccaaccttatcagctaaatcatgggccttttgaacttcgtcatccgtcaattcttccccattcatctgcttttgtgacaattgcatctgaacttcttgaaagtccttaaacagtgaaaaggcactgtcattggtcttcatcgtgtcataagcgacctttaattccttgaattctttagtctgacgtaattcttgttccaattggttcgcagtatcgtaaatatttacggccatcgtgagttcctcctcgaagtatgtgtcgtcattattttagcatttttaacggaacttgaatagcattagtacgttcagaagctagctttactagttgccaaggaaacttttggctttggagaaccagtctttagccttgttcttaactgcattagcgcccttctcaacgttttcccatacggatgatccactatcagaactatccgaatcactactattagattcggttgccagcgtcgcagcatccttcgtaccaaaactagtattattcgtattcggcaaaatattttgtaattcattcttgaataacgaggaaagttgattttcagataaactcttcaaataatgagtactgttcgtcgtatcaaatccgatccaggtcgtgaccacaatgtccggggtataagcaatcatccactgatccttcgttcccgaacccgtactgtaatcagcctgcgtactcccagtcttaccagcaaccgagtatccatacggcttggccgcagccccggtcccactattgtacgtgccaagcatcatactggtcatttctttagcaacgctggcggacataattttcttcgtcttagtcttcgtattatcgacaacgacattgccactagcatcgacaattttcgtaataaagtgggccgtcgttttcttaccaccattcgcaaacgctgtataggcactggtcatttgagcgggtgatacccccgtcgtcaaaccacctaaggcaagtgccaggttatcatccgacttggtaacgggtaagccaaactttttcaccgattgataccctttattcacaccaatcttattcaataaccaaaccgccggaatattcatactttgcgataacgcggtatacattgggaccgatttactataaacattatcatagtttttgggcgcatatttattggccccaaaagtttgcttcttattagaaaggttcgaatcatacgtataaccattttgtagtgctggtgtatacactgccaacggtttgatcgtcgaacccggctgccgcttaatctgagtcgcacggttaaagccccggaagacgtgtttgccccgaccaccgactacggctaacacaccacccgtcgacggatcaaccgcaattgaggccccttggaccttcgtaccatcgtccgcgttggccgggaacaacgtactatccttaaaagaatcttgcatctgtgtctgatcatcttgatcaagcgacgtataaatcttatagccccgattcataatgtcagattccgttagcccgtacttattaattgcttcatcaatcaccgcatcgaaataatatggataattataaccactttcataatggtagttattcgtcagcgtcatcgccttttgcgaataaagcttatactcacttttggaaagcttattattagcgaccatgttattcaagacgacgtttcgacgagccgtagacgctttcggatgattgattggatcataaccactgggcgagctcagcattccggccaaggtcgccgcctggtcaacagacaactctgacgcgtgtacgccaaaatatcgttcagacgcatcctcagctccccagacaccgtggccgaaataagcgttattcaaatacatcgctaaaatttggcccttagaatagacattttcagtttcaatcgccaaaaagatttcccgaaacttacgtgagaaggtctgttgttgtgttaggtaggcgtttttgaccaattgttgcgtcaacgtactcccaccaccactaatgtagtcacggccaagtatcttattgataacgagcaggacaaatgcccgcccgattcctttgactgagaaaccatgttctttatagaaattacggtcttcagtcgaaattaccgcgttctgtaagttttttgaaatactactcaaatggacataggttcccttttgtgaatagagtgaaccggcctttttattgtccttatcatagatttcagttgtcttttctaactccgcctgtaaattaccaactttagccgtcttggcttcataagttaaataggcactcccaattaagatgacggtcaagacgagtacaattagccaccgtgtgatttgtcgccggtgccattggtagccgacgacggcagcgaatcgctgccaatagggtgctaaccaattgccaatgactcgtaagccgtctttgatcgtggcccaaaaaccatttttttgcataatcttccccttgttcagccgacgcacctgtcacaacgtccgcgttacttgttagcttttacaattgtatcataaattttccgatgctcagtaattgaccacaaccttgaaaaaatcttcaacaatcaaacgcaactcattttgtagataacccgatgtttgccagttgttgccgaaatcactgatttagaccacgtgttgtaaccagattaaaggtcactacgataaaacggccataaacaaaaaaagcttccgagccgtccatatgacatacttgaaagctagctcagccattacttgcgccggacaccccggcggttagcgttgagctcattttgttgttgtttaaatttatcgaaggtcgcatcgcgttgtttttgattctttcgaggcgcccgtttcttcgtatatttcatatctcacacctcttttaatgacaataatcataccgtgaacgacggcctagtgcaaccaattagactgctcaccacagtcagtcttcattactaatgtgactagcaaaggattcgtatagctgctttgccaccgtcgtattcggactcacgacaaagatcgtgtcgtgaccagccaaggtcccactcacttctggcaagttcaaatcatcaatgatcgccgccaatagattcccattactcggtaacgtatgaataatattcatgaattcaacacggtcaatgctcgtcaccacatcgtgtagcgtttcaaatagccggtcctgttcatttttgttagttgttttaaaaatcgcgtaccgcgtctgaccgtgctcatccggcgtcttaacgatctgcatctctcggatatcgcgcgaaatcgtcgcttgcgtcgcagcaatgccctctgctttaagcttagccatcaattcttcctgggtagcgatcggatattcactaattaattgttcgataactgcttggcgctctgactttttcatgtcgcgaaacctccccaaatcttgtaatgaatacattatagcaaatattcacttggcaaactacgcacagaacttcaaaaagcacattttccgccactattaggaaaatgtgcttaaacaaatttgtataattatttaaaagtaatgagtcaaccacggttaccagtccactagtaactaatcaaagcggcgtaaatattgccctaataaatccagaccccgttgtaacgtcggcgtatccgtacagtaacctaagcgggcgtgccccggaatatcgaaacgtgaaccaggcactaataaaacaccggtatcccgcagtaattgttgacagaacgtctcatcatcgatcggtactattagtttaatacacgacactgaaatgccatgtggcgtaatcaattcgacccgcggttcctgtgcgacccactctgtcagaattttgaggttgcgactgactagctcccgatttcgcgccagaacgcgttggcggtgcgctaaaattctaacggccagttggtcattcaaaacgcccccgcagatcatcgtataatcacgatacttccgaaaaatatcagcaatggcttgactaggtgtcgccgtccacccgatccggataccaggcgctgaataggtcttggataaactgttgaccgcaattccacgctcgtataaatcggcaattgagacgaacggggtttcatccagtggctcgtagacctcatcggccaaaacgtacgctccaactgagcgagctaatgtgacgacctgttctaacagtgttcgatctagtaaactcccagtcggattgatggcattattgagtaaaatcatctttgtttccggccggatcaagcgttgcagttccataatatccggcaaccagcccgctgactcatgaatatgccaataatcaaccgtagcgcccaatgacttgggaatatcatacagctgctgataactcgggtacagtgcaatcacgtgatcgccgggttccaccaaactatagattgctaaatgattagccccggtcgccccatttgtttggagaacattggctgctggcacttgctcgtataactgactaacgagttctttaaatcgtggtgagccctcgatccagccataatccatccgggccgcccctagttcttcgtaaaaatcctgtggtgcttgttggtcgtctaaagccgcaatttctgccatcgttaaggctgcgattgagctttgactaatatcagtggttgcttcacgctcatgtgcgtttaaccaggcctccactccgaaaccagcaatcttcatgcgtatcgtccctctcataaaaagtccaatacgactagcataccgattgtcagaggtaaccgcaactatattttcgtgatgaaggttgctagcaacttcacgccgtatagaataatgatgccaccacagattcgattgatccagagtaggactcgtggttgcatgagatgtttaaacttactgatcaagctggtcagaccgatgaaccaaataatggatgctaggatgacccccaacataaagaaatgggtcagtgccgccgggattgacacccgaaacgccgccaacaacacggaaccatcaatcagtgcttgcggattcagccatgctaccgaaaaagcggtcagaatcgctgctttatatgaaaagtccgcgtcgagggtccccattgccgtggccttttgccgcaacagattccagccaatgtaaaagaccaataaactcccaatcaacaacacccctaattcgagccagggagtggtctgcaacaatcggcccaccccataaaagcaagccagggagagcgacgtatcgaacgcaattacaattaaagccacccgcaatgcccgttgcaatggttgttcaatagctgtcgaaaccacaaataagttttgcatcccgattggtgcaatgtaaacaattccaaataataatccttgtaaaaacacttgcatgttttgacctccttaagaccagccaattcgattcttttaccaaccaattatcgttcaatcaattggtcatatccgactagcttttaattcagagatgattataatagagataatttcatttgtagccaaccaatttaacaattttcacccaaccacctgaatcaatcatcaaatttctggctagtagaatgacagcttaattcgcccgcatgggcactcaggaggcgtttgccatggcaattttaacgatcaactggcaaccaaataaacaggtcagcacaccaatttaccaacaaattactaactattttcaagaacaaatcgcgaaaggcaattgggccgttggggctaagcttcctgcgcagcgtaaactggccgaacaattcggcgtgaatcgtagcaccctaattacggcacttgatgaactaatggcagtcggcttaattacgagcaatccaggctctgggatggttatttcaggtaaccattggtccagcttattggcggaacacgtcaactggtcgcaatatgttaaagcaggccaattcaagcccaattcccacgcgctccaaaaaatcaaccaatttgaaaccgatgcggttattcgtttaagtacgggtgaacccgcaccagaacaatttccccgtccactttttcaacgggcctttgcacatctaggcgaacagttaacgagtttgaactataccgagcctgcgggcattttggctttgcgacaacaaattgcacgtcacttggaaaaagttgggattcatacccatccggaaaacattctgattacttccggatcattacaagcgctccaactggtctcaatgtcactatttcccaaagatgccaccatctacacggaagcacctacttatgtcaaatctttacacgtctttcaatcggcccacacccatctcgctggcatcccgatggacagtcagggcttggcgtactggcagatgaacgcccccattcagggacaccatgccattctttacacgattccgacattcaataacccgactggaatcgtcatgagtgccgagcgacgtcaacaggtcttacaaaccgcacaagaacaccgcttaccaatcttagaagacgccgcttatcaagatgtctggttcgatcagcagccgccacagccactgaaggcactcgataagactggcaacgttatttattttggtagcatctcaaagtcccttgcaccgggattacgcatcggctggacggtggccgccaaaccggtcatcgatcgcttgactgacgtgcgcatgcaaaccgattacggcgctagctcactgtcacaacttgtactggcagaaatcttagctgatcctgaatatgaaacgtatcaagctgatttccggtccgtacttgtcaagaaggccgcggcggcagaacaaattctgcatcattactgggacgattttgcgacttggcagacgcccacgggtggcttttatctgtgggtccgcttagccgacaacattaatattcccaaattattcgaccttgccactgcgcacaacgttctcttcaaccctggtagtatctacgatttccagccgaatcagtacattcgtctgagcttttcttatgaatccagcgatcgctttgaacaggggattaaaattttaactgatttaattcacgccaattttaacgtttaatcaagtaaagatttcgttaatacacctgattaaccatcatcgatgataaaactatgctagaatgaagactgaataattcacaataatgataaggggcgtattttgatcatggatgatgttaaagcaacggtactatcgatcttgcaagatttaactggggaagatgtttcaaacaatatggatgccaatttatttgatgaaggtatcttagattccatgggttccgtacaactgttactagaacttcaaaatcagcttggtattgaagtgcccgtttccgaatttgaacgttctgaatgggaaacgcctgctaaaatcgtagctaaggtcgctagtttacaataaataaaaattcaaatcgccgttaagcacgctgcttaatggcgattttttaattagctggaaaaattgtctaattaacagctgatttactgcaaataactttaatttgccgatttccgacattacccgtggcaccagcaataatggctatcacaactcattttggaaaattttacgaaaatgatatgcaaagtttacacaattttgataaacaaacgttcgctaactgagtaaactaaaatcactaaaatcatttttgtaagggatggtattttgaaaatcagtgttcatcagctcatctgggtcacgattggcgcaattagcttaactatttttaccggattcggacacctatttgcccggcaccaccaggctattgccagtaatcggccaatcactaaagttagtcattcagcaactaaggtaaccacgccagtcccggagaccgttgactggcacaagccctccctgtcacggccgtatcccaaactggctaaatacgatgacatcaacattcaggtttcaatcaaaaaacagcgagtctacttaaaaaaccacgatcagaccctttataccatgcttgcttctacgggcaaacatggctctgatacccccaaaggacactttgaaatccaagccgaacgaggacaacacttttttaacacgcaatcgggtgaaggcgccaattactgggtctcattcaaggatcatgggatttacctatttcactcagtcccagtcgatgctaacgatcaatacatcgttaaagaagcccagcaacttggtaaagtcgccaattcacatggttgtattcgtctgacgattgctgatgccaaatggctctatgaaaacatttcaacccatacaccggtggttgtcagttaatgaaaaaagaatttaggccacatcctaacgaccgccataatctactctgctatctcagcagcatgttaattaccttttttggcttctatggctttacttacctagtcacctggttaacgattgaaaagaccggtgatccccagttactcggcaacgtcatggcgatgacaatgctgccggcaatcggtctgaacctagtagctggtcgggtacttaaatactactcagccaaacaaatgatgttcattacggatattttgacgggaatactcttcattggtgcctattacgcactaaatacggttagttggcaaatcacttgcttagtcatcgtcgccgttcttaataaatcaattggggtcttttataagctcagtaacaaaacgattttgccagatcttcttgcgcccgtaaatattcaaatcgtcaacggctatcaaactcagattcgccagttggccatcgttagcgcgacaatgctcgtcacgatggcattactatgggtaacaccggctaccctaatcttaacaatggggatagcgttcttggtttcagccggcttcgattggcaattccgaacacgttccaatctctcctcggattcggttgtcaccgtcaagctagaccgccatcgatcatggccgacatggtcgttactgtacgccgttctcggttatctggtcgacgcgacgattgcagtagccgttccttggctcgtcgtcagcaagttgcatagtcactggccacttagctggttcttaacagctaacgccacaggtatcttattggcaccactattgctaaaacgatggtcaaagcaatccctgctaactttgacggccttcaccggtgggtgcttactacttatgtggccgacctttgccagtcttatgattaccatgttcttaattggtgcattacgcggacagaccaacattagttttttcaccactatccaacaaatccccacaaacaatcgtaatactctaatgacgggggtcttaaccgtcatcgacaccactaccgttattggtagtttgctagcaccccgtttgatcttaatgctcggttcttggaccctccccttgcttggtggtggtatcctcttgttttgtttgacgcggctaattatcttattgaacaaccaaaagcagtcttcatccgatatcgacgaaaactgctgagcaacagtcatttaatttgaggccgagggacctagatcttgaccattggatgcaatcactcgctgataccagtagaaagagtccttcgggattcgggccagagttccactaccatcgtcttgacgatccacataaatcaatccgtatcgtttagacatttgccctgtacctgcagaaactaaatcaatacagccccaactggtataaccaatcagtttgacgccatggtgaattgccgttgccattgcttgaatatgtttacgtagatagctaatccggtatacatcatggatttgaccatctactgtcaaataatccttggcacccaatccattttcaacaaccattagtggtaaatgatatcgatcattcatcagctccaaataatattgtagaccagccgggtcatccgcccactcccattcagagtattgtagatatgggttacgcgcgcccatcgaaaaattaccgccaacagttgcactgacctcatgtgttgtaactgccgttgacatgtaatacgagaaggtataccagtcaaccgtaccggctttcaaggcttctaaatcactgtccgtaatgtctaaatcaacttgatgctcattccataaacgtcgtgcataggttggatactgtccctggcactgcacatcaccacagtaatagatgttttgttcccagacgtaccgattctgcaagacatccgccggatcacaggttaacggataagacgtgataccgcaaatcatgcaaccaactttattttcgccatcaatcgcatgtgcttgctgtacggctaaagcactagcgacaaattgataatgtaattgttgataagcgcgttggtaatctgcatcaccggctttggcacgcaatgccagaaacatgatcgtattattaatttcattgaaggtaatccagtgctttaccagcccacgatacgccgtaaatagcgtttccgcataatgctggtaaaaaccaatcatccgacggtcattccagccaccatacgtttcctccagatacagtggcatatcgaagtgtgaaatcgtcaccaatggttcaatttcatattttttcaaagtttcgaacacctggcgataaaaatccaaccctgcttgattaggttcattttcatcgccgcgtgggaaaatccgtgaccaggaaatcgacattcgatacattttgaaacccatctctgcaaacagcgcaatatcttcttgatatcgatgatagaagtcaatactagtctgattaggataatagtcatctggcagtaccgctccgtgtgctccagcaggaattgaatccccttttccaggagtaccatccgcttgcaaataagtgacttgccgtcgctgattaaggcctcccattgtcgtaatatccttcatagtcaggccccgaccatcaacatcataagcaccttcgcattgattagcggcagtagccccaccccagtaaaaatcagccggaaattgcatattcacacctctttctcaggcttcacaggttgcatgggcgcattaccttgattcgaaactgccgcccgcttttcttcagcttcaactgccgcctctttggcaatcagttgcttttcataaactttaaagaagggataccagataagcgctgacggaatcagcatcaaatagtcagtcaatgcgttgcgccaactgagcgtactgagataacttccaaaacccatgggtaaaatcgcggtaattacaatccaccccggtgttaaaaatccaatcttgtatagtacgagtgcacacaacataactaccggaatattcaggacaaacgggatactcataatcggattatacataattggaataccaaaagtcatgggttcattaattttgaaccagccggggataattgacagcttaccaacggcactcagctgtttagatttagaacgcatcgccattagcgctaacggcagggtattcccagttccacctgctacggtcataaatgagaacaacatcacaggtgcaaacaccaccggcttcccagctgcctgcaatgcggcattttcagaaaccgcttgaatcactaacggcatcacaattgggactaaaatcatcgtaccatgaatgccaaaggtccataataaagcacccaagatacacaggacaaaaatacctatggttgaagtcagtgcactcagtggaattgccagtaattccataaaacccgaacaaatattatacttaccggctgttccaaccgtgactaataacgatgcgcccaagaaaatcacggcgttaaacaataatggcacaatggatgcaaaaccgtcttggagaaattgggggactgcatctggcatgttgattcgaatattcttgtctgtacataatttctcaacgcggacggaaatccaaactacgacgaagccaataaacattccctgagcacctaaataggttgtatcaatgctaactgttccagtcttactgacaatcaacccaccggccacaatccaaaaaccaaataatgcgtcaatcgcattcatgattggggccgtcatttttaaattcttggcgtaatggaatcccaagaataaaacaacccaaattgataaagaattcattgagaattggaatggaatcttcaagtaggctaacagaatactctttgctgataacacgccaaacatcgtcggtccaagtactgacatcgtgatttgaaagatcgcgccaaccattagaatacccatcaaagacatcatagctgcctgtaatgcggtaataaacttattattgccaagtccctggccggcgcgttgtaagccgaccatcagtttactattaaaaaagcgttccatcgtccttcacccccgaatactaatccctcgtcatcacaccaagttctcggccagtttgaaaatatgggcactgtcacccaccgcatagtccaatggtggaatagcagcgacgggcaacccagttgccgcctcaacttcaccctgccgataagccacttgcggccccattaaaataacgtcatagtcctgatagacatcttcatacgcggacaagcctactgcctggatttgccctgcaacaccttgttcgtcacgatattgctgtaactttttcattaaaatgctggttgacataccgcccgcacaaactaataacacgttgattgccttcataaatcgaccatcctttcaaatttttgagacatctttaacatctcagcgattaactcgttagctaacagactcgtcataaaatgatcttgagcatgaattagtaaaatatcaatggaaacctgttgaccattcgcctcagccaccagtagttgggtttgaacatcatgtgctttccccagtgcttcactagattgcttcaataacatcttagattcggagaaagcatcgcgatgcatcgcatctaacgcattaaaagccagcgtacgaccttcaccagaatacgcgataagtgtcattgcaatatcttgagtttcagtattattggctaatgtcattatccggttacctactttctgtatttgtcgacaaacatatcgtaacaagttttgtcattaaccacaaaagcgcttacatatgcttgtgtatagatttaaggtccatgaattagcagtatcaacacacacgtggcgtcataatagctgaattagactaaatatccaacttcatcactattagtgtataggtttaatgaccaatttatgtattgtgtatagctgattcatcgggttgtatagcttactcattttaacgcgtttttttcagccttgaactgtcgaaaatgtctcgctataatcgaatcatgaaaatcattcgcacacttgccgtcacaaacacggaattttatgactggttagaaaaacaactactcatagagattcaagccgctactggtgaaatactcacagcaacgtcaatcaagaaaggactgacatatacaaaaacgaccgccaaaacggccgctcagattaaaattacgattgacgattatcagcgtgggattaagtaccaaatgacagctatttcaccactggataccgtaaccgtgacctattcgaccattgctgaaggcaccaaaacaaccgtgacctttctagaagatgttgacagttatcggccacaacaacaccattggctactcagaaattttagtcaagcactgctactcggacggatgtctgacaagttattgcaactcgaacaacaaatcattgctcaccgaacaacaacttgcaaaccgagccaaccatagatactttgtcaacggttaggcctttaaattcatacgaatcgctgaccatctaaatagtcgcttcaagcaatcgccactgcttgaagcgacttatttaagtctcatttaaaaactgctccgtcaatgctagaaccaaccatcatctccccatcaaaatcaaagctgacaccttcctgatatcaatctcaaacgattatccgtggcacttaagattagtgtaattgctttaagatgaccagtagcgtcccaatcatctcatcattcacaatcagtttaaatgtctgctcgaccggccgtagacaccgtcgtaattgctgataatcttgcgaatactgggtcactaatttccgcgtttgcgccgttgtcgtcacaatcttgccagccaaaatacggtcaatcatgctacccaagtgaacaaacaggccaatttgttgatcctcagttagttggtataaggttgtcaaatcatccatgagtggtggtaacacacgctgcaacttagcaacttctgcgtattcgaactgcgtcttaaaatactgatagatctgattataagtatcccagcgaccagcttccggccgaaacatcagcacttgatctaactgctgatgtgaatgttcaaaaattgctgccatcgaaataaacggaatgccgaataattgaggatcaaaggtgccgacaaatgcatgaatctgataaacctgttgtagtctaagtacggttgccaccaactcatcacgatgcccaattgccaacgctttgacgcgcatctgtaaccgtgaatattggtcaatataatcttttaattgcgcagcacccccctcacccgtatgacacagcgtaataatcaattcatcttttgttgtcttttcggcgttcagttggtttagatcgacttgcactagatgataaacatcgtccacgtccattacgcgcgcactctttcgagcagcatcgactccgactaaagtcactgggacttgaatcatccgaattttggtcgcgagttcgccttgaatggtcgtcaacatccatttgattgcccccatatcataaatgactagcacacctgcaccgcaatcaatctcgctgattttatgcttcagtgccttcatcaccatcgtgctatcggctgataagtcaacatcataagcataagtattgctgacagcgctgagcgtgttcgttgttcgcatcagggcctgggcagtccccattccttgcatgacgtaaagcacaaccgggtgatgacgcgtcactggtgattgtgcaactaaaaacgttgctaataaagcaacttcagccggtgaaatggtcaaatctagttttgtcgctaagacctgtgctaatttaacagcagcctcatattcggccacatgttgtgactgtaattgcgtgatcattgtcgctgatgcaggtttggtcgttggcatttggcgatacatcccattaatgtgtaaacataatccattaaacacactctcggtcaacggccgtgccaataaccgttcacaatctggttgccagtctttgacaatcttaataattagtggcgcaacgatttgtgctaaattttgcgtattggacgcacgctgttggacgatactcggttttatcactgacggtgattgttcaactgaccttggcacttggacactgcgaggacttgttcccggctcaacttgttgccgactcgcttgcaatgaatctgagctcaaacccgaagacgacttggccgcaaacgataaatcagctgctgccaacacggccgccaattcttgttgatagtcccgttcgtgcgctaacgcttgttgaacggcgggcgatagatccgcaaggtacacgcgaacttcacggtcagcatcagccataaatcggacataagcctgcgcacaggccatcgtgatggtcgctttcatcgttttcaaattctgatcataatttgccagcatgagcgcctgggcaacggctagttccaatcgaatcgtccgcttggattgttgagcttcaatcgtcaaaaaacgacgaatcaacgcccatctttctgaccacggtcgttgcttaaaatcaggtaattcaattttcattatcaattgctgcgtcctaagaatttcctgatcaatcccgctcactaaaatgattaacggtggttgcttatgggacgccacggcttccatgacactcgtcaattgtgcgcgttgcgggccatctaaatagtcgtaatggtcaatcacaacaataccgccctcggagtgtgcccaaagactgtgcgctagctggccatgctcaccaaataattgactatcaagttggtgaatatcgtctgcataatcacgacacttaacaatgatggggctgctagctgccgttaatataccccgttgctcaacaaaattctgaatttcgtgtacaaacgtggtactgcccgccccaccgtttgccacaatgtgaatattcaaaggaccactcggatacaaaacagccgcttttgctagtttgatcgcatgttgcaagctatttaaacgaccaattagtcccgtaaatggctcttggaggtgggacgcagctaataaaaattgaactggccgcgtcttagtcttgaccaatttttgtttgcgcactaaggcattcaaagccgcgctaacatttgtgcgttgcattttcaattgtgtagcaatgaccattgctgtcacaccatcgtgataccgcgtatccgttaaaaccaatttgcgtaccgtatcataaataagctctcgtgtcgtttccattagatttcccccacaaaattcgcatcactacatttataccagatttgtacatatttcgctgtgattggcatccgcaaaaaagcacccgttgctcatcacagcgcgtgtcgttttgatcaataattagccataattacgccacaagtttggttaaaatttgcgtggcatccgccaaaactttttctgggtgctggcgggcgtcggtcaacatacccaatggctctaaattcattgcagcaaattctgcgtgccgagtttgaaattgacgatggaatgggagtaagtcactggccgtcatcgctgacctaacagctactggtgctggataacgattcaaaacggtgtagattttaggattggtcagtgtgtattccatgctaaactgtaaggcccctaaatcttgatacaacaacgtgttgacatccgtttcagtcgaataggttaaaataatttgttgcgctaatggcaaccagcactcgttgagtaaccaagtatagttatcgtgtttcggacccgtagaatcaagatctatcaataaataatccgtctggacaccctgcaacgctatccaaaagttgttgagctcgttagccgttcgaatatctgactgccactcatggcagtgatgcttttgaatggtccgccacgtaacggtttgataattgcaactaacgatggtgaccgtcattttccaattagtcaatacgttcgctaacgccagtgtcaacaagctcttgccactagcaacctgcgttccaccaatgactagtgtctgtggttgtttcctcaaaacaaaaccctccttagcttaatttacaccaacagcatacccggacagtcgctgaattactagtgttttgcatgtataacaggggggactttgggctttttatgagaagtcactgataagtttgttggcgaattaattcactcgttgaataagtcaagtgggcgatggattaattctgcatagggttgacaagacacggttttggccacaaaaagtaagcgccaacatgtatggtaatcaatttaaacggatacaattgaattttgccattgctacttatcttctcaaaaattagtttttactaataatgtttagttatgtcaattaactaactagcaccggtttgtaaagaaccatcatcgacgtctcaagtacacgctaactgccaaataaccatccccagttacctaagaccagaagatattaatcaaaattagctcgactagtaacgcagaacctagccgagctaatttacttttctcaatcagaagtttctgcgtaccctgggcgagccaatattagaactggctgctgtcgttaataccagccctaatgaattaatgacccccacccctgaataaaacgactattttgcgacatctcgcacagtttttaaccactccttcaaacaagttgactggttaacataacttttccatcacgacaattatccaatcacttgttattcagcggccaaggctttgatcggattagcccgcgcagcccgccttgctggtaaaatagccgcaagccaggcgataataattgcgattacaaaaattgcaattacgttgccgagctgaatctgaactagcgcatacccgccagttagcttagccagaccatgattgagccctcgttcagctaaataggacagcccagtcgctaacgtggcactgataatgcctaacatcagcgcttcactagtaaatagccggcgaatatcacgccggcgctcccccagcgaccgcagaataccaatttctcgcatccgagcactgaccgacatgaacatcgttacaataatcattaatgcggaaacgattaatgaaatccccgcaatcgccgccaacactttagtggcaatattaacgtaagtattgaacgaatccaaagtggccgcaatactagtcgcggcaaatgggtgcttgccattaattgataagtggttaatttcatttaccacgacctgattttgcacccgactcttaattctaacgctcacaaacgttggttgtgttgagacacgtgccgctgaacgcatcgactgcatcgtggtgtagttaactgcattcaaaccgacctcagaggtactatctactattccggcaaccgtcaacacgcgcgccacggtcacgggttgccctttttgattgaaggtttgataactcacagtcacagcccgacccactaactgacgccaacgcgttgccgaccatttctgcgcgattgaagacttatctaatacgatttgattgtcacccgccacgtggcctgctttcaactgccgggtcggatcactactcgtccaggtcgtcagttcaggtgcggcatacttttgttgtccaatcgcaatcgttgcgtttgtagctgaaatcccgggttccacgttggtcacgtgcttaaggtcacgcaacgctgtgagttgtgagtcggtgaacaccggcatccgggctgcgataccgccggctacagctggatcatagacggccgcagcctgttcatcacgatccttcgcgttatccgcttggtgcatgaccataattgattgtgggtccaccaacgcattcatttcgtggttaatatacccttttatgccggtccccagaccattgaaaagcatgacggcgaataatccaatcgctgtgccaacgacaattagcgtattccagatccacgtatgccgcatatgcttgaaggccatcatgactgatacccaatacgaaagtggccgcgcaggtagtgacgcaactgtttgcgtggtgccgacattttgggtggtcactggttgtgacttaattcgtccattcaccaactcggcaatccgggtcgccgcacccgccacgcgctgtgaatgggtcacacaaatcaccaagcgcccttcccgtgcgattttttgaagcatggccatgacatcggcggtattgtctgcatccagcgcaccagtcggctcatccgcaatcaaaattttaggatcaccggctaatgctcgagcgattgccacccgttgtttttgaccacctgataattgttgcgggtatttttttatttgtgccgtcaagccaacgtttgctaggagctcgtgtgcccgtcgcaatcggtcaccatggcttaatttagtcatatctaaggctagcatgacattctcaagcacggtcaaatgaccgattagattgtaggtctgtgagatatagccaatgacttcgcgccggtaccgatccagctggcgctcataatgataatcaagtggttgtccagcgatactgacggttcccgtgaaatcatggtctagtcccccaataatattcatcaaggttgtcttaccaccacctgattcaccgacaatcgccacaaactcaccgagttcaaactgcaagttaatgtccttcaagacgttgaatgtttgtttgccaacctgatagttcttacaaatattcgttagttctaagtagctcatcaccaagcccccaatatggcattttgaattagttttcagaataccaccccggacgactaaacaggtcattaaaattttagtattggaagttgccttattaagattttaatgtttgtttcgatcatcacaccgacttataatcagacataaatcatgcttggtttcactaactcggatgggcggtcatttgtaagcatcatgacgcccgcaacccagtttgagcatttatctgaagaaaacacagccaagcctcaaacggagggataaccatgaaaaaggctttcagcttaatcggttccgactatattcgttgcgcgatttttttcgtgattgctttttatgccgtcaccgcagatcccagcggccgttttcacctacattggacgttaaccaacctctatctgacttctgcatacttcttcggccatccactcctaatgtgcctattgccacgacttacccataacccttttcaaatgatttcagtcgcttcacgtgccttgaatgatgcgaccggtcaacatcaaacaatcactcaaatttatcataacgccgtcaatcccgtcagtagccgtgatatgttgctctctcagaatgaatatcgtgacgatatgatgtcgatcagcgtttcctttgtcattcatgggtgcctattgttactatcttggccgttaatcgggcttattttactcggccggggcggtaaagccttgatccgtcgactgataatccacttcacacgataagtctggttccagttacaatagtgggcctccgctacctacttgcgatttctgcgattggttcacaacttgcgttcgccatcggttgtatatcgagttccgtgcctctacggccgcaacaaaaaaacgccacgcattctcgcccggctttaacggccggtttagtatgcgtggcgttcaaatttgaacagttgttaattaattctaattacatttcatcgggagccttaacgccaagtaagcgaagggcttccttcaggacgatgctgacactcttgaccaaagccagacgagcgtttaattcatcatcttcaactaagattttggtgttagcataatacttgttgtatgccttggctaagtggatcgcatacttagcaataacggatggttcgtattccgtgctggcacgtactacagtcgctgggaattcactcaataacttcaaggtatcccaagcggctgggtcgcttaacgtttgctcggttgccgcaatttctgggctaccagctttacgtaagatactttcagcgcgtgcatgggcgtactgcacgtatggcccagtctcaccctcgaaacgaacaacttcttccaagttaaagtcaaagctgttcatccgttcgttcttcaaatcatggaagaccacagcgccaatcccaaccgcatccgcaacttcatccttgttaggcaagtccggattcttggcttcgatttgttcatgagctaacgcaaccgcatcgtccaagaccttatcaagcaggatgacccggccactccgagttgacaacttcttaccaccagaagtaatcaaaccaaatggaatgtggtggatctggtcagcccagtcaaagcccatctcggtcaacacagcctttaattgcttaaagtggttggtctgttcattcccaacgacgtagagggactgcacgaaatcataagtccgtttccggtagatcgcagcggccaagtcccgcgtgatgtacaaggtcgcgccatctgattttttaatcaatgccggattcaagtcatatttgcttaagtccaccacttcggcgccttgactttcttgcaagaggtgcttgtcttccaagatgtcgacaacttcttgcatcttatcattgtagaaggcctcacccttgaaggaatcaaagtcgatatccaagcgttggtaaatcttcttgaacgctttcaatgattctgagcggaaccatgaccacagatgggtggcttcttcatcaccattttccaattttttgaaccattcacgcgcctcgtcatccatttcaggatgatcgacgtcttctttatggaaacgtacatagtattttaataagttattgattggatcagccttgacctcagcttcgcttccccacattttgtaggccgtgatcaacttaccgaactgcgtgccccagtcacctaagtggttgatcttaacgggttggtaatccaacttacttaaaatatttgccaaagaattcccaatcactgttgaccgcaaatgccccattgagattggtttggcaatgtttggcgatgacatatcgatgggaacttgacccgcttcaccgagcttagcatcaccaaaatggccaccattcgacaacacttgatttaaaatatcggctgcaaacgcatctttcttgaagaagaagttaacgtacgggcccattgcaacaactttttcaaagtcactgccatcgactttttcgacgatgtcgatggcaatcatttgaggtgccttgtgtaacgttttggctaaggtgaaggtcggaaaggccaagtccccctgcttagacgtctttggttgttcgatcttatctagaatcacttcctgcgttaaatctggtagtgctggcgctaaggccgctgcgacgagttgtttataatccatattgtcctccttgattgtcttacgggacaaaaaaagtccctcacatatttaaaaacatgtaagagacgagacgtgcccgcggtaccactctaattgatatgacatccacttattatcgaattgtcgtcttcaaaagcgcgcttccaataatgtttagattcggctcccatcatcccgaactcgctggtctaaacgttcatcgtactattctttctcattagacgtatatatttttaccatgcgttagtataacagaattcagccgttttgactagttcaacgttaaaatcatattctgatgcggaatcccatcttctaaataaacgccagagactggttgaaaaccaaatccacggtagaagcgatctaagtaatgctgggcctgaatattgatttgcgtcgtggaaggccacaacgcttgaatctgcacaatcgcctgttggagcaactgctgaccgtagccgtgcccccgcaccgccggattggtgatcacccggccgatacgggcctgctggttggcttcacgcattaatcgcgcatatactagcagctgttccgttgaattcagccctcgtaaatgccaagccatcaagtccgtatcgtcgacttcttgatacggacaggcctgttcgacgacaaaaaccgccactcgtaacttgtaaatctgttgtaactgccgaacagttaactcatcgaaagatgttgttataaattgcatttgcgctccttaacgattactgttgatcacccatccggtcaactatttagtcatcttgatttttactcaataaaaaagaacgggtcattgctgactaacgttcttgattatcatcatctattgacggtccgtacgagactcgaactcgtgatctcctgcgtgacaggcaggcgtcctaaaccaactagaccaacggaccatgcgctcaaggagcttgagaatacaatgactactaaccgaaatgattaatagcaaagcgggtgacgggaatcggacccgcgacgcaagcttgggaagcttgaattttaccactaaactacacccgcatttgacaacagaaattagtatagcatacattttttctgttgtcatggttatttataaatttttagtcttctttttctgggacgactttcggctttggagccgctttaatgagcttagcatcatccttacgaacaactgcgcggtggttatactcgttaacaattggttcgtcagctttttgaaattccttaattaagatcaagactgaattttcatacactttttcaatttcacccttgaaatcatgttccaacgaagcaaacttcttaccagcgacgtaatcgccaatttttaattctacggccatttgtaaactccttaacgtttttcaattcatgccccgtccacaggtgtccgggagattatatgagtgactttaaaataaaattgataacaaatattatcaaataatccacttggttgcaagccttaattacaatttttcagaatcgtttaatattggttcggccccttctgcgaccgtgtttgtcatgcgggcctgttgtcgtaaatcgtggactgatttaatataagcaggcaaaagcacggcacacgaccctaaccaagctaacggttccgaactacaagcaccggcgtaatcgaagatccgaactaagatcagcgctgcaaacacccgcataaagagttccgccgcgcctgccaaagttggaattgcgctgcgtccaagcccttgcaaggtattacgcataataaataacattgataataggatatacgtgctcccgatgacgttaaaatacgtctgggataagttcaataccgccatgtcctgatgaccgacgaagaatcccacaagctgtttaccccaaataatttcaatcaaaccggcagccacactaaagctccccgacagccacatggtctgtttgactcccgtgataatccgttcatactgatgagcaccataattctgagccgcgaaagtcgccatggtgaccccaaaagacattaatggctgagtcgcgacttggtcgattttctgagcggcagtcgtcgccgccactgaattagtgccaagactattcagtgccgcttgtaacacaatcgttccaatcgcaatgatcgacatctgaaaagccatgggtaacccaacattcaggtgagccttcacttccgaccaaactaacttgaagtggcgccgtccaatgtgcaagatgggtactttgacgatgatgtaaaccacacacatgagcgttgcaatggtttgtgctaaaatggttgcccagctcgccccggcaatgccccatttgaaaaccaaaatgaatagcaattccaagccaatattaattaacgcgctgataatcaaaaaccataaaggcgtgcgactatcaccgagtgcgcgaatgatgtttgacaacaggttgaacgcaattggtgccagcatcccgccaagcataatttgtaagaatgtccgcgcatccgcaatgatatccgttggcgtttgcattaacaacaagatatggtcaacgaagatcaacgacagaatcgtcaaaatgatcccaacaattagactaactacgatactaatcgcaaaactgcgccgcactgctttaaaatcacgtgccccaaaatgttgggctgttaatatggataagccagcggttaacccctgcgcaaagccaatgatcaaaaactgaacactcccagttgatccaaccgccgctagggctttaacccctaacgtctgaccaacgatcaacgtgtccgataaactataaaattgctgaaaaatgttaccgattagtaacggaatcgtaaaccaaaaaattaattttagcggttttccctttgttaaatcgttcattttcgcactcctttcattaattaagatgacgtacttgtaatcgttttcttggcgctttgccagacaagcaaactttgctagtatatcaactttagatttataatactagtcctttgttcgcaaatattaaatattttattttaattagtgaattggccgtcttgatttactttttaaggttatttcactgtgctaagctgtcaccgatttactaaccaacacaaaaaaacttgtcagcaggcgctcacaagtcttttagattcgattaagtcacatcacagcaccatataatagtaataggacacaaacacacaaacgaccatacaaatcaaatttaacggaattccgactttaaagtagtccgtgaacttataatgtccagggccgtaaacaattaagtttgtttggtacccgattggcgttgaaaagtctgccgtcgcagcaatcgtaatcaacatcacaagcatcatcacgggtagattttccaacttcgctgcggaaacgaccactggaaacatcagtgataacgccgccgcattggacaaaatggccgttaagaagttagtcacgaaataaatcaggaacatatagatgattggtgatgcgttcccggtaattgctactaatgactttgcgataaacttatcagcacccacattcgacatcgcaagcccaagtccataactactagccactaaaaacaacacgttcatatcgacagccttcacaatatcgctgattgaaacgcatttcgtcaagaaaagtaccacgcacgaggccgccagaccaacgaacaaatcaatcacgcccatagtcgacacgatgatcgttgcaaccaataaaacaatcggtaaaacatccttataagtatgtttccgggacttcactggttgtgaattaaagacgtgtaaatctttgagacttgccagctcgtctggttcaccagtggtaatcatgaccaagttgtccccgccttttaagcgaatacttccgagatgcccttcgaggttgacatcgttgcgtcgaattgcgacgacgacactcccaaagacattgcgaaaacgcgctgatttgaccgtttggttcaccaaactggacgtgtccggaatggagacttcgacgagccgaacccgttcattggtgatatcagtcatattgattttctgagtgcttggtattagacctttaatattcataagatcattaatacaatcaaaatttccagtgaagtaaagacggtcacctaactgtagaatcgtctcatccgtcaccggcacgatcgactgaccactccgattaatcgccactaagaaagagcgcggcaaattacgaagtttggcggcgaccaccgtttgattgaggtgttcaaactcatcgccgatcgtcatttcaatcaagtaatcattcggttcagcaacaacatcgtcaacactactcccataataggtcggtaacatgcggtacccgatcgtcagtaagtaaatcaacccaataatcgtgatgggaatcccgatgacggccaagtcaaaggtaccaaattgtgctaatttgtacttagacaataatccttgtgccactagattggtcgaagtccctagaacggtcaacaacccactcagaatcgtggcgtaggatagtgggatcaagaactttgagattgccatccctttctgcttcgtccaacgctggaccatcggtgtcaaagtggacacaatcggggtattattcataaacggtgaaatcacactcacgctcgctaacaaccgtaataaggaacgcttttcgctgtgaccatcgccgagaatccggtcaaataagtgggtaataatattacttttggcgatggcataggcaataatatacatcagggcaattgtcgctaacccgtcgttagcaaaacctgacagtgcgtccgttggcgacaagatgccgacaaacatcaagaacgctaaggcacacaagattacggcgttcggggtcgtaacttccatggccattaatataaatgatactaataacgtgattaaaacaattgcaatatttaaggtcatcgtcatcgctccgcttcaactaattttcatcttgctgagtcttgcgccactgctcataatcaacctatatccgtcgcgccgttcaacataagaaccattgtagacttggaatgtgaacataaatgcgacatggtatgaaattattctagctttgcggatgattttgcgaccaaattgtgactttttcattaacgttcagtcacaactttgaaaacgaccttttcggactagcaattggtttgtgaacaggcacggttgaggtcagattgaagtcagacggacgctccaaaactggattgtcaaggggaaaaacaatgcctgactgtctctctataatctgttaacggccgtgactgattagcgcaacacgcaaacaggcgcccccgaccagatgagccatctagtcatgagcgcccgttttacattcaattcttattcattaataccatacgtgtgcttcgtcggatacaacgagaagcgttcggcccggtagacataaccaccgcttggaaggcccgttaattcaacgttaaacacctgttgcttgctcttcaaatcgtattcaataatattagctgatttaccattattcaaccaaccaaaatcaattagccgattcgaagcactcaagtaacgattagaaccaataatattggcaaagttcttcttacctaatgacttgccgtaactgccaacttgagaaatcgtcttcgtcttttcattaatatgatattcgacaccttctgaatatttaccagaagagtccgccaacgatttcttggtcgtaccaactgccacgttattgttgaagatcatcacgttgagcgagttcttcttgcccaaggtgcttggatcaacgatggcggcatgttgcccacccggccaagcaatcttaccactagccttcagcaagtacttgcggtacgatttcggccaagctgaagtcttcttaccagacaagatccacttgatcttttcagtcttgtaatcgatcttcatcactaagttctggttgcgacttgaaataatcaagctcttatccgtcttatcataatagacggagttctgatgaaaccagtccttcttacccatatatttactggacttcgtcgcgttgtacttcgtatagaacttcgcaggtaggatattcttcatgttgatgaccttggtgatcttacccgtcttatgcgatataacgatcatcgtgtcttcgacataggtccggccgccatcggaaacggtcgcaatcagatcaccgtttggtaattccgttacgtcatggtggacctgattatggttctgcttcttagaacccttagccttaccccaggccttatgattaaatttataagtcttataaactttacccgtataatccatttcaactaactcatcaaaatatgaattcttagcattcgatttggtccaaatcaataaatgcccattgttaagttgtttgaaaatgtgggaagttggccgcgttgtataccaccgaatattaccatccgcatccatcccgaacgataagtttttagactgcttgctcccagagatcgtcgtccgaaccataaatgtcagcttcgaattaccagtccctaagaccattttttgtttgttagccttcttaacgttgatcttaaaatcggtcaacgccgatggtaacttcgccgttttcagtcggatcgtcttggtcgtcgacgtgccatccttataagtcaccttaatcttgacctggttattcgtgttggcgtataaccccagcacggtcaaatcatgactcgttgtgtacttattgaccgtattagaaattgaagtcttactactcttgccgaccaccgtataactgaccttggccgccttgctcgtctggaaaatcaccttagcggataacggggacaccccgtatgggttaaccttcgtgtacatgttattaacggtataattcttattggcgaccgccttcttcagcgtcgccgtctcactcgactgggccttaatctcagtcttgactagccgcgtgttgatgtccttcttcgttgcactcgccgaacgtaccttactagtggtcgttgtcgtcgcagttgactgatgatatttgtaatacccaaaaccaccgccaatcgcgacaatcacaacgacaattagtgcaatcaaccaatttcgctttttcatttacctttcaccgaccctatctcactattttgtctgacgccaattaattcctcacgaccgctactccaacgacatacccgttttgtcagccagaatattaggctcatacgctgatactggcggtctaaccttcccgtggcaacccacgtgaccgacacagaatgactaacaattgccatgtcaaaccgaatcagtgcagtttatattaaatttattatactcaatctacggccgtcgcagctaatatttgcgcctgcatttgctcaatgacttgtccaactgtcgctaggtcaggaacaaatgccccacttgctaacggatgaccgccgccattgaacgcttttgcgaccgcattgacattgattgctttcgaccgaaaatgtacgcggtattgcccctgtggggtttcaatgaagaacaaccaaactttgaccgtcgtcaggttaccgggcaacgggacaagcgcatcctcatcgccacattccagactcaagtcactaaatagccgttgcggtaagacaacgtgtgccagaccacttggctcaatagtttgttcactcaggacgtacccatacaacttgctgagtgctggcgttaagtccatttcgtggtgactaatagtggcaatatcaatgtccgttgccgcgagtgcactagcaatcttcagagttcgagtggacgtctcaggagttgaaaagcgcaccgtatcaccgataattccggcatatagcttggttgcaacggccgccgtcactgtaaagcaccccgcttgcgccaactcataaatcatctccgagcaactgctataagtttcatcgacccagttcagttgcccatagggatcgtgattcgggtgatggtcgattttaatcacaaaggcacctgttggcaactccccagctaggcgctcatggttagcacaatctacggcaatgactaagtccgttgcttggggggtcactaactgctcatcggttgtatcgatccacgccaaatggcccggaactggggccatcgccacaacgagtttctccgggtaagccgctttgagcaaggcgactagtccaaattgtgccccgattgcatcgggatccggattcgtatgacgatagaccaagattcggtccattttcacaatcgattttgtgatggcagtaatgattgcactagttttcatttgcagtagccaaactgacgtaatgatgttccgccaagtaattcaatacttgttggacggaagcggtcagtggttgtttggacgtgtcaatcgtaatctcaggatcgataggtgcttcgtatggtgcatcgatgcctgtaaagcccgtgatttcaccacgacgcgccttcgcgtacaattgtttcacatctcgttgttcgcaaacttcaagcggcgtgtcgacgaacacttcaataaactcatcgacctcaaggttcgcccgcactttatcacggtcggtccgatatggtgaaatgaaagctgtcaacgtaatcacgccagcatcgacaaatagtttggcaacttcgccgattcggcgaatattttcttcacggtcttcagctgagaagcctaaattcttattcaagccaaagcgcatattatcgccgtctaaaacgtaactaccaacttgttggtcaaataatgctttttcaacggcattcgcaatcgtcgacttaccggaaccggacaggccagtaaaccataaaaccacactcttatgatggttcagcgcttgccgttcggccttgctaacttgcgattgatgccaagtaatattatctgattttaccatgcttagacctcctgttgctgttcacgtttacgcttcaacccatcaatgagaacccgggcaacttcgggacgtgaaacttcctttggtggtacaacaccatcagccagcatcttacgcaccttcgtcccgcttaatgagatgtgatcttcggcaccgtgtggacaagtcttctgcgttgccattgaaccacactttttgcagtagaaggaattatcgaatttgaagaagtgcatgcccatctcatcttcgaccgaagtgattaattcttgggcttcataggtcccgtaatagtcacccacaccagcatggtcacgaccgacgataaagtcagtacaaccatagtttttacgaacgattgcgtgtaagatggcttccttaggaccagcataccgcatcgcggctggataaatgaccaaccgaacacggtcttctggatagtaatacttcagaatcgtcttatagctttccatccgaacgtctgctggaatatcatccgccttggtctcaccaaccaatggatttaagaataacccatcgacgttttccaaagctaatttttgaatatattcatgcgcccgatgaattggattccgtgtctggaacccaacgatccgcttccagccgaggtcatggaacatcttccgagtttctaatggttccatataataatcactaaaagcaccatgatctggcttatgcaacaatttaattgcgccacccaagtagacgtcaccattggcatacaagcgtttaacacctggatgggcttcgtcggtggtcttgtagacgttttgggcttccaattgcttgtccggaacaaacttatcttcaacttgcatcgtgccataaatgacgccgtcagcgcccttcaaagcaatcttagtattcaattcaatcttatcagcatccgcttgggacacacccagcgtaattggtacactccagataacgctactcttcaagtgcatcgtgttgaccactgaatggtaatcatcactgaccatgaagccagtcagggggctaaaaccaccaatcccaattaattccaagtctgagatattccaattattgatggttaaacttggcagctgctcagcagcctgacgcgttgcttcactaaaatcttctaaattaactaacttaccaccatgagctttaattccgtacactgtttgcatattgatcacctttcacgtttaaaatttcatcataattaagacttacaaaatggttcaatgcggcttgctgttgttcatcctgactcgcacgtcgacacaacgctgttaaagttgccgccacctcatccatgtctagcggggtccgcagcttgaacgtttcgtccggctgttcatctcgtaatggcgctgccttggtcggctcagcagcaataaaagccgtcaccgcactttgcgacgcaggggttcccagttcgtcagccatcaggaccaagtatggtggctgttcaaccgcgtgcaacgtccgtattaaatgttgaatcgctaatcggcgctcacgttcatcagtgatggccgttaagtcatctgcaatcaccacgttatgcgtatccgcacctaactcggcactgaccgtcgttaacatttcaacgatttcattgtttttagcatccccaatcccccataacgtctcgcgtttcgcgtttttacggagataattgttcagggcttccttttgctcgaccactaaatagtccaaggggtacgtctgaatggcaatcgtattattattcaaccgttcgctcaaatcttcagcaacctcatgactgtcagcttctgtgccgaccatcttgacttgatcatttcgtaaagtcgtgttgacctgatcaacttgggcctgatcttcgccgaatacaaagaacgttttactattgatcttgacgttaaagtcccgatataaagcgccatacttggctaaatactcgtcagtcatctcgtcgatgcgctgttgaaattcagccgaggcaaagtaatccgggtcagccgcagcttgacggcctagtaagtaaagtgccttaacatcggttttcacgtccgttcgagcttcaaaatcagctaaattttcaccgctatcactcttttggagtgctggatcgatgaagtcatcgatttgcgcttggagtgccgcctcgtcgctcgtccacggtaagttaaattgggtcgcgattcgtttcaacgtcgtcaacgtctgaccaaacaaatcttcgtacgtgactaaaatgcggtgctcacggtcggtatcacgtaatgaaagcaacgtccggacttgccactgacgcattgcgagcgtggtatcacggtgccaggcgcgctcattcgaattgaccacgtccatcggattacgtagcaagacgatctcagccggctgaacctcaacgtcagccaaaacacgttgccacaattcgatataatcattcatccgtgggtcttttatcgccagatactgttcattctcaaaaaaatttcgtagatacgtggttaacgccgcccggtcctttttaatcttcgggctatcatagtaacccttgaaggctggccggtaccggatgcgacttccaagtgacttgtgaatattgatgacatctttattttcaaaatagcctttcggattgatccgcttactaggtgccaacaggttatcagtcccgagagaaatgcccatcaaattaacacacttagtcattaccgatgttccggaacggccactcccaagaattaatacggcctgcttcgtttgttgacggtgattaaacaatcgttgccataagctttgactcattcttcatcatcctaatcattattatttatttgatctttggtacttcgctagtgggctcaccaaatatactagcaagttaattgtgaaaataagtactcttaactcgaaaaaaatatgatgatttcatgaaatttagtgcttttagcaagtacgcacccggtaatctgctgggtgtagattaggacatttccccacagttttgatgaaatattcaaattttaggactattaaaatccctttataccagtgcattgattaccaaagcacctgatttcactcaatatcgtcagcacccttaaccaacttaatcctcaattgaatgcttggcgcaacgcccctgttatgaagacctaaaatgtcaacccaaccatgtgggagctgcgtttcaaccctattcaccagttcaagcggtcggaatccgacaacggttgctggcaaatactagtggctgttcacaccacgtttcctacttgcctggctccaaatagcgtgtgcgtcacattacgccttgaatatgttcaaaagattaaaaaataatttgactaaattagaaattggtggtattttctaatcaatcataaaacatgtaaacgtcctgaagaggaaagtaatcatcgctacccgtgcagtgagtttggaatagtgcaaaccaaaccggaagacgattgatgaaaaatggcctccaaacggcaccactgagcttttgccaggtgatgacagttagctactgttaataagcttccgtatgaaacgtacggattgaggtcaatatcgtgaggtgttgacaaattaaggtggtaccgcgaacggcaacttcgtcctttaatcaggatgaggttgccgttttttcgtttaagataatttgctaaatataaggagtgggttttaatgacaattattaatagtaacttggggtatccacgtttaggtgaacatcgtgaatggaagcacttattggaacacttttggaaaggacaattagacaacgtgacctttcacgccactgctaaaaaattacgcctagctaacttgaaaaagcaacgcgacctgggagtggactatattccggtcgctgacaattcggattacgatcacgttttagatacactagtcgcattcaacgcgattccaagtcgctttggtcacttcgatcaccagttggacttgcccgactactatgcaattgcccgtggaactgataccgccgtggcggccgaaatgacaaagtggttcaatatcaactatcactacattgttcctgaattcgatgacgtgtcctttaagttattagataatcgctggctacgctactaccaagaagctaagcaagaactaggcattgatggtaaaccagtcattctgggtcccatctctttccttaaactgggtaaacgtcacggacagtacttggatgacgccgccgtcaacgaactattaccgcagttattaccgctttaccaacaagtgtttgaagaattagcgacagctggcgcaaaatggattcaattggatgaaccgaccctagtcaaaacaacgacggttgcggaactcgcaccttatcaaactgcacttgaacatttgcatgcggctgtcccatccttaaaaatcgaactccaaacttattttgacagccttgatcagtacgaccaaatcgtgacctggccaatccaagcacttggactggacctagtacacgaccatggtgaaaacctggcgcacttggtcgaccacggcttcccaaccgacaaaattctcgcagctggcattattgatggacataacgtctgggctagtgatctacaagcaaaacttgcattagttcagcagttacggcaaatcgtgaccgatgatcagttatggctccaacccgccaactcattattacacgttcccattaccaccaaaaatgaaaccaaggctgaccccgtcttactgggcggcctggcctttgcggaccagaaattggcagaactgcataccttaaccgtggcagccaatcagggggttgccgctgttcaagcagtgttcgaccataatcaggccaacttgactgccctcaaccagtccagtcaccgcaacaaccagtcggttcgcgccgctgaagcgcaactgagtaatcaaaaattcgaacgccaggcaccatttgcgacccggattaagttacaacacgaccggttacacctacccctcctgccaacaacaacgattgggagctttccgcaaagtgcgcaagtccgagcaaaacgagcagcatggcgcaagggtaatttaaccgatgccgattaccaggcattcctgcatgctgaaaccaaacgatggatcaagctacaagaagacctcggcctcgacgtcctggttcacggtgaatttgaacgcactgacatggtcgaatactttggtcaaaaactgactggcttctatgcgacccaaaatggttgggtccaatcatacggttcacgaggcgtccggccacccgttatctttggggatgtcgcttacacggaaccaatcaccgttgctgagtccgtttacgcgcaaagtctaaccgaccagccggttaaaggcatgttgacagcaccactgaccattatcaactggagttttgttcgcgacgatatccctagggcgcaggttcaaaatcagattgctttggccctccggcaagaagttcaaaacttggaaaaagctggtattaagattattcaagttgatgaaccagcacttagggaaggtttgccactcaagcagcgccattggcaagcctatttggatgaagcagtgtactcatttaagatcaccacgaccggcgtgcaaaacgacactcagattcatacccatatgtgctactctaactttgccgatatcatcgataccatcaaagcccttgacgcagatgtcatttcgattgaaacgtcccgtagccatggggagattatcagtgcttttgaacaaaccgggtacgatcaagaaatcggtctgggggtctatgacattcacagtccacgcgtaccgagtgttgcggaaattgaagccaacatccaacgcgcattacgcgttatcgacgcccggcaattctggatcaatcctgactgtggtctcaaaacccggcaagaatcagaaaccctagcagccttaaagaacatgattgctgcgcgcaacgcgatccaggcccaattgaccactagcatccactaaggaggtggcttgaatgaagtttaaacaagcactccagcaacgggtcctcgttgccgatggcgcaatgggcacccttttatatggtaactatggcatcaattcggcttttgaaaacctgaatttgacgcatcccgacacgatcttacgcgttcaccgatcgtacattcgggctggtgccgatattattcaaaccaacacctacgctgcgaaccgcctaaagttgacccggtatgatttacaagaccaagtcaccaccatcaatcaggccgctgtgaaaattgcagcgaccgcacgggaacacgcggatcaccccgtttacattctgggaacgatcggtggactagccggcgataccgatgcaactgttcaacgggcgacaccagcaacgattgctgccagcgtgactgaacaacttaccgcccttctagccaccaaccagttagatggcatcttgctcgaaacatattatgatttgccagaactgctcgccgcgttaaaaatcgtgaaggcccatactgacttgcccgtcatcacgaatgtttcaatgttagcccccggcgtcttacgaaacggtacgagcttcactgatgccatcgtccaactcaacgctgccggcgccgacgtaatcggcacgaactgtcgcctgggaccttactatttagctcagtcatttgaaaacttggcgattccagctaacgttaaactagccgtttacccaaacgctggcttgcctggcactgatcaggacggtgcggtggtctacgatggtgaaccaagctatttcgaagaatatgccgaacgctttcgtcagctcggtctgaacattattggtggttgttgtgggaccacacctttgcataccagcgcaaccgtccgcggtctaagtaatcgcagcatcgttgctcatgaccagccggctacaaaaccacagccaccaacgctcgtcacgacaaagagtcagcaccggtttctgcaaaaagttgcgaccccaaaaacggcgttagtcgaactcgatccaccccgcgattttgatacgactaaatttttccggggtgctgaacgattaaaagccgctggtgtcgatggcattacactgtctgacaattcgttagcaacggtccggattgctaatacgacgattgcggcgcagctcaagttgaactacggcatcacgccgatcgttcacttgacgacccgcgaccacaatctaatcggcttacaatcagagatcatgggtctacacagcctgggtattgaggacatcttagctatcactggcgatccggccaaactcggtgattttccgggagccacttcggtcagcgatgtgcgctccgttgaactgatgaagttgatcaagcaattcaatagcggcatcggaccaacgggtaagtcgcttaaagaagccagtgactttcgggtcgcaggcgcctttaatcctaacgcttatcgcacttccatatcgaccaagtcaatcagtcggaagttaagttatggttgtgactacattatcacccaacccgtgtatgatcttgcaaacgttgacgctttggcggatgctctagcggctaatcacgtgaatgtgccagtgttcgttggtgttatgccactcgtctcacggcgtaatgctgaatttctacaccatgaagtccatggcattcggattccagagcctatcttgacacgcatggcagaagccgaacagaccggaaacgaacgggcagtgggcattgctattgcaaaggaattgattgatggtatctgtgcgcgcttcaacggcgttcacatcgtcacaccgtttaaccgctttaaaacggtcattgaattagtcgattacatccaacagaaaaacttaattaaagtacaataaaagaaaccgccgccaacacctactttcatgctaaaattagacatgaattgtaaatgtggaggcggttttgtcatgtacttattagggcacattattggttggctatggctcatgctgacggttgcgattggtctcagtcgtcactcagtcaaatcagccaatcgctttttgattcttagtcgcatcgggtacctgctaattatcatcactggggtggccttggcaatcagaaccttatcaggcaactggtggttgaccttgctaaaagtgatactcggtcttggcacgattggcctcattgaagtggcctttgcccgcaagcaggaaagtcatttgaactctggacttgtcaccctactcgtctgcggcaccttactaacgattatttgtggcatcggcttgcactggcaattgacgggaaacttgatttaaaccatcaatgtcgttgaaattactgcctaacgatccaaagtgatgctatcaaaaaaaacaagtcgtccgttaggggacgacttgcttgcctgatgccaattaattgttacgatcactcaaacgtttcatgatttgctggcgcattcgcattttctggttgctttccataaaaatcagccgcgacgtcccatagttaaagagtcccacgagaacctggtcgatgattttaacaagtaggggtgcccagaacaacaacgaaatgccgacgaacatgaggaaagtatcgaaaaaatatgataagcctcgtgtcaacatgaaactaatgaactcgcgacaccagtgccaaaagtcttgcgatttggactgaaagaccaccgctttgttggtaaaaaaactaaacaaagttgctagcacccatgcgattgtgttggaaaataaatagtgttccgccaagactgagtgtagcacccagaataccaagacgttcaccagcgcggccataaagccaaacagtgcgtatttccaaaaatattgatattgatggtagattttaatcaaccactgcacgccgttcgccaccgtttcttctagctcaaaaatattatacaatagcaatatcataccttgttatcggccccctgacaagctcagccgttaaattggcgcttagtgggctggtcgcttatacttaaactaatctgcaattctttttggagtgaattatttatgagaacttatttatttattgccgggctgatcttagcctgtctaattttaatcattatcttaattgcggtgttagtccatctccaccatgtcaatcaggcggcggataaacaggccgcgttgcttaaatcaattcggcagcgcctcgttcatcaaactttgaccaatcaggaacaagaccgtcaaattaccaagttgcagactcaaaataacggttttcggaatcgcttgaatcaagccgttccccatccggtggcggttcctcagacgcgccggatcaacgctaattcgcgtgcaattttccgctcatacgtcattggtttagattactaccaaaaagaatttgaagccgcgctggccgatgcgagtgcccgaggttactttaaaccttatggtggctataatgattctggtctgaaagcagattatctctatgccaagaagtaccgtgtcgacgctaacgctaacatcggtgaaattcagttagttgaagaagttgatggtgctgagcgatccgtacgggttgaactaaaagttgcggagcatggctataccatcggctatctgccgaaaaagcaggtcgacgaagccttcaacgtgatcgacatttacgctaactcggtcatgaccctctcctccaaaactaatttaactggtggtgaatggaagatggcgatcgatgctgtcgatgaaatgcagtacctgaatgatcccaacgctcaaaatcgggcccttcccgattacggtgccattgacacccccttaaaaatcaagaccggtaaaaagtcctacttcctccaattcaccttatatgaaatggaaatcagcaatgatgagattccattgtatagtttagtcgacacagtcgacggtcaacgtggctcgattgttgaagtcgatgctggtccgatctcatatgtgatcgacgtccaagctgggccacagactgggtccaagattacggtcattcctgaacaaattgaccgcgtcatttgggtccctaactggaaataggtcaatcaccgttatcaagtgaggttattttaatgaaaaaattaatcttagtgatcctgttacttctgtcaatcggtgtgatgaccatcgttgattcgaacatcatccgacaagccccttatccgagcttgtcccaagaacaaacgaaataaggaggtccgaacgtgacccgggcaattttaatcagtttctgcgccctattccttttagcaggctgcacttcccaagctgagccaagtatttccactaagcaagcgaactcagttgcagccgctaaccgcgcggagcaaactagtcgtgccaatgcagcggctgatgctagtgctaagaagcaatctggtgaccattatcaagctgctgacgaccatatcactagcgcaactagtgcagtggccgccgtcgggcaagtgctcaacgatcccaagcaacaaacctttggtgtcgtaccaactgccaatcaagatgcacacggccaccactattatcaggtcgatgcttatcagaaaacggctaatggcggccgggggcattatctgaatagttactttgtttatttagatggtagtatcacgaccaaacaagcaaattaataaaccgacaagttgtcacccattcaagcagtgtcgttgaacctgctgggatgggtgactttttggatgcattttttgccggtagtaatttcagtatttcggcgtacagttattccatgctaattaaggccagccccagtaactaagcaaccaatttgcaattacaattaatatcaactgcataaatatagaaaaaggtttatttttttgttacttttcgctataatggatattgttgttaaagcaactgccccagtggcggaactggcagacgcgcagcgttcaggtcgctgtattggaaacaatgtacaggttcgaatcctgcctggggcataattagtctatgagcaataaaagagccacggtaaacacttatttactgggctcttttattttgtgaattttaacaaagtagtgcctttgcaaagatttttacgcatttcttcaataaggatgaattcataataattttgctcaacctataagtgctggtccacctcacctatccgttagacacactaaccacggcaaacgggccgtagctcccattgttaggggaactatggccttttactaacggttaaataattgttggtcacagtagaaccttcaccaacgcttcagaaactgaggcgattaatttctgaaaatccacaaaaagtcctatgcaacccacgattttagtgtatactagatatgttgacgaaaagttaacgtgatggcggtagtggcgaagtggttaacgcaccggattgtggctccggcacgcgtgggttcgattcccacctaccgcccttctaaaaaagcacgtgcaattgcacgtgctttttatttaatcaaattttctaatcacgccttcagccaagccttcaaagcggctccagtgcgtgaagtgggcacgtcaactgctgctcgtggggttccgctatactgaattcggccgccatactgaccagcatccggccccacatcgatcaaccaatcggcctggctaattaccgccagattatgttcgataataatcaacgagttaccagcggccactaaggcatcgaataattttaataagcgttgtgtgtcttgcaaatgcagaccggcagtcggttcatctaacaagtacaccgttccctgcttgcctagctcaaccgccagcttcaaccgttgcagttcaccacccgacaaagtggtgagcggttgcgccaatgttaggtaacccaaaccgacccggtctaaattcttcaatggctgagccactttgtccatcgtggcaaaaaaagctaacgccgctgtgactgacatctggagcacgtcggcaatcgtcttaccctggtaagcatagctgagcgccgtttcattataccgcagcccatgacacaattcacatgtctgcacaacgggatccataaaggccatattcgtgatggtcacgcctttacccttacaccgcggacaagcacccttaccattatagctgaaccaactagttgccacgccattggctttcgcgaatagttgtcggatttggtcgagcactcctaagtaagtcgccggtgttgagcgaatattcaggcccactggtgtctgggctaaatcaatataagccgtctttaattgccgttttagcgcggtaaccagcgaactcttccctgaaccggccacccccgagacgaccgtcatcacaccgaggggcatgtcgacactgacatcgtgcaagttattttcattaatatggtgtaatgccaagtgggcctggactggtcgttcttgaccccatttatgcggttgtcgcaaccaccggcccgtcaacgtatcagaagccagtaactcgtcataagtcccggtaaaggtcacgtttccaccagtgcgaccagctgcaggccccatctcgacaacatagtcggctaacgtaaacatggctggattgtgttcaacaatcagaattgtgttacccttatccttcagcttcgttaacgcttgcttgattaactgaatatcatgtgggtgcagcccaacgcttggctcgtccaaaatgtagaccatatctactaaggcgctggtcaagtatttggcaatcttaatccgttgcgcttcaccaccagataaagaactggtcccacgatccaatgtcagatagcccaggccaatatcgaccaacgattggatcttggtcgtcagctcccgcacaatatcttgggctaacggcgcatcaatcgcttgtaaaaatgccagaacatgctttaaatccatagccgtcacctgagcaatgttgaccccgttaatatgattggtcaacacgaccggtttgagtcgtgtgccatcacacgttgggcacggtttgcgcgtgacgatcgccgcaatcgcatcgcgatggtgttcggcttccttcttaccaataatcgagcgcttgatccgcggaacaacaccttcatacagggccgttctaggaaaaccttctccaggatgggctaatttctgttgcggtgcgtgcatcagtaaatcgtattccgcagcactataatccttgatgggtttatcattgtcaaacaaaccactcgtcgcataacggcgccaacgccacgtatccggtgcaaaactcacaaacgtgatggccccctcatttaatgatttctcaggatcaatcaattgctgctcatcaatatcgtcaacataacctaaaccttggcaggttgggcacatgccttggggtaagttaaacgaaaaactgtccgaatacccgataaacggttccccaacccgtgaaaacaagagccgcagtaacgaataaattccagtataggttgccaaggttgaacgcgcattcttgccgaggcgttgttgagcaatcacaatcgcaacgggcaagtgctcgatatgcccgacgtgtggttgaccatacttcggtaaatattgttgcgtaaaactgggaaacgtttcattcagttcgcgccgtgacgccgctgcaatcgtatcaaaaacgagtgacgacttaccggaacctgacaagcccacgaacaccgtggttgcatatttaggaacgcgaagactaacgtgctttaaattgttttgggtagcgtcgtatacgtcaatggcgccatgtggaaatgaataactggtcatcaaaccttcctttctatcacttgtttgctatcaaaaaaggacctgaaaattcagatcctaagtatcagactgattcatcaacgagcttgacgaccgtcccatagccggttacgatcaaaaaccgtggtgcaacactcatctgagcgacttcagtattgaagttcacataaattaacccgtcgccaccttgatcctctgccttttgtagcagtagtggcttgacttgttcgattaaatcgtcaaaccgttcaaactgatcaacaccatcagattcaaacatcaggtgttttgtgacggagacgacgcccttaatcatatgggagcgctgtaaatcaccagttgtcataaacatttttccaaccccctatcactttaattttacttgaaaacgacgtcactcgcaaacgtaaccaattatttgaccacaagtttttaaaggactaaattaatcgtagggagtgatagtttgaaaacagcaacacaacttttacaacaatatacctttgagcccgttaaggataaaatgcgggtcgaacaacacgccttagccgtccaacatcaggatcgcgccattccattcggacacttcaagatccggttgaaaaatattgataatcaacaaacttatttattggaattaaagcaagcgttacagttgaccaccacgtctgggttccagttacgttcccgactacacggggtgcatgtcaaacatgcacaacacatgatgccgaccggttatcacgtattggcatcactgacgattaaggccgccccacgtgacgctcatgaatttgtacatgacaaaacaaaaatcgcctgcctgattccagttggtgatcacgcggccaaaacattgccagcacaagttccactttatgcgttcacggacaaccatcaacttgccatcaatcagcaggccatggcccagttattcctgacatgcattaagtcccaacaacgccaacaggtcaattaattaacccgcttttataaataaatcgttcgaaaacaatgtatttgcgcaatattaattgcatttggcgaattaattgcgtacaatgtactaaaatagatagtaaaggaggcggtttgatggcaaccccaacaaaaaacattttgctcgacgaacagctctgttttgcgctctacaccgccagcaaacgatataatcatttttattccgaagctttagcacctttcaagctgacttatccgcagtacatcactttattggcactctgggaaaagagtccgatgacggtccgggaacttggttcacacgttaaccttgatagcgggactctgaccccgttattgaaacggatgcaaacccaaggctgggtcgaacgcaagcgcgatacggacgatgaacgccaagtcaacatctcgttgtcgcaaaaagccatcgatgctaaaccagagatttttgcccacgttaattcttgcatggatttacttggtttagatgaagcaacctataaccagattcgcgaaacggttaactttgcttccgaacacatcaaaaatgccgatcctaaaaaggtcgactattctggcgaagcattctaactgactgcttaactaggtcgaggtttttctaacctcggccttttttgttgcgattaaaccaattgatttttgacactagcgtcactttgttttgagactagcccgttcaaggctaatatgaacgatcgttagctagcaccgatcaaataattatgggtgtttgcagccacattaattccgcaaaaaataaatcaaatgataaaacccagttgaatttgatagtttagaccgctaaaaataatttaagtatgtattaagggacgattttttgcaggtactgtattcggtgactttggggacgtgcaacaaaaaaatgactctaccgcttagtagcagtagggccaaagagttaggtttaagtacaatatgggggattgtacttgctcgtccatccactttgggggagtaaaatgaacaagtgtataactattaggtacaagtatatactattacataattgtgaagaaagtgtgaagatttgtccgaattatgcttttttattctttatctttatagagcatcaaccattatttctacaattattatatttttagcattcaaccagattaatatcatccgcttgtgcctggcatcgatgcctttctcagatttgcaaatccgtgtcgaaacctgaacactgcggtaaaatcaaccatgggaggtgaagtccgatggaaattattgaccgcggcttggggtggctcggacgcgtgttgctcactgctggcctaattgttggggtcgtgatcccaccaatgttacttaaattaattaaccaattatatcgccagcatcagctcacagcctggcagatcaccctggcaggtgtctatctgttaatttttgtgatcctagcactggcggcaaccgccctaatgcggcactataccggcaactatcaatcagaaaacttacaataccatgactggcaaattattggaatggcctatctcaccatcttaatttttgagggcggctttcaatttataaaccagcttctgtatcaccagaatcaaacacaaaataacgccgccattaaaaatttaatggccggcagtcctctgtcgctttggcttatggcgttgagcgccgtttttttgactccaattgttgaagagttagtttttcgtggcgttctgactaaccttttctttcaacaagaatggctcaaggtcgggctcagcgggattgttttcggtagcctccatagtagttcaaccttaccgagcttcctcatatacgtcaccatgggactcgtgctagctattgtttatcggctgacccgtaaaattcgcgcggccattgcgctccactttgtgatcaatagcctagcaattaccatcatgttactgcattgacgaccttcacgcacaacttcgtcacggcactggccaccctaacttttataactcccctgccagactaataacacgtcaaaaatcaaaaatagcacattaaaatgtaatagccaccaattcatcaggcctttctcacgcaccattcccagaattgccaagccaatgccaataacgggaatcaaacctccttgtaacaaccgataaatcggcaagtaggcccattctgatagcaggattggtcccgttaactgacccaataaaataaacaacaaaaataccccgatattcaacaatgagcaggcaaacgccgtctcggtaatggtgcccatcgcgaggcgaaagtgaaattgaaatcgtaaaaccagtgtcccgatgattccaatcaccaaaataatgccaaccactaacatacagccacgactccttttcttgtcattgttactgtacgctaaaatcaacaatgcgcctagcgcaaaactagaagcttaatgattttttagcaaccccgtaacgcgactaacaactaaataaattcgagtagttcaccgtagcttttatatggcacgctgtcctagtcattaaccatcaaaaaagagccggcaacttgcccgctcacccatctaactctttgtcccggttggtactgttagtactttggcttttagccccacgactttaattgtaatccgcttatgaactggcattttaacatagaattgaccactctgcttattcgaaataacctgacggacatgtttcccactctttaaggtgacaatgacaccgtgcttggtacggccactgattgttgcagaggtagcattttgatggtaaaccacctttgacacagtgagccgatgaattcgtcgatgataatcaccttgcaagctgtattccgaaccaaatattaacaaacaaccggccaaaatcattaagattagtgaccagaactgcttcatgacgccacctccagaccagctcccacagctggcatttaatagtctaagcatacatgcaaattaatctaaaaagccaaaaaaggtgcaaagctcataatagcctgcaccaacgtcattaaaattcacttttgattaacgattttgttacattagagtcttaagcgaagctagctaaacgtgactgccagttcggaacgcttgattaatgcgattaaatcatgcattttacgaatcgcaatatcgaccgactcgccattttcaaagtagccaagctgatgttgcttatcaattcgtactagcatttgcgggttcaccaagaaactcttatgaacccggaataactctgggtgggccacggtttcatcactaatcttaccattgtattgaacaattcgatctgttaaatggagaaccagcttattacgaactgctccagtctcgataaataacacctgatctaatggaacattgaagagctgaccacccttagagtaagaaaacatggccttgctggtgactgcttgcttggtataacgttcataagcaacccgaatatctgtctccactttggctttgaccgtttcttgacccaaatctttcacaataaagtccagtggttcgattcgtcgttcaaaggtcaaaaaggccatttcagaatgggtcgacacgaagacaatccgcgcattaacatccgcctcgcgaattcgagtcgccagtgctaggccatttaagtcttgcccaggatattcaatatctaaaaagtagagtccctcaagatcggaattggtctcgacatagtccaacaacgtttgtgcttgtccggttgctaaggtcagttccatatcaaaatcattaatcataatatgattcttaatgatttgctttaaggttgctaattgttcaggatcgtcttccacaacaaaggtctttaacacgctgctcactcactttcaatactaataataaattcgaatcgttgatgggagctcacttcataagtcacgttagctaatggatctaacaactcacgaacggttgctaacccttgcccatgaccagcacctttcgaagtatgcccagcaaccatcagctcatccaggcgctcaatcggatgattcaatgaattggcaaaaatcaactccaccatgcggggatacttaacaagtgcgaccgcaatctgaccaccactctgacccttcaccgcttcgatggcattgtctaacaagatgccactcacccgtgataacgtcactgaatcaattgcaattgccgcaatcgggtcgttggcttccaagcgtacttgaattccagcttggcgcgcaacggaaaacttactctgaataatggctttcaatggtttgtccttgatttgttctaaattgtcaaagtgtccaaaatcacgatttagactttgcttagacttggtcacaacttgacgaaaatattgttgtaattcaggatcatcagctgtctgaatatactcacccaaggacagtaagatgttttgataatcatggcgaaacttacgtaaattttgataactattttccaaatttttgacataaatatcatattgttgccgttccaaagcttgccggttattttgaacccgcaatgtataactatagaacaggtaaagaaacgttccggcgttgatcagcaagatagccactagaatcaacattagaatccccaaaaatcctgagccaatattataattatccgccgcagtcgtgatggtaaaaaacgcgaccgcaactacagccaaagcactgacaatcacgttcaacgttagcccgtctacaaattgccgcggataacgcttctttaagaccttgaaactagcggcgactgccaacatacaagctgtgacaattgtttcaccgatggcttcaaatagccagccactccagtcattcaaacccaagttaaataagtgaaaaatcgactccgtcgcataattgccaaagaaactaaaaagaatgtaggcgagtgtggccgttagactcgtcacaataaagtactttttgcgccgtacaaacgccagtaaccccatgttcacaatgaacgtgatgatatccgaatagtcgtcatacaacatgtagatcacagttagaagtacggtcataaccgcaacagtcgcatagactcgcttctgtcgaagctcacgattgattaatatctgcagtaaaaaaaccaacatgaccgagtaccaatggtcaaaagctgcaatataccaatagacgtaaacgataactgctcccctccccgcatgatgctcaatactaccattgtagcgaaatacggccagtttgtatatttgtgcgataaaaacttaacaatctttaccaaatcgctgactgaccaattaatacccgtaaccgtctccaaagcttgctatacacgcctttattgtcttaaaagacacacatgatcgacggtataaaaaaagcgacccccgttcattaacggtgccgctcacagatcattattagtgaaaatcacccggcataaaactctcgataaccgcggttgtattaaaggtttcaaaactatggaaactggcttcatcaatttcagcgtagcgaatagcaatttgtgggcgctttgcaagatcgaacatatcaacgtaattaaattcaatatatttcttatgttcactatgaataaagccagcatagctgtcaccatgttttttgattcgaccagatagctgaatcacttgatcgtggtgaaaagcttgcttcaacaatgtttttaagagcgaatgtttagtcttattctgcttcttcagcagcttattcatcaatcgttcagtgttccaaacatcataatagccccgttgcttagccagcgcaatgatcgtcgccatgctcttcaaataatcagtgtcactaattacgcgggctaacgatgccttacgaaagaccactaacccatctagttcaccatcgacattaacggcttggaccagcacaaacttctcatcctgctgaatcacatagccaacactaaattgctcattggttcccttggaatagatttcaacgaggttggtattcttaatcgctttagctaaatcgtcgcgaatcgcactcatgcgtgttcccccattcagtaatttgtaacaaataatttatttcatactaccacattttcaattatcatgataccacttgtaaaagttgaacgccaaatggcaactttcattttctaaataaaatttgtactataaaataaacttgttaataacctctgctaacgcgtcatggttgttatcagcgaccgtcacgtacttagctgcggccttgactgcatcgataccattggcgacactcacaggcaatccgaccgccttcagcatggggagatcattgctgttatcgccagctgcaataatttcatccgccgtaattcccagtagctttcctaattgaaccgctgcggtccccttgtcaacgccagccggattaaactcaacgtaacggtcggacgaataagtgacggctaatttgcttggatcaacaatagcttcaacgtctgcgcgcatttgcttgcggtcagtcatcgttggcaaggccataataatcttcatgacgttcatcgttttgaattgttcaaagtccggcgtcgtcatagttgtgaacgtcacgccccggttttgtagataatctgaatcacttggaaccggattgtaaatatataacgtatcctgcgtgtacacatgcgtcgccgcctgctgattcgcaattcccgcttcaaacacccctttagcaacctcatatggcatggcattcaccgccaatggccgattatccttattctctaaaatcaaaccaccattataagaaatcgaatattgatgtggttggtcccgcaaccccatcgtctccaaatcgttctgaaacgaggtataactacgaccagaattcggcacaaaataaacacccttagccgccgcagcttgaattgccgccgcattcttttctgacaacgtaccattgtcattcatcagggtctcatccaagtcacaaacaatcattttatacatattaaagttccctctcatccgcttgaccatctgaaacttggtcattttaggtttactattccactctagcgaaagacgtgcggaaatgcaaccgctttatttttgcgttgaaatctcaatgtttatccatacatacgcgcagtttttagcacagcgtgcaattataggtgctacagccatttgtgaaatttaacttagtcgtttgttaagacatttcaaaaatgcgacctgctaagaatcaatttctaaaactgaaacaatcaattactgtgctcaatgacccaactttcaaaaaacaatagctttatatgattacgaaaaggtaatcgcagtaccgatgttttaattggcagtatttcttcaatatgttgttaaagccagtacttttgatattattgattgcttatcattccctactgattaggcatcgtacattgacagggtttgctgggaacaggtgccgtgatatggtgaggtaaattcagtatcataattgcacccacaaccaatataataccaaccaaggcctgaggaaccaagatttggtgcaagaataacatgccaaaaagtacggaacttattggttcaaatagtccagtcatagttgccagaaatccgtctattagctttaaactttctaaataaagatcatacgcaacaacggtggctagaataacaatgataagaaccgctaaaagctgcgtttttgaaaatctaactaaatttggtaacggtgtgtgaatcaacgctatcacaccgccaataactagtgcccatcccaaaatatccactgcggcaatttggtttaacaatggaacaggtagtttggtgtataagataaccccgatagccgcaatcaggccaaaaataattgcttccggttttattaatccggtcttaaatccggattcaacaataagccagattcccatcaatgcgcttattaagctcattcctgctaataaactgggaagtcttttcgctttcagcgcggtaaatacaagcagaataaacggactagtggactgaaagacagttgcaactgctgcattactgtaattaatcgcagaaaaaaaggcaatttgtgccgtgcacaagccggcgatgccgtatatcataattcgtgttaaaattcgccaatgtgtccaaatctttttcgtgctttttctagcctgcttgaaaaacaagttacgatatagcaacaacattgccccaccgattaacagccgtaacaatacaatctgttgcggagtcagaacttgctcacttaacaaaggctgtgctagtattccacctagcccaaataaagcggcactaataataccgcacagagttccaactaaacgcttcatacaaaagtttctcctctataatagttcaccattagaaatagcaacactttgattgtggtagtcatcattaaataaggcattggctgctgccctagcaaacgtatctcgattaattgcaaattcagactccggtatcgctctaaattcaggaccgtgcgtaataatttttgtttcgggtccattctgaattagtcctggtctaaagattgtaaagggaataccactatttgcaaataacaacggtttgtctaactgatcatgggtatactgaggatgttgcgtgcgaacagccgataaatagggtaaattaccagacaaatattcaccgtaaataccgcctgccgaaatatcgactattcgtttaattgttgcctgtgtttccttaattgcacgtaacaataacttaacgtacggaccagtgctcagcccaccaacggaatcataaatataatcgacatcctcgagtgccgctacataatcagtatatttcgctgcatctcccagaaaaataacatgttctcgtttctgataggccgggacctttttgcgattacgaacaaataattttaaagtcatttctggataatcacgttccattaatttaatgaaggcctgggcagttggcgaagttgcaccaataactaaaactgtattcatcgttcatcggactccttttccatttgctgatatgttttaataaacccgttcatgaatgcgacctgtttcttaagttcagcctgttttttctctaattctttcagatgatgttcaacaatcgcttgacgcttttccgctgttgcttgcttgccttgaacaactaaatcagttagttgacgaatatccttcaacggcatttcggaatcaataaaaatcttcaaatttttcatccaaatcagattcttttccgtaaaaacacgatacccattctcagatcgtcttagattaggaattaggcccaggcgatcatagtaatggacctgagagacactcatcccaactaatactgaaatctcttgggttgtatatttggcgacttcatcatccaattttagttcctccttttttcgcatgcgattcattataaactatcaaccatacttcatagcaaacttttccaatcaaattggacttgggtgaataatacccacaataatagccgccatttttgacgtcggccaaacggtgcttataactaagatgcaactaacgatcacatcaatatcatctggttgcatttcttgttagagtagcttacgacagggtgatagaaaacaaatcataacattatgtgctaccaaagcaccgtgctaaaatcaaatcagtcaaaatgcaagtacgtgctaatactcggcaaataagccagttaaggagacaccatgaaaacaaaacctgaagccttaatgcgcgacttatacaatttaatcatcaacccggcgacgcgtgactgggaacgccatttactagtccaggccaagaataatcggcaacagctatcgccgactgggcaactaaaacagctcgaagctgatttgcgaccattagctatgcggaataacttgaccccggatgttatggacttttatcttgccatcactggcaacgcacccatgccgactaaaaacaatgtatcggcttacccaccccttagttcgccttatgaagaacgggcagtctttgctggtgggtgcttttggtgcatggttgagccctttgatcagcgtcccggtattaataatgtgatttctggttataccggtggttcgtgggcccaaccgacctatgaacaagttagtggtcaatatacggggcacgttgaagccgtggaaatcagatacgattcccgtaaaatctcgtatcaaaatcttgtcgatatttattggcaactaattgatccgaccgaccgctttggacaaatcaatgatcgcggtagccaataccggccagtcattttttatgctaatcaacatcaattgaccattgcacaagcatccaaacaagcgcttgtggactcgcaacgttatcaaaaaccaattgtcgtggccattgagcccttacagcaattttggccagcagaaaattatcatcaggatttttaccgcaaacaaccccggcgctaccgacaactgaaaaaagcccatgatcactatctaaattggttgaaattcaaaaacaaattctagcttggcggttcagtcacaacttatgactttgcctgcttctggaatcaattggtcaagcactaatcgctgtgccatacttaattgttatggaggcgcataaacatgcggcaaaaatcgcaatgggccctaatcagcttgtggctgattttattaggaagtttcatccacatgggcttaacagtgatgccagtaattgcttataatcacccacagagaccgtttggttggccatttctgatattgctattattatcaattgaccaagtgttttatgaccacttgatcaatctcgttagtcattcaatcatcaaacattaattttaaaaaacaggatattgacccgccatacgaatgccggccgtccattgtcctgtttttattgcggtattttgcatcatgtcagctgtcattttgacataacggtcttaatcaggacaaaccacaactgcctacttcgatatggtatattgttactgtctacatcagatttgccaatttgtttgagtgatatggcctttttctaaccacctcactcagacactaaaaacaacgaggttctcaccatgcaaacaattcagttaagcaacatctttaaacaacaagcacaccaaacgattttaaaagatttcacactcaccattccagcgcaaagtaacatcggcattcagatgagccacgttgaggcaacgaccctctttaacctattacgccaaacgacaccccaaactagtggcgtgatgactggcctcactcccgcacgtatccaagccatctttcatgatgacggcttttatccgcaattaacagtctcgacttatttgaagacctttcaacacatcagcacctttgagacggacctggatgacattttgcagtatttcgcactcaaagacgtcgcccatactaagatcaagcacttatcctttgatcaacaacaacgtctggccttactgcgggcgttcatcctacaaccggacttgttactaattgaaagtcccctgaccaacttgaccaacgctggcattgagctgtacttagcagccttagcctatactcgcgaacacggcgtcaccgtactgctgacctcctactcattagaagaacttgtcctaaccagtacgactatcttccgctatcgaccaaaccagggcctcgagttgactgatttggcgaccgaaagcagttccgattccgcacacacttcagaagatacacctagaccaatttttaaaattgcaagtaaggttgaagataaaacagtctttttcagccccaacgagatcgattttattgaaagtgtcaacggggtcagtcaactgaacgtcagtggcgaacaattcacgtcatcgcaaacaatgagcgaattagaacaacaattgacgacgctcggcttcttccgctgtcatcgttcttacttggttaatttacaacaaatcgcggaactaatcagttactcccgaaatagttacacgttaatcttgaaaaacaaaagtaaactgcccctctctcgcggtaaactcactgatttaaaagctttgatcaatttttaggacaccattcagcctaaataatgcaccattcggccccaatatgccccattacaccttgatttaatcacattcgacgattgttccagtaaactagattttgtagaagccactacgcttccaaatcaaatttaaaggagtcagcgatcaacgatgacaataaaaaatgcaatcgaagtgattaacattgccaaatcatttcaaaatacgaccgcgctggaccaagttagttttaccgtccaaccaggtgaaatttttggctttttaggtccctcgggatcgggaaaaacaaccaccattaaaattctaaccggacaattattaccaacgaacggtgaagcctacgtcctgggtcagtctgtccaagcatacgacgaacaccgctatgaaaaaatcggcatcgtcacgcatcaaagtgggctttacgacaaattatcggtataccaaaacctactattcttcgcgaaaatgtttggtgtcccggttgcacgtgttgataagttacttgaacgagttggtctcagtcaacataagaaaaaactcgctggtaagttatctcaaggtatgcgtcaacggctagttctggcccgagcaattcttcaccaaccgcaagtcttgttcctcgatgagccaaccagtggtttagatccccgcacgacccaagcaattcacgcactgattagggaattacgcgaccagggtacagcgattctgctaacgactcatgatatgctggaagccactcgtctctgcaatcgtgtcgccttactcaacgctggccgcatcgcagaatgtgcagccccacaagcattgcaattaaaatataatcgcgaccagcagtatcgcgtccacattgcatcggcagcgcaagatttgttactccccgcatctcctgagacgacctatcagattaatcagtggatgctttctgggcaacttgagacgattcactcgtgcgagccgacccttgaagatgtctttttaaccgtaactggaaggagcctaaaatgagtttatcagtaaccaaaataaaagccttattcggtcttaaattaagactgatcatttcaaatatgagtctaatgactgccccaatcatggccattttgtacgtcgttttcatgaagagtattatgcaaagtaaagcaccatcacacgtcgccctgatttccctattactgggaatgggactatgctttaatatcgttatgggtggcatcatgatgacgagttatcccttagccgaagaaaaagaacaccatacgttacgtgtcctaatgacctcttccattaccgggcccgaattttttatcggtagtttattgccaccactagctattatgactgtaaccaatttgatactggtccccctaagcggcgccagttggtcgcaaattcacttaggaaactttttattgattactattatcactagtttaacgagtctcgtgctcggatacattattggtctgattgctaatagtcaaactcaagcaggcgtctacagtattccaatgatgctgattttaagcctgataccgaatttcgaacagttcaataccacccttaaatcctttagcagttatctgtatagcagcacgcttaatcactatattaccgcctcgtataccactggtggcttttcatggacgcttcgtgaggtactgacgcaactcggatggctcgtgattacctgtggcatcttcttctatgcctaccgtcgtcacggccttgataatgactaaaatttaggaggttttcaatcatgtcaactttaaaaatcggaacgaccgtcaagttaccaaaaccatatttgggaattgtgggaacgatcattgcctactacgcagctaaagatcaatacttagttcggtttggtgttagccaacaactctacttcaaaccagatgaactaattgtctggaaatcttaactgcttatctcataccaagccccttactttgaaatatcatggtaaggggcttcttttccacgttcggacaatcccgcagccgaatcgacgttggctatgttatagcaattgccgctcaacctagaaggtgtatgtaggacgcacatttactgatgaccagtaacctaactaacacatttttatcataattgatgacagctcaattcatgctatgtatacccataatatttttaaaatcataacttacccttaattttaaaccccacttgcactcaaaatggggtttaaaccccacatgctgtcttgatgatgtggtgctatttctgaaacctgttatcctctttaatgcacacacggggtttcatacaaaatagacaattaagggagcgcaagtaaagatgattaaagcagaatgggcgtatatgcgcaaacacaaactaatgattatcgtcatggcaatcattatgttcattccatcaatttatgccgtgacatttttacgatcaatgtgggatccatacggtcggttaaataatttacctgtagccgtcgtcaatcatgatcagccagtcacgtaccaagggaagcatctcagtgttgggcgcaatttaacaacgaatttaaaaaaatctagcgctttgaagtttcaacaagtcaacgcaagtcaggcacaagctggcttgaaaaatggtcgctattatatggtgctcacgattccaaccaatttttcgcgccacgcgaccaccttactcaatcaccaaccacaagccatggtgctacattatgatacaagtgctggtcataacttcgtcgctagcaagatggccgattcggcggtcacttcgattcggtcatccgtcgcccaaacgattacaacgagctatgccaaaacgatgtttgccgctatcaaacaacttgacagtggcctcaaaacagctgctactaataatcaaaagctagccaccggtggtcagcagctccaaactgccaaccaaaaaatcgccaccaacctggacaccctcgcaactagttcgctgaaactaaaacaagggagtcaaacactgacggtcggtttaaaccaatatcttaatggcatttcacaactacaggtgggtaaccaaaaagtggttgccggtctaacacaactgctcgtcaaaagtaatcagttagttgctggcatggctcaactcaacaccggggttcaaactttaaatcaaggtgttgatcaatacgttgctggcgcccagcgagtgaatactgggactgtcaaagtcaatactggtgcccatcaggtggccagtggcacgcaacaattcagtagtggtaccgctcaactggcgactggtacgcaacaacttagttccggtttaaacgcttatgcggccggtgtcggcaaggtcaacactggtgccaacaagcttagtcaaggtgctaatcaactacaagcacagaccgctcagttaacggctaaaacgacggccctaacgagcggctcaagtcagctaactactggcatccagacactaggtcagaacagtcagtccctcaccatcgacttgcaaaaattgcagacgcaacttaagcaaccaaccaacaatcaagccacgattagcgcaaccgtggcagcgctgaaaaagcaggctgctggtaccgacttatcgtccgttaaaaccgcgctaagtgcgctgacatcggctattaaaactagtgcggcgcttcacgacaatgtcgccgcaaccgctaacagtcaaaatttgactgcggcacaaaaatcagccattttggcaacggttgatcaatccgctaaccgtgacgccatcaacgccgcccttgcgagtttaaccacggccatcgcccagtcgacgcaaccggctctagatacgactgctttgactagggccctcagcgccacgactcaacagcaggctgaccttgtcaccacggtcacccaactcactaccggtgcgcaatcactgacaaccggtattcaatctgctggtaacgcggctaacaaactgagtactagtctaacccagctgaacacggtcctacctaatctcactaatggcattggggccgttcactactggtgcgacaaacttggctagcggaacaacaacgctcacaactaatagccagcagctcacccaaggctttaaaacactggatgctaacaccaacttgctcaatcagagaagtcaccaactggctacgggtgcggggcaagttgccgcgggttctcaacagctgaccgcgggcacgcgtcaactcagcacccagggcaaccagctaacacaaggtgccagccgcgtggctacgggtcttcaatcttgcacagaccaacctacccagcttaacaactggcatctcacagttagttacgggcagtcaacaagtcaccactggcttacatcgactcggcacaacgggtattgcactcgctaatggcagtcagcaactcactagtggcaatgggcaattagccaccggagctcagcaactagccgtgggtgctaaccaagttacaaccgctggtaataagattcaaactggtaaccaagcattagcgaccaaattaggaacggccgcaagcaaggggaatctcaatccatcaaaactgacgtatcaacaagttgccaaacccgtcactacaactcaccaggaccgtgatgatgtaccaaacaacggtactggtatggcgccgtatatgttaagtgtctcgttatttgtcggcgcgctcgccctcaatatgatgtttgatatgtataccccacgcaaacacccgcaatcggcactggattggtggagtagcaaggccagcatcatgctcgtcttttcaatcatggaaagtacgattatgctcggcttgatgatgttaatcaacggactcagcccgattcatccgtttgccacttggttgttactcacgctaacggcgctactcttcatgacgatcgtcgcttggcttaaccttgtcttcggcaaagctggcgccttcttcagtatggtactactagtcttacagctcggtggttcagccggaacgtatccaattcagctgtcaggtcactttttccaaacaatccacccgtggttaccaatgagttacagcgtcaacggcttgcggcagaccttaatgactggtaattctgctcttcctgagatgggcgtcttagcactgattctaatgctgtttattgctctgacctggttgttctttatccgtcgttaccctcggctggctcaaattgactttgaagaccccgtcgccgtcaaagccactcagagtaagttagccacgttggttcggcgaaaggctcaagctaaagcatctgacaataaaacgaattagttatttggatttatgatctcgaaacactgccaaaacgactttctcaatatcagagagagtcgtttttagcagctaactaagttgacgactttacccaaatggtgctgttaattctgattcgctggtcaacaccttaacctactaccatattattagtattcgtgaaaatccctactaatattgaaacgacttccccattacttgagactgcttttcacagactcattttgaccggatgtcacacacgctaagtcatctagcttgtcagtcaacagcccaactaactaaaaccattaactagtctcaaatgcaccacaacaatcattcagaacaacattaagtcactatccaaacaaaactaatcatgataccacctcaaattagtatgggtatgctttagttagggacaagcttacggttaaattagattggtatattgattgagtcagcgtttgattttggctatactgttaacagtcaattaataaaggagtgcgagtcgcatgatcaaagaattcaaggaatttattgcccgcggtaacgtgattgatttggccgttggggttattatcgggtccgcttttacggccattgttaaatcgttgacagacaacttaattaatccactgattgggattttcttaggcaaagttgatttatccaatctaaagttcagtatcggtgatgctacttttaagtacgggtcctttctaaatgccatcattaatttcttcatcgtcgccatcgtcgttttcattctggtgaaaattattaataaagtggttaaaaatgaaccagaagaacccgaggaagaagaagtcgatgtttccgcgcaatatctagaagaaattcgtgatttattaaaggaacaggctaaaaaataagtgaaaatagctcccaagcaaatttttcattaaaagtctatatggtattaaaactttttttgagatacaatatattgtgcaattttttataaagaggggctatcatggtgataataacagcaggaatgattggggtcggcaaaaccacgttaacggggttaattgctgaccaccttggaactaaggcattttacgaaccggttggcgacaaccccgtattgccactttattattcggatcctaagaattacgggttcctattacaaatctatttcctcaacaaacgttttgcaatgatcaagaaggcattggccgacgataacaacgtcctcgaccgctccatctatgaagatgccctcttcaccaaagaaaacaacgctgaaggaaacatctctgacactgaattgaatgtttacttgcaactactagacaatatgatgaccgaattgactgaactgcctaagaaggcaccagacttgatggtctactctgaaactgacttcgatacgattctttaccggatcaagaagcgtggtcgcgactacgaacagttcgaccacaaccctgaactggaatcttattactataagatgtggaccgcttatcggaaatggtacgatgaatacgatgctagccctaaaatgaagattgatttacaacagtacgacttggaaaaacctgctaaccaacaagcagtgctggctcaaatcgattctgaattaggcaagattcgcaatccaaccacagtttaattaatcatgctaaaagcgccagtcccgataatggggactagcgcttttattgcgcacaatctagcgagcaaacaatacagaaacttcttaatgactcgcgaccagctaactaggtagcgcgggtagtgtcgcattaccaaacgacaatctttgaatgccgcactagcacaattgcgctcgattacatggctgcccggacttgttgggctaactcaaagttattggtaatcaccgcattgaccgaggctgcgaacaattgttgcattacgattggctcatccactgtccaaacccgttcagcaacatggtgtacaggttgatagtgttcaagatgcaccccttctaagtgttcgtgagtcgcaaactcatccggattacccagacgcgctgaagtcaaaaaagcatatttctggctggcatcaatggcgtaggcccgctgtaaactcttcagattaaacgacgaaaaaacgaccggataaattaagtcagtctgccggaccatccgtagcacaatccgctcgatatcaagataatagtgtcgatcagtcttcaactcaaggttcaagtgaacgggctccccactcactaagtttaaaaattcttgtaaggatgggacgggctctccatttgctaattcaaatctacgcaactgttcgaaggtcagatccgcaatggccccttgcccattagtagttcgatcgattcgttcgtcatgcataatcactggtatttgatcctgggtaagatggacgtcaaactctaagccatcgatatgatgactgatggcatacgcaaacccagctagcgaattctcaggaaacttaacgggaacgccccgatgaccataaatcaacgacatatttggcacaattcttcaactctttccaattaatgacgaccgtttgcacggttatttgattctaacactttattgtacgtattttcagccgtttgcaacaattgtcgaatatcttggcctgcaaaaatctgctgcatcgccgtttgaatcgccgtccgtgcgggaacccaaccatcgacaaagacacctgagttcgtattattaggcttcgttcgtagcatctgattaccagaaacttctaggaccggcgacttcttgaatagttttttcagcattggctcgtccttagcccccttattaacggctaaataaccagtcttggcttgccaatcggcttgcgtctgtgcgctagcgagaaacttagtgaattcccacgcgccatcttggaccgcgcttggtttatcgttcgcaatccaaagtgccgccccaccaactgcgattccgttggctctctgaccattcggccgtgggaaatatgtgacacctagatcatttttgagcacttgatacaactgacccgtgttcgcggacgattgcatgaagatacccaaatggcctgccaagaaagaagctgcttcatttgcagcagcattaccacccgaaccaaagttcataaagtcaccatagtcaatattttctttaacccacttcatcgcattgatagccgcgggactcgtaaagtcgaccttagtcgcattgccagtatgaccattatcatgattggcaacgggaacacctgcgttagcgaccagctgctcgaatagccacgaataggcctccattgtcattcccttgactttgccgtgggatttgtcgtggatggccttagcgactcgcgtgatatcatcgtaagtcggatccactggtggcggcgtaatcccgtactgacgcaagaccctcttattataataaagcgccgtttgcgatgcattaaacggcattgctagcaattgattgtcgcgcatcacgatcgccttggcgcccggaatgatttgatcagcatcgtaatggtcacggtcaataaatttctgcatcggtgtcgtgaaaccactgtgatacatctgactggtggaaatatccatcgattgaaatagcgctggtgacgcggccgtcccatgcgtattcaagattttttgaatgacgccattatagccaccctcaaactcggctacaacttcatacttggactgttggtgattaaacgctttaacgtaggcgtcaatcgcttgttgaccaggacctttcatctcatgccaaaacaccactttaatgcgactactatccgcatggacacgggtccgactataagcgaacccacccactaccaagaggacaaccatcataccggctagccactgccactttcgcgttatcttcatcatttcaccgaaccttcattcaatccagatttaaagtagtgttgcccccagaaaaggacaatcaatgttggaatcaccacgatggcggcactcgcctgaacgagtccccaattcgtagcggtttcttccgaatgcaattgccgcaatccatcttggaccggacgtagccgatttgaaaacgtggtcagcattggccataaatattggttccagcttcctaaaaagctgtaagcagctagcgtcaataaactaatccgtgagtatggtaaggcaacgcgacagtaaaattgccagtgtgagagaccatcaacatcagcggcttcctttaagtctcgcggaatttgcagaaaggcttgacgtaacatgaagataccaaaggccgaagttaagaacgggataaccatcaccgcatagtgattcaacaagtgcatcgcacggaccgtgtgaaagttcggaatcacttcagcttcaaatggtagcatcatagttgccaagaccaagtagaacaacgcatcccgatacttaaattctaaaaacacaaaggcgtaggcggcaattgatgcaaaaaacagatgagcaatcatctgaatgattgaaatcattaaactgttaaataagtagcgaagaatgggggttttggtaaacgcatcctgatagttctgccaagaaagggttccgctcagtgatcctttcgcaatagtcgtcgttggtaaaaagctggtccacaaccctaaaacaaacggtaaaataatgactaacgttaatgtaattaataacaagtaccggaatccgataccgattcgatgtcgaatcagggcttgagtagccatcgtattttccattagtaatgcacccgctttgctaaaagtttgaattggattaccgtaatcgctgcaataatgattgctagtatgatcgattccgtgctagcaagcgcatagttaccatcaacgaaggcatcccgataaatacggtaaactaataagttggtggcgttcgtaggcccacccgcagtcatcaagtcaatcaatccgaaactcttgaacgctgagatcaacgtaatcaccgccgcaaagaagagtgtgggggaaatcatcggcaacgtgatatggatgaactgataacgccgactggtccccgccacatcggccgcatcatataaggttttaggcacgacttgcaatgccccaaaaaagatcagaaaagtaaatccgaggtgcatccaaacactcgtcataataattgccaccatggcccagtgtggctccgttaaccaattaattgccggtaagtgcatccagatggccaccttattcaacaagcccacggatggattaaacatgaataaccagaaaattgcggagaccgagacagacactcccatagtcgaggtaaacatagttcgaaatagctcgataccccgaaccctttgattggcagcggccgctaacagtaaccccccaattaacgtgaacactgtcacacccacgacatagattccagtggcttgcaggctagcaagataactcttagtcgtcagcaaattaaggtaattttgcaaaccaacaaagacggttggttcaccaagactattagtcaagaaaaagcttagatacaaggtgcgtaacattggatagaaaacaaaaacactgagggcgagtattgagggcccaagaaatagccaagcataatatttatcattacgctttaattcaaaactgccggtctgcacagttgcttggtcatgcgcatctggcgattgtttcggcttaaggcgtcgcttaatcgacggaaacgagttgatcactagtaacaccctcctcttcagcaatcagttgttcgtgctcatcaaaaatgaagatcttaccattaacggttacattcacccgttgttcaagtggtaattggacctgaccagattgtgcaactcgcaatgccgtcccgttatcagcctgcacttcgataatcgtcatctcgcccagtgtctcgacattcgtgaccttgccattaccgcgctcatcagtaactggtactacgtttagctgattaggtcggataccaatcgtatagctccccgcgtttaatggttggttaagcgcaatctgaaagccctccgcgacgtgtaaattacgagcggttttcgtcaccactggcagtaaattaatctgtggcgtaccgaagaattcagcgacgaaatgattagcaggatgattataaatatctaacggtgtatcaatctgctgcacgtgacgctcatttaacaccattacgtgatcggccatggtcatcgcttcagtttggtcatgggtgacataaatcaatgtcaatccgagcttacgttgcagttcgcgaatttcggtccgcattcgcacgcgtagttgcgcatcaaggtttgataacggttcgtccatcaggcaaaccttagcatcactggcaatcgcccgagccaaagccactcgttgccgttgaccaccagatagttcgcgcggcttgcggtcacgataagccgtcaaattgaccatcttcaacgcggcattgacccgacgctcgacttccgcggccggcatttttcgtgcttgtaaaccaaacgcaacgttggcagccacgtccaaaaaagggtacaaggcataactttgaaaaaccattgacagctttcgatcttttggtgggactgcattcatgatctgaccattgatggccagctttccactagtaattggaataataccggcaatcatccgcagcagcgtacttttaccacaaccggatggcccaacaatcacgaataactccccgtcttgaatctcagcatttacatcgtttaaaactggctgtttcgccttatcatacgtctttgtgatgttctgcaaggtaattcccatattcatatcccctcgaccttttatttgtaatttattagattactctttaatcatgccagaccaacgtatcgggaatgttggcataatgtaaaaataacgtatgggttatgtatttttttcataaacagcgccccaccaacaaattcggagtgaataaaaaatagttgtttcaagaatttgtacattctcgaaacaactatttagtctgtgtcctaccagttaatctgtcatggatgataacggtccaccgtgagtcggttttctctgtgtccgatatcgagcttgaaaaagccgctcaaatgtttatccggacacactatcggatgtcctaaaaatttcaattaaagccgacgagtggtatgctttggcagtttgactggctgttgatcagcatctgtgcgcaccaccaacgtgtcacaggtagcattgcgaatcacataagcagcattagagccaattaacacccgtgccacgttgttaagacctgtggccccaacaacgatcaagtcagtgccatagcgatccggtaaagtcgtcgctaacaataacttcgaattacctgaatgtaagtgaacccgcacatcgctgacacccgcggccatcgcttgttggcgagccttagcgagattcgctttaagaccggccgtcaattcgttcaatgcctgcggtgtcgttgcgccaaaacccatcggcccttgagtcacaccaataaatttctcagtattaatgaccgtcacaatatccaaagcggcattttgctcgaccgcgatcttaattgctttcgttaaagctaattgggactgaggactcgtatcgatgccgactaaaatgcgtttaaccatcgtcataaccatcaccctccattaaaggatcactatttgtcggttgctaacacggcaattgattcagcgtaaatcgccattgcagccattaattcgtcaattggttggaattcattggcttggtgcatcgtatcttcggtatctgggaagagtgccccaaaggcaaccccacgagccatcatccggccataagtcccaccaccaacaatttgtggttgtgaggccgtgtcaccagtttgacgccggtaaacgtccatcaaatccttgacgatcgggtcttcagggtcaacgtaatgtggcaccatgaagtcaccctgcgtgaccgtggcaccagctggtaactgcgcttggactttcgccgttaaatcagcaggttcgattcccttcggataacggaagttcaacgttaacgcaccacccttttgatggtcgaagctgagtaacccgacattcatcgtcaaatcacccataacgtcatccttgtaagctaagcctaactggttcgcccgcgaatcatcgtgtagcttattagccacgaagtctaagaaagcagcggcatcatcagcaaaggcatagttagtcaagaacgttgcaaggtaggttccggcattgatcccgttacgtggttccatcccatgggcggcctttccaacaacttccagcttaacgccttcaggaacgaccgttaattcaccagttactggttgctggtccaggaacgctgtgaagtcggccaccaactgctcgttgtcatccgttgcgaccacggcttcggcatcacgcggcaccatattttcacgcaagccagaatcaaaagaaacaaggttaaagtcgccattatcttcatgaccgaagtgtaattgcagactcacatttcccttttcaccattgatcaacgggaacatggcatctggagagaagcccaaggttggcgctggttcaacttcaaagtagcgtttcattccagtccaattactttcctcatctgtcccaacgataaagcgaatcttcttattgagcttcaagccaagttctttgacaatctttaagccatagtaggccgccattcccgggcctttatcgtcggaaacgccgcgggcatacatcttgccatccttgatggttggttcgaaggggtccgtatcccagccgttaccagcaggcatttcatccacatgggctaaaattgccaaggtttcatccccctcaccaatttcagcataaccgaccaagttatcaatgttcttggtcttaaagccgtcgcgttccgcaatcgctaaaaacgtggttaacgcttgcttaggaccagggcctaagggtgcatcatccgtcgcctggctatcgtcacgaaagctcggtacgcggagcatggtggttaaatctgctaaataatcatcttgatgcttagttgcttcatttttccaatcaactgacatgttaaattcctcccacatattgttaccttaattttatcatagctatcgtcaacttaataatcgtaagtaaccgcttttggaaaatggtatactcaaagtaaattaacttagaaagctggtcattttatgcaacctattacaactgaaattgttagccgaacgattatcaaacgaccggctgattctcacaaaggcaattacggccgaatcatgctgattgggggtaatcaaaattttggtggtgctatcatcatggccgcaacggccgcaacatatagtggtgccggtctggtgacggtcgctaccgacccgtctaatttcacgagtctacatgctcggctaccagaagccatggtcattgactatcatcaaacggacaccttattaaacctgctagcaggaatggacgttatcgtcatcggtccaggccttggaacagataccgtcgctgatcagttactgaccgccgttctcgccgcgacgcacgtcccacaacgattggtcatcgatggttcggcgctgaccttgcttgcacagcaggcccgcaccttacccgccacggacatcgtggtcacgccacaccaaatggaatggcaacgacttagcggcatcgcgatcaaagatcaaaccccaactgccaatcatgacgcgcaacaacggttaggtgttacggccgtggtcaaagctcatcgcacgaccgtctacactgacgaacgagtctggttcaaccccggcggcactccggccatggcgaccggcggcatgggtgacacgttggctggtatgattggtggcttcgtaagtcaatttcataatttcaccgatgccgttctcagcgcggtctacttgcacagtgccattgccgatgacctcgctgcaacgcggtacgtcgtcttgccgcatcaaatcagtacccgcattccgacttacatgcaccgctttagtcagattgaacgcccttagctagctggaccataatgaacacgaacaagccaacgacattatgctaaaaaagcctcaactaaccatgcttgaattcatagttagttggggcttaatgatttaatttaaaccagagtggccgaattcgtaacacgcactattcgcctacgggttggttcgcatccgccttcaacgctgttagttcgtcatcagtcagcgcacgatagttccccgctaataagccaacgggtagcgttaacgaaccaaacttgattcgccgtaacccgacgacccgttcacctaacgttccgaccatccgcttaacttggtgatacttgccttcatggatcatgattcgaatcgtggtaaaattctcgatttcatggaattgaacaatctcagcctgagccggttgcaattcagtcccgtcctttaacgtgatcccatcattaaaattagccaattgagctgcagtgatttcccccgttacttcagcctcatagaccttcgtaacatggtggttcggcgacaataggtcgtgcgatagggccccatcgttcgtaatgaccaagattccctcagtatctttatcgagacgacccacgggaaatagatcgtcacgaaaatccgtcgtattgaacaggtccatcaccgttttcgcagcggaatccgtcgttgccgtgatgaccccgactggcttattcatcacataatagaagtattgttggtaacggacctgcacgtcatctaaaaagacggtgtcactgccagggttgatctgttgtttgccagagattactggctcaccattggcagtgatatgaccatctttaatcagacgacgtacttgagtccgcgtgccaattcgcatcgcatgtaaaaatttatctactcgcataattcacctatttaatccgtaatttccgtcgtaacccagcagctttcgttccaatcatcaaatcagccatccgtgaacggagtgctaagtaaacgtaaaccgcaccaccagcgataactgctagggccacgatcaagaacgattgcgtcttactgtgctcattcaacacaaagttcagcccataaacaactaatcgtgccgtgacatacgttaaaatcgaataaactaaaattcgattgatttttggtaataacttcacgtaccgaattccaaagttgacttccaaatcatacatcgccatcagactcgcaaccatcatcccaatcgcggtcgcaaccaggggccccgccgttgataggaaatagatacatggtaactgaatcacgattttgaccagtaagccgatcaagtaatagcgaataatatcgcggttgcgtgataggccttgcatcagcgccgaaatcaccgtaaaaaagcctaaagcaatcgcggtaaatgctgagatctgcagaatcaaggtcccaatttgatcataactataaaagagcgtgttaagtggttgtgccactgcggccatccccagcgctccgggaatcatgataaataggaataaaataatcgaatcttccaattgtttacgaatattacgcatattatgactggccaatgattcagataaaatcggcacgaccgtcacggcaatcgcagacgccaatgacacaatgatcatcaccaatttgttcgcattaaatgcaaagtaagcatacaacgtatcgatctgcttagtacccaaatggtaaaccagccgcatcatcggttggaacgttgcttgatccaacaggttgaagactgtcgttgcggtatcgatcacaataaatggaatcgcctgaataataatatcgcggaacaattgccagactggaataactagtttgttctcactctgagcagctaaggcatttagctcgggccgtttgcggaaataataccaaccgagtaataagaagctggcagccgccccgacgaatgctgcgaatgtcgattgggtcacggcattcacccaatcgccgtgagcgacgcgcatgatgaaatacgtcgcacccaacatatagatgacccgaaagacttgttccacgaactgtgagattgcggacggcgccatctgttgatacccttggaagaatccccgggtcaaagacatcgatggcagaatcaccaaggcaatagccaacgcatgcaagacgggaatcagattggcatcatagcccccaaaagctgttgaaatcaagccagcaccaaaccataaaataatggcaccaataatcccaaaggctgacgtcaacaacaagccccgcttgaataagcgctgtccaacggcatattcattcatcgcattatattcggaaagttgtttagaaattgcggacggaattcccccgatcgcaattagcaggaaaaaactataaatattatatcccttggcataaagcgcgttaccttgcgtataatcagcgcccatccagataacccacgggataatataaatcgccccgagcacccgtgaaaagagactcccagccgtcatccaagccgacccgcgcaccatcttctggtgcgcttcggcttcagaattcacgtgtgcattctggggctgattagcttttgattcctcagacatgttcgtaacccactttcttaattcaatcctaatcattttagatgaaaaacaaacaagttgcaattcaattccggccttatgcgtgagtttaaccgaactttaatgataaggtcttgacaactgcaccagctattggcgaaccgtaccgccgtccgataccctatggctgatacagaaaaaagaccaatccgtacgctttaccagcggccacgatgcggtctcaaattcgattacagcagagtgccgccatgataaccatttccgctgattaaaccacgttactgctagttttaagttaagcataggcggttgcacacactctgcccaccaaaaacacgtgtgatttgtctcccaaaccgaaccagaacgtcctcagaatctttattcacttaaccaaatcaatcgtaaccgcactaattagttctgtgagtagttaaaaaatcgtgatagcaaccaacaattgtcagtcaccatcacgattaatttaagcgatattcatttaacttgatactggtcgtggtacttagttggcaaccacgttaaccagtttaccaggaatggcaatcactttacgaactgtcttgccggccgtaaattcctggattttttcatccgccagggctagtttttcaagttcatccttgcccatatccttagcgacttcggcgtgcgagcgaaccttaccattaacttgaagcacgatttggaccgtgtcttctactaacttagattcgtcatacgttggccaagtggcgtaggtgatcgtgtcatcatggcctaataatgaccatagttcttccgacaaatgtggtgcaatcggtgacagtaacttcacaaagccttcgatataaatgattggtaaatcgtcgaccttgtatgcttcgtttacgaagaccatcatttgtgaaatcgcaatgttaaagcgcatagcttcatagtcttccgtgactttcttaacggtttcgttgtagattttcgtcaacttaccatcattgatagtcgtgattcggtcgcgaacacgattgttttcatcgatcattaagcgccaaacccgttcgatccacttattggcaccatgtaacccatcggtactccacggaatcgaagcttccaatggtcccatgaacatttcgtataaccgcaacgtatcggcaccatattggtcaacaatatcatcggggttaaccacgttcccccgcgacttagacatcttttcgtgattatcacccaaaatcatcccttggttaactaacttctggaatggttccttggttggcacaacgcctaagtcatataagaacttgtgccagaaacgtgcgtaaagcagatgtaagaccgcgtgttctgcaccgcccacgtataagtcaacgggtgaccagtacttcaacttgtcataatcggccaaagcttcacggttgtgcggatcaacgtaacgcaagaagtaccatgaactcccggcccattgtggcatcgtgttggtttcacgcttccccttacgaccgttttcatcgacgacatttacccagtcgtcgatattcgctaacgggctttcaccagttcctgatggttccaggttcttagttgctggtaaccgcaatggtagttcatcttcaggaaccaacgtcgtttcgccgtcttcccagtgaataactggaatcggttcgccccagtaccgttgccgtgagaagatccaatcacgtaaccgatagttgaccttcttttcaccggcatggtgttcacctaaccagtcaatcatcttatcaatagctggttgcttagctaaaccgtcaacaaaacctgagttgatgtgttccccgtcgccagtgtaagcttgttggtcataatcattatcacccgcaatgacaggtttgattggcaaatcaaatttttgtgcaaattcaaagtcccgatcatcatgagcaggcactgccatgatggccccagttccatatgaagccagaacgtaatcggcaatccagattggcagtttttcaccattaaccgggttgatgccgtagctaccagtgaagaccccggtcttgtccttattcaaatcagtccgttcaaggtctgacttgctggcgattttagctttgtatgctttgatagcgtccgcttgttcgggtgtcgtcaattgttcaactaagtcgtgttcaggtgccaagaccatgtaacttgcgccaaacagcgtgtctggccgcgttgagaacacttcaatctcggtatcgtcaggttgaccagcaaccttgaaacgaatggatgcgccaactgagcggccaatccagttacgttgttgctctttgatgttttctggccaatcaatatcgtccaggtcatcaatcaaccggtccgcataggccgtgattttgaggctccattgcttcattggcacccggtaaacatcatagccaccgcgttccgtcttaccatcaaccacttcttcgttagaaacaaccgttccacccatcatatcaggagcccagttgaccaacgtttcagattcgtaagccaagcccttcttatagagctgttcaaagatccactgcgtccacttgtagtaacttggatcagtcgtattcacttcacggtcccagtcatatgaaaaacctaatgaccgaatctgacgtttgaagtttttgatgttcttggccgtaaagtccttcgggttatgccccgtcttgagcgcatattgttcagcgggtaaaccgaatgcgtcccaacccattggatgtaagacattgtacccttgcatccgcttgaaccgtgacataatatccgtggccgtatacccttcaggatgtccaacgtgtaatccttggccagatgggtatgggaacatgtctaaggcgtaatacttcttcttatccgtcgtatctaatgttttgaaggttttgttttccttccaataatgttgccatttgcgttcaatgactttatggttgtatgccatagtagtgcccctttcttgctgccttgtatgtaaaagctagcattgcgactttccaactgactattcaagatggcattttcatgcttcaactcagtaaaagcggttaaaaaacaaaaaaatcctataagccaattaagcttataggacgaaaacgggttccgcggtaccacctatgattccacgttaccgtggcctcttgagaatcttaacgcgaaaccacgtccgtacctacaatcttgttcagccggaagactcgaaggtgagttcatgattggtgaatccccgtttgcaactaccacggagtttctgcaaaacaccagccactactattccttctcagagtcgtaaagttattgttttcatagtagcaaaccagcacgtttttttcaagggcccaagccccgctggcgataaattttatcatcggcattaatcggacccctgataaaaaatgctataataatggcaataatttatttatcggaggaatcagtattgaagcaacgatcctggcaacgttcggacagtttgattctacttatatttataggatggttaggctggacggccgcggtatggcaacgggcgccttggttaacacactttgacaccacggttgctaatttttggcatcatagtccccagtggtttcaacacgcgatggtcacgtatacgcagcttggcaatccccacaccatcaccataatcacgttaattatcggcctggcactctggctgggccataacccacgcggcgcagtcttcttttgggtcaccacctggctgattgccggctacggtaattatctcatcaaacaggtcatcatgcggccacggccaaccgcttggcgacttgtccaaattggggggtatagttaccccagcgggcactcgacaacaacgaccgtccttatcggtagtctgctcgtgttggcatttgactactggcaccgcaatgccttgactggctggctcactgccctcggcataacggccatcttgttaatgatgatcagccgggtcatcgtgggcgtccactatcccagcgatacaatcggtggccttttacttggaagtgttttactatatataagtgcgcgttttagtatgcgttatcggcacggaccgcttcgattgcggccctaattcatgaattcaacaagggggtaacactcattcaactcagttcggcattagcttatagccacgcgctaatgaaccaagtcgtcaatcccggtgaccacgtgattgacgcgacggttggcaacggccatgataccgtctacctcgccaagctggtcgggactactggtcacgtcgacgggttcgacattcaatcagcggccattgaagcgacgacaactgccttagataaagcagcgctcacccatcaagtcactctgtggcaaacgggccatgaacacatcgcagataagattgccgctgatcaacctatcaagtgtgccgtctttaacctgggctatttaccaggtggcgataaacaaatcattacgaaaccaacgacaacgttaacggccataaaagccattcaggaacgcctcgtcaccaacggactcattatcctgctagtctatgctggtcatcccggtggtgcgacagaagcacaagccgttttggattacgtaacgaatttagaccagcatcaattccaagtcctacaatatcagtttattaatcaagtccatgtgccgccatatttgttggccattcagaaacgttaatttaacgataaattagccgaaaagacctgtcagacgattagcttcgtctgacaggtcttttcaattagatacttaacttaaaaaccaatggtaccttacttctcccacggatacttaccgttctcatccttaggggtattacgcatgatccgcttagttccctcgtccatctcgttacgccgcttcttacgattatggtgacgaacaattaggacaagaccaccgatgccacagtacacgatcattcgggtaaacatcttaacggtcccataaatggtcataatcattaacattttgcgccctcccttgccgtcaaatctacttaagccgtgaccttagcaggcttaaagtaatctaacaatgcttgccactgcttgaaaacggcttcttctgaataacgcttggcattttcataggcctgagcactgtattgtgccagctgcccttgattcttcaacaattctaaaatcgttttggtcaattgttgcacatcgccgtctgtcgttaggattccactcttatgatcctgaataatatcactcgggccgtacttcacgtcattggcaaccattggtaacccatgggcttgagcttctaacaacatcaatgagaatccttcagctcgacttggcaaaagtcctaattgggcccggttgtaaacggcattgacatccgtggtataccccttgaacaataccacatcttccaagtgcgctgcagcaacttgtgcatgtagttgcttttcaatatccccgttcgcataaccccataattccaacttggcatcaggaaactgcttgtgaacttcaacaaaggcttcgattgaatgattctgttgcttttcaggtgccagccgcgcaacttgcacgacgaggtctttttgtcgttggtcaaacttcaccggcgcggcttttaacgtagcattatcaacatagccaaccggaatagtgaacgctggaatatccttaccaaagcgggcttccacgtccttagtttgttccggtgtcgcagaaatgaccgcgtcccaagccgcccaattattcagcgcattagcataattattgttcaaggtagaatgcataatatccttagcatcactcacatggttattatgtagatgcaagactttcttagctggtgtggtcatattgaataagccccaggcacattcaacggtccgatcacaaatgaagacattttgttcatcattcaactggttaagttcatcatagaagtaacgggtcagttcattcatcccattaaaagtatggctctgctcgttgtagttcaagacgcgccacgtgattcgctcctgaccagcgtgatttaacaagtgtaacttctccacgtgaatcaatccatccgggccaaagtacgcttcttgggcaatcttaccgtcccagtcaaataattgttcaaaacacttaaagccccgcgtatcccaccaactcatcttgagcgtacgaccattaacgtcaaagtattgcacattgctaacagcttccgtaccggcccgaaggtaaataatcatgattaacttaccacgttccatgacttgaatctgattatccttccgggttttgatagcatcggctggcacttcaaagtcggccaaatcaaacctttgacgcttgaccgactgactaccacaaaagaagtcaaaaagattaacaaaatcagcatcggcaatgttggccccttcaagcacatcgtgcaaattcattgcgaatacgcgggtcacgattttagcggccacatggtgcttcttgaataaagtcagtcggttgatttccgcctgttcgattcctgattttgaaaattgcatgttatcgtttaagaaataatacatatgcgccctcctacttaatacccagtaattgttgccaacggtgccaaacttttaagtcagtttgtgacgtatgaagcttcttaaaggcggcttcgctgaatgccgtcaacttcttcgtatccgtcattaattcgatgacccggtcacgcagcgccaattgattgccaggatcaacgatgaaaccgtcatgaccgtcatcaatccaatctttaggcccataattaaagcgataactaatcactggaattccgtgactcatggcttccggcatactcattggaccaccatcaacaatatcggtattgagcaacagctgataatcatcataacgtgtttctaaatcaggatgataatctaataaatgcacattattcgtcaattttaattcttcaaccagcttattcagcgtcttaagatactctggatcgccgtagccgtaaaagtcacactgaatttctttgacctgttgcttaactaacgcaatggtccgaattaactgatccagttgccgatccggcgccagccgcccaacgtatagcaattgcttggggcgggccgtgattggctgtagtttactctgcgccaacggactcgtagttacagttggtaacactgtcaccttagctttagggaaccgcgtccgcagatgctgagcctgactttcagtagctgtaatgaaaccatcaaagtgttgcagattatcgaaggccggtgttaagaacccgtccaacggggaatgaattgggtcattaatatccttcgcctgataaattggaaccgtcacatacttgtgagaatcatcctgaagttccaacaacggcttcacactggtacctgggcgatcactaataaaggtcgtcgtttgcttgtccaaatgactgagttcggccaagaagaaacgaaataaatggttcgcgtcctggaagaagcgctctgcttgatcacgataattctttaaaatcaaacgtgacgctagcggattaccgttagtgtcaggtacatagtactgctcaataacggtctcgccttgtagattataaaaccgttccaaaaccagtttaccgttctgaccaaaatattatgtactggacttgaagcctcgccaatcccacaggtcagttgaagataagttaccttgattgtcgaagaattcttggtaaaagacgcgcccaatcgttccaggaataaagccgacgttgctaacgtgttcatcaccattaaaaattttgctaaagttggcacccacttctaccgcatattcaactggcagatgcatgtcatcagtatgcagaactttagttggcacatccgtggtttgttgaaagtaatcaaacatattcagcacttgctggtttgctaactgaaaagttcccatggtctgatgtagcaaacggtcatacatcttagtcacaatctgggctggcgctttatagtggttaaataatttcacccggttgattgccgcgtgctcaacactcgaattcttgcctaaaatatattcattaatgaagtaaaacatacagtcaccctttctgttacctagtattatgcttgtcgatatgtgtagttataatagttgatcaacccagataagaagtgttcacaatcgtcaatccgtgtccggaaattgtcatgacgtgcatagaacccaccaatgaacttctgtggattatagagatacattgcaatctcaggtagaaaacacccagtagtaatctcatacaacgcacgataccgcaatacctgccgtaaacgaaccaagtcataaggtgctatcaagtcttcattacctgaacgtttaatcatatcggtcattttgacggccgcatcaactaactcaagtaatgttggatacgtggtatcacgctcttcaatgaattttagatgactgaatacatttttcaaacccagtttcatataatcacgattgtctgggaataccagtaatgcttcattgattgcataagaaatccagtgatcatggtatttaccgtagtcattagccaccatgtaatccaagatttgcttcaccagatccatcacattcttatcatgtgttaactcatatagtcgggaaagcgcaaatgcgacttctccttcataatagataattcgataagctgctttgaccgttaaatctggatttaggacatgaattaacttaccagacggttcttggaagaaatggacgcctttaaaagctttcattaaaactggcacgaaagtatcatccttggtaacgtcttgatatttactcaatgcaagtattaacaaggcctgtccacccaactttagctcgccattatcatcgacgaagattgcgccctctttttcaatcgtggcgttttttaagccccactgaatcgctaacttaacttttgcaaaatcttcagtacgctttgtgaatggaatggcttccagcaaggcatataaggacgaaaaatgccgcacaacattgtaattgctaagaactctttgacgagccggaaaataaccgtagacaaattttccattgccttttaactgattaattaggaaagtttcaccatgttcaatagctgattgcagctcgctctgctcgtcagtcaccacccgaacgcccttaccacaatcctcttgctcagatagattccagattttctgcccgtcagtaaatacaccagcggttgtaaagacccaaacattttctgtctttcgaatatcgactggtagcgctccttcacgcttgttaagatacggctctactcgatcatagtcgacccaagaacccgaacgattcttaccaattcgatgcgctttgctaggacggaaaaatgcttgtccattactttccatctccaataaggctgtcttgaaatctgcatcaaaactaataccgtatcgccaatagttcatccgaaaagtagctgccaatcgcttttcaaaagtttctcttggtaacttctgtgttgattgaactgcttctaatcgaacccaactcgcttgaggggttttggctaattgttgtgcaactgctatccaagcttgcttgaaagaatcgcaacgatagaatcgcacttgggcccgatgtcgatgatccgataccgaaagtgccaaggttacggtacttgtaccgtaatctttcaaatttccagttgcaatcagtgcttgcttaagcttggtgacagtagatttttgcatcttagtcttacctctttcaattttcttttatgtacgccaaaacgggcttcacgcccgttttggttaatagtcttattttacaacgtatatcgttagcagtactaacaaatcagctttaaattttaactatttttgattctcgtcatcttcatcatcatctttacgacgacgaccgaacaagaagaaccaccagccgagtccagcagctgcagccgcggtcaacaagccaccgaaaatcgttccggcattattacttgtatcagatgcagtcttaccattctcgtcagtattacttgagccaaccttatcatcagcactatcagtatcagctgacttcttatccttatcagaatcattactactcttcgaatctgaatcagtctgatcagaagttgcatcaacgtcttgagcgctagcagcggcataaaccactgatgtagcagcagttgctgacgttgttgcagcaccgtcactggatggtgtcgtaaccgccaacgttgcggctgtggccgagacgccacttgttgctgcagcactcaagctagtcgtacttgtcgaagcagcaccgttgctagaagcagtcgatgaagttgtcgtaccagtgccagtacctgagttatttccagtagagcccgtcgtattgcccgaacctgatccagtatttgaactggaacttccatctgagccagaattactaccattgccagaattggttccatcatttgaatctgaatctgtgattgtatcggagtcactgtcgctattcgaatcactgtcagagtctgagtcgttgtcggaacctgagtcgctgtctgagtcagcgtcactgtccgaatcggaatcactgtcggaatccgaatcactatccgagtcggaatcactatctgagtccgagtcactgtcggaatctgaatcactatctgagtccgagtcactgtcggaatccgaatcactatccgagtcggaatcactgtcggaatccgagtcgctgtcggaatccgaatcgctatccgaatccgaatcactgtcagaatcggagtcgctgtcggaatccgaatcactatccgagtccgaatcactgtccgagtccgaatcgctgtccgagtccgaatcgctgtccgagtccgaatcgctgtcagaatcggaatcgctgtctgagtccgaatcactatcagaatccgagtcactgtcgctatccgaatcactgtccgagtccgaatcgctgtccgagtccgaatcggagtcactgtcgctatccgaatcactgtctgagtctgagtcgctgtccgagtcggaatctgaatcactgtcggaatccgagtcactatcggagtctgaatcgctatccgagtctgaatcactgtccgaatcggaatcactatccgaatcggaatcactgtcggaatccgaatcactatccgagtccgaatcactgtcggaatccgagtcgctgtcggaatccgaatcgctatccgaatccgaatcactgtcagaatctgagtcgctgtcggaatcactgtccgagtccgaatcgctgtccgagtccgaatcgctgtccgagtccgaatcactgtccgaatcggaatcactatccgagtccgagtcactgtcggaatcggaatcgctatccgaatccgaatcactgtcagaatctgagtcgctgtcggaatcagaatcactatccgagtccgaatcactgtcgctatctgaatcgctgtcggagtctgagtcgctgtcgctatccgaatcactgtcagaatcggaatcactatcagagtcggaatcgctgtcggaatcggaatcactgtctgagtcggaatcactatcggaatccgaatcgctgtcgctatccgaatcactgtctgagtcagaatcactatcagagtctgagtcgctgtcagaatcggaatcgctgtcgctatctgagtcactgtccgagtctgagtcgctgtcgctatccgaatcactgtccgagtctgaatcgctgtcggaatctgagtcactatctgagtctgaatcgctgtcggagtcagaatcactgtcagaatcggaatcactatcagagtctgagtcactgtcgctatccgaatcactgtccgaatcggaatcactgtcggagtcagaatcactgtcagtatctgagtcactgtcgctatcggaatcagaatcactgtcggagtcagaatcgctgtcggagtcggaatcactgtcagaatccgagtcactgtcggagtccgaatcactgtcggagtcactgtcggaatccgaatcactgtcggaatctgaatcactatccgagtccgaatcactatcggaatctgagtcgctgtcgctatccgaatcactgtctgagtcagaatcactgtctgaatccgagtcactgtcagaatcggaatcactgtccgagtctgaatcactatcggaatctgaatcactatccgagtccgaatcactatcggaatctgagtcgctgtccgagtctgagtcactgtcactatcagaatcagaatcactgtctgagtcggaatcactgtctgaatctgagtcgctgtccgaatcggaatcactgtctgaatccgaatcactatccgaatccgagtcactgtctgagtcggaatcactgtcagaatccgagtcgctgtccgagtctgaatcgctatcggagtctgagtcactgtccgagtctgagtcgctgtcggaatctgagtcactgtcgctatccgaatcactgtctgagtcggaatcactgtcggaatctgagtcactgtcgctatccgaatcactgtcggagtccgagtcactgtcagaatcggaatcactatcggagtccgaatcactgtcggaatcgttgtccgagtctgaatcactatccgagtcgctgtccgagtctgaatcactatccgaatccgaatcgctgtccgaatcggaatcactatcggagtcggaatcactgtcggaatctgagtcgctatcagagtcggaatcactgtcagaatcggagtcgctatccgaatccgaatcactatcggaatcggaatcgctgtccgagtcagaatcgctgtccgaatccgaatcactatccgagtcggaatcactgtcagaatcggagtcactgtcgctatctgaatcactgtctgagtcggagtcactgtcgctatctgaatcactgtctgagtcggagtcactatccgaatccgagtcgctgtccgagtccgaatcgctgtctgagtcagaatcgctgtctgagtcggaatcactatccgagtcggagtcactgtctgaatccgaatcactatccgaatccgagtcactgtctgagtcggaatcactatccgaatccgagtcgctgtccgagtcggaatcactgtcagaatcggagtcactatcggagtcggaatcgctgtctgagtcggaatcactgtcgctatctgaatcgctgtccgagtccgagtcactgtcagaatcggagtcgctatcggagtcggaatcactgtcggagtcggagtcactgtccgagtccgagtcgctgtccgagtccgagtcgctatcggaatccgaatcactgtctgagtcggaatcgctgtcgctatccgaatcactgtcgccgtcagaatcactatccgagtcatcttcactaacattagcagctaaatcagcatagtagcctgcatcatcagcggcacttgaagctttctttttagcttcagatgcttcggacgctttctttttagcttcctctgcataactggaagcagccgagttttcgccggcagcttccgcagaatctgcatttgattgggcggctgccgcattagaagctgcagttgaagcagctgttgcagctgactgtgcatcagaagctgcttccgttgcttgttctgcgtaggagcttgcttctgagtttttacttgcatattcgcccgcaatgttcgcataagaactagcaactgaaccatattccgtcgcttgatttgcgtagttagctgcttcgctagctgcagaatctgccgcttcagttgaaacagcattaacagtcaagtaagcccggcctaaagttacagttgtcgtggtagtagtcccgttagtcgtattggatccagtaataactaggtagtaataaccggattgccctactgtcagatccgacagattaagtgtcgtaccagtctgaccactcagcgctgttccagtaccgtccgctgttgaagaataataccattgataagtaatattagtcccagtacccgtagtcgagccatctggaacccacgtcaaatcacttcctgcatcagcagttgtatcctcaaggccactaccaattgtaattgtctttgaagatgaatagctagttccgtcagcatttgtaattgttgctgtgattgtcaccgttccattagacacaacggtcaaaaggccagaatcatcaattgtcgcaatgcttgaatcacttgtcgtccaggtaatcgttccagtagcattctcagggttagtcgttgatgtaaactggctagtaaccttatcgtttgagccacttgaactgttcgttggattaatgacgtaatcatcaccagctatggaaatgtttgttgctggaatattgctactataaacatcgacttcagctaaattacttgcaaatgtataaactgtaacccagtttaacaagtcccaagaaaacccttgtacggcttggaacagcaatgatccagtatagcccgctttgatagtaactgttaatgaactactagttgacagtaaaccagcactgtcaaccggattatatgattcaatataagcgccagccttatctaaggtcatccaggtgccgttaacttgaacataccaagttgtttttgatgatagtgcaaccccacctagtcctaatgctgacgaagctgacaaggtaaaggtcccaccagaaacggtcgacgtcactgctgcgggttgagaagtcatcccaccagaaataacaatccctagaattgtcgttgcattacccgtattagtgcttttatatgaattcgtattgtttgaataattcgtcgcgttactagccgccgtactacctaaagccgcattggatgtagacaatgccgcatatgaggttgcttcactggctgccgctgaggcattagtcacatatgagctggccatagcataatcgcccgcagctactgccgatgaagcctggcttgtatactgagctgccatttccgcagctgaagttgcggccgccgctgcacccagagttgtcacggcataattattagtttgtgcaacgtatgagctacccaacgtagtgtttgacgcatactttgcacttaatgaactcgcgacactgattgcattcccggctgccgattcagctgctgacgctgcgctagaagcggctgttgcaatcgaattataataactggattgtgcttgcacaaccgtttgggtaatcgcactcgccgcactcgaagcagcattcaattgatccgttgcgtaggtcaaacgcaaagccgcgtaactttgttgcaaggcagccgaattataattcccgtccgctgcatatgaagcggcgagacttgccgcttcactagctgccgcagcgtatgaactagccgctacagctgcagaacttgccgctgcattataactgctagttgcagtggtattaaatgaagacccagcaacgttatatgcattagcagcgttggccgcataggatgcagctagcgaggcctggtcaccggccacatttgccgatgacgcagccatactagcataacttgatgctaaataatcagcagcggtatcaccgccatcttcattaaccgcatttttcaaagcagtatcgagactagctgctgcctcagatgccgcactacttgcagaactagcatattcagttgcaacactcgcataactcgatgccattcctgcccagatattagcactggtatacgccccttcggcttcataagaagcggccgaattactggccatagttgcaatacttgctgcctccgaagccacactcgcatatgagctagctgcgttgtatgaagaattagcctgtgatgtgtagtagctagctaatgagcccgtcaagttagctgaagaactggccaaactgatcgcactacttgcagcggcagcttgagaggttgccactgaggctgcgctgttggcttggctggcataactgctggcaatttcagtgtaggtcccttctggattggtaacaacaatggtaatcacattaccagctgcttcaaaatttgaagtcaagattaatgctgtaacccgcttaccactaacgactgcttgataataatacgtccctgaagtagttgcagttgttgtatacgttgccgatgttgcaccactaatggtcgtccaagttgctccatccgttgagacataccaaacataagttggtgtaccacttactgaatatcctgaatccaaacccaccttgttggtaattgtcacagtatctccagtcgagacactttgcgttgccgtactcgtcgttaaagtcgcattggaactaacggtttgttcattggcgacattcgtcgaaaacttagcagctaaagtcgcgttagactcagcagttgcagcgtaactagcagccaatgaagatgccgattgggccacccgagcgtatgagtccgcggtggcaggatcactagcactgacagcagattttgcagccgtactggcgacggcgtaggctgacgaagcagagctagcggccgttgcagcacttgaagcataagctgacgcttgagtgccagtttgcgttgccgccacactggccgcacttgaagccgtactctttgacgtattcgccacgtttgcacttgaagaagccgcactcgccaaatcactaattgcagtactattggcaaaaatggctgccgaactagcggtgctagtagctgtgctcccggcggcgtattgactaagcgcctccgttgcggcggaggaagtaactgcataggcagtactagtggcttcatagtcattatttgccgcattactacttacagcggcatatgctgaagatgctgccatcgcaacggtcgttgcgttaaccgcggccgttgaagccgcagctgccgtgctagaagcaacggtttaagctgaggtaacggccgtattatttttgtcgtattgcatggctaagtatgcactgttggctgcttcagctgccgagctggctgctaccgtggctgcagatgccgcactagatgcggcggaataattgctacttgctaaattaattaagccttgggtagcagcactgctggccgttgaggtggccgttgaagccagggctgcgtatgaactggccgcactcgctgcactatatgctaaagagtttgcaccagagtatgcgattgcattatcaacattggaccccacaccatttgtcaatgcgtctaagtacatgtttgcaatactattgtagtgccgtgacaaatcagccgcgttaagcgcttcttgataggcactttgggccgcactcactgctgcttgcgtcgttaggttattgaccaaactagcatagctgctggcaagtgtggcgtatgaaccagctaatgaagctgatgatgaagccgccttagctacggtactatcggtatgtgagctggcagccgataccgacgagtaagctgcaatggctgccgttgaagccgccgtacttgcagacttagtcgtgctggcaacactgcttgctgtcgagacagtacttgccgctacgctagcactgcttgacaaactcgtcgtacttgagctagctgcggaagaactgctgctatcagttaaactcgatgaagtagcgcttgacgagctcgaactactacttgaacttgcgctggatgcgctcgaactagccgttgaaacactgctactactagtacttgatgtacttgtcgcattagtcgtacttgtttcgctcgcagaacttgcgtctgaagcactgtcatcgctgcttgaactatccgatgaggattcggaattactgttcgaggcagtttcactcgaagaagatgccgtagacgagtcactggtagtactagttgacgtactacttgccgttgcagcagctagtgccgccgcactcgctgctgcagaagacgtatccgcccccgagctggcactactagtggcactacttgccgtatcgctactagtatccgccgaaaccgtatctgcatgagatactaactgaggtgcagcagtcaatacaaatgatgccatcgccgtaaatacccaagtacggccgactttaaacatcttgtagtgaacttgcggatctcccctaaaagatttatgtctcagaaatttcatggttttgccttccttctctaacctaatcaaacccgtttatatatgatacaaaaaacacatatatagcatcattggtatacaccatcaatcgttaggctatgcactcataatactatgattatgttttgttggcaatagttgataccgtcaatcttgttacacgttttccattaattttcctaaaatagttaccaaataaataatattaatgaaaacgagtgtaataggcctcataaagcccattacactcatctaacaacttaaaatttatttataacacttatggaaattttattgaaaatttttcagattttttttacgtcaatatcaaataaacgacaaattatgagtcgctttgacaattaatttgttgatactaagccgactaatcctgattttggtttaaatcagccgcgtgttgtgctgccgttttttgtggtccgcgatccaaactattcacaataaaggctagaataaccaaaccaaggccaatcaggtagacccaatgtaagcccgtatataagatacgatgaagtgtcggcaacaaatgagacggtaattgcgttgctgtctgtggattgatcaacttgttcatcatcgccatgttcgttcctgcatggtgctgaataccttggttcatcccaacgttcaacgcaattccaaagattgaaatcatcaacgtttgaccaatcgttcgactcaacgtattgaaggacgttgcgacgcccacgttctcagctggcacaaggtgttgcgacgtgacggtcgttgctgtaattgtaattccgaagcccacgccaccaatcgctgtgatcaggaagaaccatgggaaagcagtattaactggcaaccacgctaagcaaatgcttgtcacgaggatgaaagccaaactcagatacaaaatccgtcgcggcgcccactttgccaataaccgacccgtcacgaatgacccgacgatccacattaacgagctcggtgtcactgcgaatcccgccaaagaagccggtacacccagtatcccctgagtccaagttggaatataaacttcaacggccattaggaaaccactgactaaggccgccacggcattctgaataataaacgtgtggtttttgaataaatccatcgaaatcactggttcatccgtgcgactttcacgacgaataaatagccacaaactgagcgcactaatgatccaagcagtcccaacggccacccaactgatagtggcgtttcccaatagttggaagcttagcatcaagcacagcaagaagagcatcagccaaaagctacccaagtagtcgattttcacgttattgtgacgtttgggttctcgtaaataaaattgaaataggaaaagggtgatcaacccaactggcacattaatgaagaaaatccaatgccagctgagcctatcaacaattagtccaccaatcagcggtgccagcactgacgcaatgccccacgctgaactattgaagcctagcactttggcccggcgttcgaatgaataaatatctgcgataattgtcattgagactggcattagcgccccggcgccgattccctgaatggcccgccaaaaaattagcaccggcatcgaattagacaaaccgctcatcatagacccgataataaaaataattagtccggcttgcatcactggttttcggccgaccaagtcagtcagctttccataaattggcgtcatcatcgcattagtcaataaataaattgagaaaacccaattcatcaatgaaaccccgtgtaaatcaccaacaatcgttggcaaggcggtcgacacgattgtcccttcaatcgcactcataaacgtcgcgacgtaaatggcaaccgtaaccgccattacgttagttttacgctgttgcatcttagtaattctccttctctatcaatcattttaaaaccccgtgcatctaaaatagcccgcaaaaaaaagcgaccttgaaaaaaggtcgcttttagcgtcgagtacctacagaccgtaacgaatcaacgttaccgcattatttaaatgctgcttttaaagcatccactttatcagtatgttcccatggcaaatcaatatcggtccgaccaaagtggccgtatgccgcagtttgccgataaattggccgttgcaaatcgagcattttgataatcccagctggacgtaaatcaaagttttcgcgaatggcgttaatcaacgcttcatcactaaccttcccggtcccggcagtatccactgcaatcgaaactggttcggcaaccccgatggcatatgccaattgcacttcgacctgatcagctaaaccggcagccacaacgtttttggcaatgtaacgagcagcgtaacttgcagaacgatcaaccttggtcgcgtccttaccagaaaaggcaccaccaccatgatgggcaaaaccaccgtacgtatccacgatgactttccgaccagtcaaaccggcatccccttgaggaccaccaataacaaaacgaccagttgggttcacaagatacttagtttggtcatctaataaatcagctggtaacacagccttgatgacttgatcaatgaccgtttgccggatcgtgtccaaatcaacatcaggatcatgctgagtagacaagaccaccgtgtcgattcgcttaggttggttgtcttcgtcatattcgaccgtgacttgggccttagcatctggacgtaaccacttaatggtaccatccttacgtagcgctgcaattttacgcatcaaccgatggctcaatgcgattggcagtggcattaattcaggggtttcgttgatggcataaccaaacatcatcccttgatcaccagcaccgatttgatctaatgggtcagcatcgccagaacgcgtctccaaggaatcatcgaccccttgcgcgatatctggtgattgttcatccaatgagacaaggacggcacaattgtcaccgtcaaagccgtattgaccatcaacatagccaatcgacttgatcgtgtcacgcacgaccttttgaatatcaacgtaggccttggtcgaaacttcaccgaagaccagcactaatccagtcgtcactgaagtttcaacagcgacccgtgcttgtggatcctgggctaacattgcgtccaagatagcgtcactgatttggtcagcaatcttatcaggatgaccttcagagacagattcagatgtaaataagtgtctttcactcacaataaattcccccttgataatttcggttacaaggcatctaagcatcacttattcttcattgaacaagctaaacttatcctttcgggaacggctcataactatataaggttatcacaatcaccattttttttaaagatttctgtcaaattattgacgggaactgccccgaccggtacgattaactcattatcctaattagagagtgttgacaatatgattcgaatcggaaaattacatattaaacgcgattacatcgccttggcgatctttaccatcgttcaaagcatcattagttggtgggccgccctcgattacgggcgctcatttcaaacggcctcattttcagccgcgcagttaccactgattggctacaccttagccgtggccgccgcggtcttcattatcttagatcggcggattgctccccagtggagcctcattgcaattggaattaccgtggcctttgcatttaccaacattattgccaaggaatccgaactactgtacctgctattaacgtgcagtgcgtggttgctcgtgatggctgttccacgcttcggtatgcaaaactactttggtctagtcgttttcggcgtcatcatgacgttcacgatcccagtggccgtcttcgatttacaaaataactatttatcaactacttttctctggaaactggcccccatgctggctagttatgtcttcctatacgttccgagcttcagccgtcagcgccaaatcaatcaactgatttcggccatcactggcctgctacttgttatcaccatcttcctgcagccgctgacctggcaaacgatcgttgcaattctcatcacgattgctgtctggttcagtcaacagtcctttggccgtactcggttacatctcatgatcaacgtagccgttcagttggcactgattttattactttattaatatctagataacaacaaggcgtctacctagtctcttaaactcggtagacgccttgtttgcccctatcaccggttcttaaagtgctgctattaactggcgccacttttcaataatcgtctgcttgctgtaacgagttgctgaattgtaggcattcgtaatcagttgtgcttgtcgttcagggtgctgtaaatactgacgaactttcattgtcaactcatcaacatcattgggtgtcactaagtacccgttaacgccatcttcgataatatcttccggcccgtacgcaattcgatagccaataaccggcacgccatagctttcagcttccattgtggctagcgaaaagccctcttccacactcgtcattaaggcgaggcttgcccgctggtactcttctgccagattgggcaagaaaccccgaataacgatatttttttctagatgattggcctgaataaattgacgcatttgcatttcaatcttttgcccatgcccaaacaactgcaaagtcaggtcgggaaattcaccaactaaccgacgaaccacttccagttgatgtggtaattgcttttctggcgaatagcgcgccacactaataatccggtgcgggtcacgaccatcaattttaaccggatgaaccgttgtatagccgactggaatcacgacaactggtggtgaattatcatagcgtgccaataaatcacgcttttgatgctcggtcgacacaataattcggtgaaattggtctggatgggctaggacataccgatagaccgatttcaaatgcccacttaccacgtcctcaccaatccgtagatgccgtgctatgtaagactgaacacacgcgaattgcggggcgcgtatgacctaaggccgccgccgtttgtcggttacgatcacagaaatagacgtcatcagaagtggccaactcattgaagaagaatgtctgaaaagcctgttcggtattgaagaaaaagtctctttgttgatagttcttcaacgtaatcagtcgtagttttggctctggcccggtaatgtcatactgtttgataattttgacttgcccttgtaaatcataatacacttctgtgtgcacttcctgatgtttcactaaaaagcttgtccggctcaggaagccccggttatcataaaattcgcgtcggactttaacaccctgattatcaaaataattgacataatccaattgttgtcgcccggcgtccacaaaatgaacgtacatcaaatattgaccatcggtacccaggacgcgaaaatccgtcgtatttggaacctgaatcaccttaaagtgacaaacagcttgccaatagtgcatccaatcatgatggattttagtcactgcttcaggcatcgtcccctgaaagaaatcatacaaacggtagattgtaaaattaatccgaacgctgttcggacaaaaaagatcagcttcctttaaaatggtgtttaccacaaacccatcttttaggagctgatcttttgtctagtata

SEQ ID NO: 3 - DNA, 280668 bp, synthetic construct
  source 1..280668: mol_type = other DNA; note = Lactobacillus plantarum PDA6 - Contig 3
agcatctaagtgtgaaacacacctcgagatgagatttcccattcctttatggaagtaagacccctgaaagatgatcaggtagataggttagaagtggcagtgcggtgacgcatgaagcggactaatactaatcggtcgaggacttaaccaagtaattggtgttccggttcatatgaagatatttgatattagctagttttgagagcacaagtttctcaatagtgtggtgacgatggcgagaaggatacacctgttcccatgtcgaacacagaagttaagcttcttagcgccgagagtagttgggggatcgctccctgcgagggtaggacgttgccatgcgattattccgacatagctcagttggtagagcgcttgactgttaatcaagatgtcgacggttcgagcccgcctgtcggagtgacatagatgttggcaattgtgttaacatctatttttatatcatgccggcttagctcagttggtagagcatcggtatcgtaaaccgagggtcatcagttcgactctggtagccggcacttgtgaggtgggacgtggttctcgcctttttatttttaaatagacataaaatgattggcagctttgcgcaaacgcaaagctgcttttttgatataagaatgttagctatttgaatgccgaagtatcaaaatgatcgtaagggcttagtaggatgatgcctattgtcgccactgctttttaggtatgcttagcatatcaatcttgcggtttattataattagtcgcaataactgtaaattacatgctgcgaacaatcatagccattttaatagcggtactttattgttgataatttcagttttgttttttttgtttaattagatttttaataccaattgcgtattttcagcatttgaatgctattaattattttatattaaattagaatttagtgttaattttagaaagctaaaagccttataaaatgttctatcaactagtttttggtgctataaaaggatttaagactatttatgtatggtggatattaatttaattaatggttattagattagaaaacggttagtgctattgttgattaagattaaggctagtataatagttattatgtttaattaagaaacaaaacttgttacttttaaacgaaatacaaactggttaagaagtttggaggaatctctattggataaggaacaaaagctggatcggtcgttctttggccaaccccgtggcttacggacgttgttcttcactgaaatgtgggaacgattcagttactacgggatgcgtgcgctactgatctattacatgtactacagtgtcgctaaaggtggtcttggatttgaccaagtcaccgcagcatccattatgtcaatctattcggcattagtttacgtttctagtgtcctcggtggctttctaagtgaccgtgtctggggtagccgtaagaccgtctttattggtggggtcttcatcatgttaggccacatcgttttatcaacgccatttggagttggtgcactatttgtttcaatcgcacttattgtcattgggactgggttattaaagccaaacgtctctgacatggttggtcaattgtatacagtggaagatacacgtcgggatgctggttttagtattttcgtcttcgggattaacttaggttcattggttgcaccagccttagttggtcggatcggcttaaatgttaacttccacttaggcttctccttagctgcgattgggatgttctttggtctattgcaatactactttgatggtaagaagaatttaagttctgctagcctctatccaactgatccattagaacccggtgatttaaaaaaaatcatgcggtggacaatcttaggaatcgttgggattgggttgattctactattaatgcaattaatgaatgctcttacgttagcaaatgttattagtttaattagtacgcttgttatcttgacaccaatcgtttactttattttgatgttaacgtctgacaagactaatgcaacagaacgttcacgtgttcgggcttatatcccattgtttattgccgctgctttattctgggcaattgaagaacagggttcgtccgtacttgcgttatttgcagctaatcgggttaatttggatcttggttttacccatctagctgcttctgatttccaaatgctaaacccattgttcatcatgatttatacaacaccattcgtgtggttgtggactaagtggggtaaaaaacaacctagttcaccaactaaatttgcgattgggttgctattcgcgggggcttcttacctagtgatggctgtacctggagcgctctttggaactgcagggaaggttagtccatggtggttagttgccagttgggcagtcgttgaaattgctgaaatgttgatttcaccaattggtttatcagttaccaccaagcttgcaccaaaggcttttgcttctcagatgatgagtatgtggttcctaactgattcggttggtagtgcgcttaatgcacagattgtccgtttctactcgacgcaaaccgaagtgccatattttgcgattaccgggattgttagtgtcgttttagggattatcctctttatgatggtgccaatgattaaacggtcgatgcaaggcattcgctaaattgaatatttactcgaagatatgttatcttagtggtagcatatcttttttgttttggaggggttgaccatcgtacgaattgctttcagtagtgataatcattttgatgttaatcgagtggatgcgactgcgatgatgcgatctcaggcgacctatcttttacagaatggtgttcagatttatttgattgctggcgatctttttaatgactttcagcgtagtcagcagtttgtcgtcgatttacaggccctattaggcgcacagacgcgtgtttactggattgcgggtaatcatgacatggtccatggcatttcgtttgacgagcttgaaacagggtattttgatggctacctgcataaccggtatatcgatatttctggtacagattggcgcgtgattggacataatgggtggtatgactatcagtatgctgcccaggtccctgatacgactgcggccgacttcttacactggaagaatgcgttttggatcgaccgggctattaaacagccgatgagcgatcaggagcggactgatttaatgctcaaccaagtaaaagcgcagcttaacttggctgctgtggatcacaagcaagttatttttatgacgcactttgttccccggatcgattatttgcgtttttctgatgataatcggttttggaatatggctaacgcgttaatgggaacgccccggttaggacaactgttggagcagtttaacgtggcgcacgttttatttggtcatttgcacgtccatccgcaaccgcgggtgtttggtcagaccacctattatgaccaagcagtgggctatggactcaagcgtatcaatgaatggcaagccaataattttatggcggagtggtatcaagatacgcaaattctggatttgaaataaaaactgaaaaaactttgaaaaaagtcttgattttttattcaaaattatgtattctaatatagttgaatgatttacggaggggtagcgaagtctggctaaacgcggcggactgtaaatccgctccttcgggttcggtggttcgaatccactcccctccatttcattattgggctatagccaagtggtaaggcaacgggttttgatcccgtgatgcgctggttcgaacccagctagcccaattgttacgcctttcgtcgttaatcaggtcttaggatcttgatgtaacgacttttttattggcttaaatttatcttaatatcggcgggtagtgccacttcgtgaagaatgcgtaacggattcttcatgaagtggatttttttgtctcggtctgtttatttgccatcatcaataataatgtgatatgttttagtattctatttggggcacgatccagatgggataggaggtctggtcaatgaatttatttattccgtaagtacacggaagaggttaatggctggcattgttaattttaaaaatacgtactagttaacgcgtcatgacggccatcacaattattatgagtcgttcttataaaagcacaccaatttttaaagcacatatgggttatggaaagaagcgcgctagccgtgctgttcgaaatcgtatgaatcgtggtgaatttgatgatttgccggctaattcgcatgcctggtataaacgatgttatgagcagtatgatgttgtcgattattgctccagagagacttattcgcaagttcaacttgagctggagacgatgcgattagagattactcgtaacggtgggattattcgaagaatcccacaacatctggttgttacgtatacttttgatccggtgatatctgatattgtgcacatgcagcgaacggaagaactaattcctgcgcaagatgtccaaatgtttgtaggtacttttgaacagtggtgtcgggagcgtcgcaactgctgggccaaggcttattatcgaaaataagtcgtattggaacttgatctatgagatttggttgaagaggctacgtagccttagttgtcccactaccagccccaactagttgactgaataaatcaaattttccacagaactgttatcaaattcagtaacggcaggctgtccagcgtcgcaataatgtttgggcagcttttttgcatggcccatatctggattcaaaggcatttacctgccagagatgacgtggttattaagtatatgactagcagtcagttattcagaattataagatgtttattcaatcgaacctcgaaaattgagtttgttagcgttaagcttaatttaagaaatcataccatcatgaataacgtaagcgaccatgatgatgaccaaggaggatttgaaatggcggtaactaaaattgatttaaaaaccacgatgacttaccaggagcatgcaattactagtaaatcatttgctcgaaaattagggattgaactgccgtttgcgatgtacgcaatggcggcgggtgaaagtattagtgctgaacaatccacgctgacccgcttatttgaggttgttgatggtactttgaccgtccgtttggcgacggagaccgaccaagaagtgcatgcgggcgagatgttagtggtgccagctcatacggtccatacgttggtcgctgagcagccgtgccagtttattcaattagaaacgaaataggccttaatagcgagatgcggaggaattcaaatgagtttaattaacaaaattgatcatgctaaggtcctcaatttaactgaacaaattccactggatgatgatcaagttaatagccggacactggttcaacgggatgatttaagtatgacgctattttcagtcgcaaccgaccaagagattggcggccattctgcccagggcgatgcgatggtcaatattttaagtggagaagcggaaattacgattgaaggcaccatttatcatttaactgcgggacaatcgatcgtgattcctaaggatgcccggcacgcgttatatgccgttcaaggatttcagatgttattggtggtcgttaaacccgactaatgcacgtggttatcgatgagacggagggagtaatatgccgctgtatacgtttattggtgatattcatagtgccgcggatgatctggcagttttattagccgatcctgaagttaccgcgacgcgcttgattttcttgggcgattatattgatggtacggcggcacgctattttggtcatgccaccgagtcagctccgttggcgccgctaaaagtactgacgatggttagaaaacgggtacgggaatacggcgatgtggctttacttggcaatcatgatgaattttggctacggacagctcatggtgatgacaatgccaccgcaacttgggtgttgaacggtggtcaccggacctggcgcaaattagggatttactcctccaatcccaatcatgttcggcgggcattaaatggtgcgctattaaagccggatactgatttcttagcacatttgccactgatgtggcaacatggtcggttactggctatgcacgcgggtgttaactggcaatacccattaacacaacaaacaacgactgacctactgtggattcgggatgactattatgatgacttcacgactggcagtcaccgttggcatcggaacttattcaataaagtcatcattactggtcatacgccggtgcagaccttgactggttcacacactggttatttaaagatgcaggcagatgcgcaagacgttccacgatatctaattgatgcaggcagtcgttcaggcctgtttgatggtggaatttgtgcgttaacgctgacggtcgatggtgaatttgtcagggcgaaacgcgtgatcaagggtcaccgctacgatggtcagcaaatcgtcactccggccatgttggtggatcaggcgcactaagtatcactaaacatctcagagatagaacgtaaaaggagcaggctcacatgatattgagactgctccttttatgatgtcacgctagttactggttttcgcactatttcaagttgattggtttgcaagttctcactgaatcgttactcagcgtaactgaattataggtgtaaatagaaccagccaccaaggcctaaaatgaacaggccaagtccattgagggccgtaaacacgatcaaaaaatggtggattggttgttcatcattgaagggcaacaattgttttaaggcaagcagatttgctagtgaggccaccaatgaccccagaccgccgatgttgacgcctaaaaatagcgctgataaatggggcgtgaaattcgctagtaagatggcggctggaacattgctgatgacttggctagtaattagtccagtaatatagacactgggggctgtctgagttaattggttgagccaatgcgttattgcgggattatgactgatggcgctaacgaagatgaagaagcagataaaggttaagagtagtgcgtaatcaacgtactgaaagacgcgtcggttaatcatgaggcctacgacaatcgttccgataataactagtgaaatgggcaccaaattaaaaatgccaagcataatgaaactgagcaggccgcccgcaagcccgatttgactgcgagaaatgggcgtagatttggttggtgttacagttagcggcaaccgaggtaaccgccggcttaaggcaactaataaagctagactagcaagcattaacggagtcgacaatttaaaaaacgtgaatagattaacgtgatagaacgtgaccaaaaataaattttggggattgccaatgggcgtaaacgcgctaccaagattggctgccatgataattaaagtcgttgggtaggcaatggccaggtgctgccgccgggcgagtgtgagaaagattggaattaacgttaggatcgcaacgtcgttagttaaaatcattgagccaccaaaggccagtaagatgaataattgacacatttgacgggtatcgtgtgatttaactaagagccagtcccttaaagtatcaagcaaatacatcgcgcgaagtaattgaacactgatcatgagtgcaaataaggtgccaatcgtagcccaattaattgccgtcagttggggtgtcccgatgaacaaacttaaaccagcacaaattaatgcaataataaagattttatcgtgaagtgtgcgacgaacgactgtcaccatggtaaacgtccccctcaatagtcagttaattagttctaacttaaacaaactcgtcgctaaatgtaaactgatagacatttttcagataaggatgtagccacccgaacggtaacccaaataaaaaatcgcttcaaagttatgtgtttaactttgaagcgattagtgcttggttttgattgccagttagcttgcttaatgtgtatctagtttatcttgctgagtgttttgaccgaagaaccacaagtaggcaccatataacgcgttagcgagcatcactagttgcaatgctaacattgaggcggctgcaggactgaagccttttaattggttgaaccagataataacgttaatcacgtcgagtgtgatccacgcaacccattgggaacgataaccgttgaccatgaggacactaccgacaatcccaagtggtaacagggtcgcgtccaggtagatttggttaccgttaagttgtttactaaagtgtaagacaatggcgtagacgagtacggctaacgcgaaccaggcacaaccggctaatttgctcaatttacgaccagtcagttcgctggcatcgggttgcgctgccattttacgatgccagacggtgatgccgacaaattgcatgataaggtaaaatgattgcgacgcaatgtcaccaatcagccgattggtgatggccgtagtaagccaagccgcacaggcaataatgccccaactatagttcgtcagtcgcccttgatcaaccagaattaagttaatcacgaccgtaatcccggtcaataggccaatccagccatgtaggctgtaatcgcgacccagaataaaaccaatgatggtcacgattagcatcgtgctcatcatcaacttagtggtgcggcgaagcgtctttaattcattaagtccccgttgccagctgaagacggcgcacatggccgtgggcagactagtgatgtcttgctggcattgttgcagcagggttgataaggtgagtcggaaatggttgttctggttcatagtgaaacactccttagttgtttttagacagccgtgttcggaagcaacgctgtgtttgattgctgtttacattagcttgttcaagcagacctgtcaacgagcttcgcacatattgaaggccgattattaatagattaatcaattggtttcagtattgataagcaatcaccttaatagagtggctcgtgatatttatttgttgatagtgaaagttgagctgaaagaagtgattaattacccacagtttcacaaatattggtatagtagaagagtaagcgggaatgtctgtttaatcctgcctagccgttaatcggttagtggttaatgatataaattataagtcagaggagcgttttacggatgaaaatcggattcattggtgccggtaacatgggccgcgcgattattgatgggtggttaaaacaacaagcggtcgtcccagcagatatttatattcacagtgcccatgctgcgagttatcaaccttatgcgcaaaaaaatgggctacaggcctgtgacactaatttggccgtggcacaagctgctgacgttatcgttttggcagttaagccgaacattgcgttggccgcattaaaagaagttcaagcagctttaacgggcaagtgggttattacaatggtatcaggattgagtttggccgattatgccacggttgtccctgatctccccgttctgagaatcatgccgaatgtgaatgtggcgattggtgccgggatgacggcgttggttggtaatgatgccttaacaccagagcaatatgcggctgggcaacaattattcgatgcgattggtgccacgagtgccatcgctgagaaagattttccaactttttcagccttagcaggtagttcgccggcctacatctatttctttattgacgcgatggcccgcgcaggcgtcaagcacggtttgagcaaggatgcagcgactaagattgcggcgcaggccacgctgggcagtgcgcagaatgttttagcttctgataaaattccgtttgacctgatcgatcaagtttcttcacctggtggcacgacggttgctggattactggccatggaagaggccggctttatgaccgcagtggtgaagggaattgatgcgacgattgcgaaggaacttggcgaatcttaaattacttggtgctagtggttgcaagtttggtctataccgattataattaaaccagataaatccaaggaggaattgttcatgagcaaagtgttaaaacatgccatcatttatactggtctagaaaagatcgatgacggctacattcgtttcggtaaggaaattgaagcggttggtccaatggatgactacgtggcccaacccgatgatgatatcgaatttgtgagtggcaaaacgattgtaccgggcttcattgatgttcatagccatggtggttatagttttgattcaatggacgggaatccagctgaaattaacgaaatggttaatgatatggttgcccgcgaaggtattacgtcatacttctgtacgaccatgacgcaatccaacgaaaacttagatcattcgatggccggtattaacaaggccgccgatgaaaatccggttatccaaggggttcatttggaaggcccattcatttcggcgacgtttaagggtgcccaacctgaaaagtacattaagaatcctaacgttgacttattagacaactggaacaagttgtcgggtggtcgggttaagttgattacttacgcgccggaagatcctggttcgcgtgaatttgaaaagtactgcttggaaagtggcattgtgccttcagtgggccacagtaacgcgactcgtgaacaattattagcaagtaaagcaactcacgtgacgcatttatacaacgcgcaacgtgaattcaagcaccgtgaaccaggtgttactggtcatgccatgcttgaaaacaacatgtactgtgaattgatctgtgatgggttccatatcgtgcctgacatgatcaagctcgcttacgaacaaaagggcgttgaccggatcgaattggtgactgattcaatgcgtgccaagggtgaacccgacggtatcagtgaattaggtggtcaaaaagtgattgttaaggatggtcaagcacgtcttgaagaaggtaacttggctggttctgtcctgacattcattaatgccttcaagaacattcagaagttcaccggttgcggcattgctgaagcggttaagatggcttctgtcaaccaagcacgtgaatttgggttgactaagaaaggaacattggaagccggtaaagatgctgatatcaacatcttagatggcaatcaagatttagtcgcaacatatagctacggtaaaaaagcagctaaataaattagaagtaagggatgagtaccatgagttcgccaatttatattcaaatccacaaccaaattaagcaggcgattgaagcaggtcggtgggccgttggtgaccggattccgtctgaacgggagctggctacacagttcgatgttagtcggatgacccttcgacaagcaatccagacattggttgacgaaggaatattagagcggcgagtcggtgccggcacgtttgtcgcgaatcagaaggtccaagaaaaaatgtccggtgtcaccagttttactgatctaatgctggcccagggtaaggtcccatcaagtaagacgatttcatatcacgtgacgagcccgtcgctatctgagagcgaaaagttggcgttaggcgccaacgaacaagttctacggatggaacgaattcgctatggtgatgatgtgccaatttgttttgaggtcgcaacagttccagaacgactcgtcaagcagttcaccaaggacgaaattacgagttcgttgtatcggacgttggaagagaaggcaagtttagtgcctggtaaggctcaacagactgtttcggcgatgtctgcttctgagcgtatcgcagaatacttgtcagtccggcgtggcgatgcgttgctacggttacggcagatttcgtatttgcaaaccggcgaaccgtttgaatacgtgcggacccagtacgttggtaaccggtttgagttttatcttgaaaaataaccagtcagtcgggtgctgggcacctgattagagtggtgataccaaaaatagctcacctaggatgttattctaggtgagctatttttggatttatgactgaagactgggtacacgcacaaaagcaattgtcatcgtaacgcagtggcttataactggtaatgattgccagttaatgggcttgctggcgcgctatttttttaactaaccgcaagtagcggggtaacacgagcatccgcttgaaacgacttggttcttgaatcagacggtagagccattcaacgtggtgtttttgccaaaataacggcgcccgcttaaccgcgcctgcaattacgtcgaagctacccccgacacccatccagagcgcatcgaggcgttggcggtgttcggcgatgaaaaattcctgcttaggaaaaccagtggctacgaagaccatatcgggttgcgcggccacgatttggtcgacaacggtttgttcgtcgtcataatagccatcacgggcacccgcgacaacgatgccgggataatctcgttgaacgatcgtggtcacttgctttaacacggccggcttggcacctaacaaaaagatccgttggtgctgttggctaccccattctagtagtgttaaaagggtgtcatagccggtgatccgttcggggagtggtgtgccaagaatctgggccccctgaatgacgccaatgccgtctggcgtgatatagtccgcttgcgttaacacctgttggtaatcggggtgttcacgagcgtacattaagatctcggggttagcggtcaccacaaagcgattgcgatgcgcgagaatatcggtttgaagttgctgaacaaaaccagcgttagttgtcttgataaacggcacgtttaagatgttaaccgtgtcaaaagggactgacataagcgacctcactttctaatcataattaaagtataggtaaatcaaggaattctgcaactttttggatgcttaagcgcattcttttataaaaaatgctaaaataagcttaacttactgtaaacacggttattacctacgaaatggagaattatactcatgacgcaaatctatccggatgatagttttaccttgcatacggatgcttatcaaattaatatgatccaaacctactgggaacaaggtattcacaacaaacatgcggtgtttgaagtgttctttcgtaagatgccgttccaaaatgggtacgcggtatttgcgggtctggaacgagttgttaattatatcaatcatttacattttacggcaactgacatcgcgtatttacgtgaactgggtggctactcagacggttttctagattatttagcgaatttcaaatttgatgcgacgattcgtgcggttcgtgaaggggacttggtctttaataatgaaccgttgttacaagtcgaaggaccactggccacttgtcagttaattgaaacggcactactcaatattatcaattatcaaacgttgattgcgactaaagcggcgcgcattaaatcggttgtcggtgaagatggcttactagaattcggtactcggcgggcgcaagagtttgatgcggccatctggggaacccgggcggcttatattggtggctttgacgcgacgagtaacgtgcgggctggcaaaatttttggtattccgattagcgggacccatgcgcatgcgctcgtgcagacttatcgaaacgattatcaagctttcaaggcctatgcggagacccatcatgactgtgtctttctagtggatacgtatgatacgttacgtagcggggtgccgagtgcgattcgagtggctaaggaaatgggtgataaaatcaatttccaaggggttcgtatcgatagtggcgatatggcttacttatcaaaacgcgtgcgtgaacagctagacgaagctggttttccggatgccaagatttatgcgtcaaatgatttggacgaaaaaacgatccaaaacttgaagatgcaaggtgctaaaattagtgtctggggtgttgggacgaagctaatcacggcctttgaccaacccgcgttaggggccgtgtacaagatggtttcgatcgagaatgatcatcatcagatggttgatacgatcaaactttcaaataacgcggaaaaggtctcaacgcctggtcaaaaacaagtttggcggattacgaagcgtgcggatggcaagtcagaaggtgactatgtgacgttgtacgatgaagatccgcgcaacgaagaatcaatttacatgttccatccaagctatacgtatattaataagacggtcagtgattttgatgcgcgaccactattggttcccatctatgaccgcggtcaacaagtttatactttaccaacgttagatgaaatcaaggagtattcatttgaaagtctagatgcactctgggacgaatacaagcgggatttaaaccctcaggattacccggtcgacttgtcacaaaaactttatgatcataaaatgaatattattaacacggtcagagaccacgttaaccataaagatgaggaggaagcttactaatgcggccattacaagctgagattattaaagcgttacacgttgcaccaacgattgatccagaagttgagattcgtcgaagtattgattttttgaaggcttatttaactaaaaatacctttttgaagacctatgtgcttggcatctctggcggtcaagattccacgttagctggaaaattgacggagatggccattaccgaaatgcggcaggaaacgggtgatgatcgctatcaattcatcgcagtccggttaccatatggcaatcaagcggatgaagcggatgcgatggcagcgattgattttatgcaagccgacgtgacggatcgggtggatattcaaccggctacggatgccatggtaactgcattggaagctaaccaattgacgattcatgatttcaacaagggcaatattaaagcgcgccaacgcatgatcgtgcaatatgggattgccggtgaaatgcacggtgctgtcgtgggaaccgaccatgcagccgaagctgttactggtttttataccaagtacggtgacggtggtgcggatattgtgccactatggcgattgaacaagcgtcaaggtaaacaaatgctggccgctttagatgcgcccaagcatttgtatgacaaagtcccgaccgctgacttggaagaagatcggccagcattacctgatgaagtcgcgttaggtgttcgttacgacgacatcgacgattacttggaaggccggacggtcagcgatgctgcggccgaaaagattgaggcgtggtacttaaagactgcccacaaacgccacgcggccatcactgtgtttgatgatttttggaaataagctagttagctgataatcgattaggattacggctaacctaattaaaaaggcgacttgaagattattcagcttcaggtcgcctttttgcatagtcacataattttatggtgactaccgtaatattggtgggattggtggaaaagcggtagaatggtttaaaatatgtaaacgcttaatgtgagaatatccaagtgctgtggcgaatgcagaggtagtcaaagcgattattttgctagacagctcccatggaatctggtattcttacgatacaatcataagggagtaactagcagaaatattctgcggcaatatcgtcagcaagaagccaatccggtattgtcttaaatagtgagacttatgtatgttcacacaattttgcgtgcatacatgagtctcattttctatctggagatcagttagggagtggggctcggatgccagaaaaggagcttacgatgagtacaaaaccaaagtatcaacaagcgttatccgccgtttatgaggaactaggcactgatgaacacggcttacagcaaagtgctgcgtcgcaacggttagaacaatatgggccgaatgcgttgaatcagcaaaaaacgacttccttgttgcaaaaatttattgcgcagttcaaggatttcatgattatcgtcctgttagtggccgccttgattgccgcctttactggggaagccgtcgatgccgttatcatcttattggtggtggtattaaatgcgattttcggtgtcttccaggaatcgaaagcggaagaggccatcaacgcgttgaaggaaatgtcagcgccggacgcgactgttttacgggatggtcagctgcaaacggtcaagagtgacgcgttggttcctggggatgttgtgtcgctagaagccggggatatcgttcccgcggatttacgattaattgagagtgcgtcattgaaggttgaagaatcggcgctgacgggtgaatctgtcccagttgagaagcaggcggagatgattgccgatggggaattaccaatcggggaccggttaaacatggcgtacatgaatagtaacgtgacgtatggtcgggccactgggattgtggtggcgactgggatgcagactgaagtaggtcgaattgccggcatgattgaagcggccgatgagacgaccacaccactgcaagcgaacttgacacagttaggtaagtcgctgacgattttaatcttagttattgccgcagtggtatttggtatcggaatgctgcgtggtcaagagagtttgatcaacatgttattgacggcgatttcgttagccgtggccgcaattccagaagggttgccggcaatcgttacgatcacgttagcgttaggaacccagcggatggccaaacggcatgcgttagtacgaaaattacccgcagttgaaacgttgggaagtaccgatattattgcctctgataagaccggaacgttgacgcaaaacaaaatgaccgttgaaaagttggtcgtcaaccaggaactggtggacgcgcgcgctactgaattgccgcttgatagccatttagcgcaagtgatgattttaagtaatgatacgaagatcatgccggatgggttagcaggtgacccaacggaaacagcgttgattcaatataatttggatcagggttatccagtcgatcagttattgacggaccgcccccgagtaacagaagtcccctttgattcggaacgtaaattgatgtcgacggtgcaccccttagaagatggtcgcttcttagtagccgtcaagggggctcctgatgaattactcaaacgggtcactcagattgaaagtaacggtgacgttcagccattaaccaagacaagccgtgaccagattctaactgttaatcatgaattggcaacgcaagccttacgggtcttagcatttgcttataaagtgatcaccacggttccgacgactgttaatacggagacgttagaaaatgacctggtctttgccgggatggtcggcatgattgatccggaacggccagaagttgagcaagccgttgcagaagctaaatcagctggaattcggccgttgatgatcacgggtgaccaccgtgataccgccgaagcaattgccgtccgtcttggtatcattaacgctggcgaagatgacgctgtgattactggtgccgagttagatgcaatgagtgatgcggaattcggcaaaaaggtcggcgattactcggtgtatgcccgggtggcgcctgaacacaaagttcgaatcgtgaacgcatggcaaaaacgaggcaaagttgttgctatgactggtgatggggtcaacgatgcgcccgccttgaaggctgctgatatcggtattggtatgggaatcactgggacggaagtttccaagggggctagtgacatggtcttggctgatgataacttcgccacgatcgtggttgctgtcgaggaaggccgaaaagtgttcgccaatattcaaaaggcgattcagtaccttttgtcagcgaacttaggggaagtcttaaccttgttcgtgatgacgatgttgggctggcaaatcttggcaccagtgcatatcttatggatcaacttagtgaccgacaccttgccagcaattgccttaggcgttgaaccaactgaaaagaacattatgcagcataaaccgcgcgggagaaattctaatttcttctcaggtggggtcttcagcagtattatttatcaagggctactggaaggtggcattacgttgctcgtgtactggttagctttgacgtatccggttcacgcaacggcctcattagctcatgctgatgcgttaacgatggctttcgcgacccttggcttgattcagttgttccacgcgtttaattccaaatctattcatgaatcgttgtttacggtcggcttgttccgaaacaagttctttaattgggcgattctagttgcatttgtgatgctggcgatgacaatcgtcgttcccggtctgaatgggttattccacgtgagtcacttggatgcttaccaatggggaatcgtggccttagcttccttatcgatggtcgtgattgttgaatttgttaagttcttccaacgtcgacacatgcggcgcgcataacccacccattaggggtaaaataaggctaactaatttaaagaaaagagtttgtacatgaaaaaagcaacgattcaaacgtatatgccagtactgtctaaagttatcgaaagtactgaaaaaatgggggaagaattaaacccatcttttgaaaaactacgtcaggccattgataatgacgcagttgccaaaatggttccagctgaattcaatgatattcagatggaatttagcgatggtactgaacagtatcaacaaaatttggcacagttgaaaaaagttgcggtacccgcacggttaatggggcggcatcgtaatttgttagcagcatacgaagcctacacgaatgcgtgtgcggccatgacggctagcatgaacatcgacgatcaaacgattgatgtggctgcttttaatcaggctgaaacggatcaagagactgaaatgggccgcgtttcaaataacgtgcaacggatcatgaatacagtcatgtaggagcgctaatctgggtgattggatttagcacactaataaaacgctcggtaacgtttatgcgttgccgagcgttttattgttggttgcggggcagccaactgtgcggccgcgccgtgctcgtttagcctaatgggctggttttttccagctcacaaccaatgtgtgaacagtatcggtaatggcttcgattggtagtgacagtcaacgacaattttcagatggtcattcggcgcggaaaccggagtaaaacgcgtataatataatgtaatgagattaaaagattgggtgaaataatggataatcagattttaacgttagttgatcaaacgctgacgaagtttaaaccgcaacagatcaaagcggttctcggactcatggacgaaggcaacaccgttccgtttatcgcacggtatcgaaaggaacgtaccggtaatttagatgaagttgaaattcgcgaaattaaagataactatgatcggcttgcgagtctagagagtcgtaaggcagatgtgatgaagttgatcgctgaacaagatcacttgacgccggctttaaagcaagccattgaaaaagctgacaagttgcaagatgtcgaagatttgtacttaccgtacaaacagaagcgacgtacgaaggcaacgattgcgaaagatgctggactggagccgttagcagcttggttattacgttttccggcaagtggtattcaggaacacgcggcgcagtttgtgaacgaagcgcaggacatcacagacgcgaataccgcgttagctggagctcacgaaatcttggctgaggcctttggtgataatgccggtttacgaaactgggtccggaattatacgcgtgaccggggcttgctagtcgcaaaagtgaaacccaagggtaaagcagccgatgaacaaggtgtttaccaacagtattatgattttaatagtcccatcaagcagatggtaccgtaccgggtactggctatcaaccgtggggaagccgaaaaagtattgaaagtcagcattgatgttgatcgtgctggaattgaccggtattgtcattttcgctttattggtcagcaccacggcccagcgattgaactagtagaagctgcttatcaggatgcctacaaacgctttattggcccagccatcgaacgtgaacttcgcaacgaattgagtgcggctgccaatgaacaggccatcaaagtctttggcgataatttgtaccacttattaatgcaggcaccattaaagggtcgcgtggtattagggttcgatcctgcttaccggacggggtgtaaattagccgtgatggacgcgaatggtaagttcttagataaacttgtgatttatccacacaaaccagctccaactgccaaacgggaagctgctgcgggtgagtttaaaacctttttagagaagtatcatgttgaaatgattgcgattggtaacgggacggcttcccgcgaatccgaggagtttgtggcacaggtattgaagactatgacccgaccggtttattatgtcatcgttaacgaagccggggcttccgtgtactctgctagtgctaaggcgcgtgctgaatttcctgagctacacgttgaacaacgtagtgcgatcagtatcggccggcgactacaagacccactggcagaattgatcaaaatcgatccgaagtcagtgggagtggggcaataccagcacgatgtgccccagaaggaattgacaacgcagctggatacggtgattgagaccgcggttaaccaagttggggtcaatttgaataccgctagttcggagctattgacgcatatttcggggctatccagcacgattgcccaaaatgtgattacttatcgggatgaaaatggcgaattcacgagccgaccacaattgaaaaaagtgccgcggttgggaccgaaagcttatgaacaagcggtcggcttcctgcgaatcattgacggcaagaatgtttttgataacacggatattcatccagaaagttatcccgcagccaaagcgttattggcagcggctggattgaagacgacggacgttgggacgactaaagcccaacagttgaatcaattagatttagcgcaacttgcgaccagcaccggtgtcggtgaactgaccttaaaggatattattagtagtttgcaaaagcccgggcgtgatgttcgtgatacgatgcccgcaccgttactccggcaagacgttttaaagatgagtgatctaaaaccagggatgcagttgcaaggaaccgtccgcaacgtggtcgactttggggcgtttgtggatattggtgtcaagcaagatggcctcgtacatgtctccaaactaacggataagttcttgaaagatccgcgtcaggcggtggcagttggcgacatcgtaacggtgtgggtcgaagaagttgatgaacagcggcagcgcatcgctttgacgatgattgcaccggctgaagcataatgactgatttagagttacagcagctcgttgcgaccatttccatgcgtgattttcaccgtccgttccagcaccgcgcttattttaatgctcggttacgaacgacgggtggtcgttatcagttggcctcgcatgatattgatatcaatccgaagatgctgactgattttgatgaggccaccttgattggcgtcatcaagcatgaattgtgccattatcatttacatttgactaagcggggatatcggcatcgtgatgcagactttaaacgattactcgcgcaaatgggtggctcgcgctatgcaccagcgccgaagcaggcgacggcccggccgtatcggtatatttatgaatgccaacggtgtggccggcggtattaccgcaagcgccgcatggacactcgccgctatacgtgtggtcgttgtcaggggccaattaaattagtctgaaaaggtttgctaaagtggtacgcttccgatagaattagcttaactattgatatggagggattaagatggaaacgattaaaattggtgtggtcggactaggcacagtcgggaccggcgttgtaaaaatgcttcaagcgcatcaggaaaagatttcagaaattaccggtcgtaagttggaactagcctgcgtagttgtccacaacttgaaaaagcacgaacaagttgatttgggggacgttcagatgaccgaccaaatcgcgaccctgcttgatgatccgtccattcaaattatggtcgaagtgatgggttcaattcatccggcgaaggaatatattacgcaagccttgcaagctggcaaacacgtggtgacggccaataaggacttgattgcgcaatatggccgggagttggttcagattgctcgtgaaaatcatcgcgacttattctatgaagctagtgttgctggtgggattccaattttacggacgattgataatagtttcgccgctgaccggattcaacgggtcatgggaatcgtcaacgggaccactaattacatcatgacgcagatgctgactaagcattggtcgtatgatcaagccttgagctcagcacaagacttggggtttgccgaaagtgatcccactaatgatgtcgaaggccttgatgcggcgttcaagatgattattttaacgcagtttgcctttgggatgagtctttccctcgaccacgttcaagttcagggaattacgaaaatcagcccagaggatattgcggaagctcatcagcttgggtatacgattaaattactcgggattgcggaagaaattgacgatcgcattgcggtatcagtcgggcctgtgctcgtttctgatcaacatccacttgccacggtacaaaatgagaataatgctgtaatggtaacgggaacggctgtggggaacacgatgttttacggtcccggcgctggagaactcccgaccgccaacagtgtgctgagtgatattacaacggttgcgaaaaatattgcgttgaatacgactggtaacacgtttaactcttatcgccaggagacagtcttagcaacgcctgaagatgttgtgtatcctcactttattgccttgaagatgcgtgatgtgccggggatgatgatgaaattgacggcgattatgacccgcgcagaagtttcatttagtcgaatcattcaaaatcaattaggtgacggcaacgctcgtgttgtgatcattacccatgccatgaatgatcaacagttagcagatatcactcgtgaaatcggtgaacaagagaatatgcaactattagcgagttataaagttttaaagaatgcgtaggtgaggacatgttaacgatttcggttccggcgacttccgctaatcttggtcccggttttgattcaatcggtctggcgctggacatgcaactaacgctacaagtgttgcaacctagtgaccattggcagattgaccatccctttggggcggatgtgccgacggatgaacgcaacttaattattaaaacggcgttgcatttggtaccagatttacaaccacagcatttacagatggcttcaaaaatcccgttagcgcgcggattgggtagtagctcgacggccatcgtagccggcttagtgctggcaaacgaattgaccggcgcaacgcgctcttctgctgagctactggaagttgccactcaactggagggtcatccagataacgttgcaccagccctattaggaggcttggttgtggcgacgaacactgatggacgcgtccgtgcggtgaagttaccgttaccgatgctttttgcaagtgtctacgtgcctaacgaaccgctattgacgaccgccagtcgccaagccttgccaactgaattggcgtaccaccaagccgttactggtagtagtgtggcaaatacgttagtggctgctctagcaactcaaaattgggacgtggcgttaccgctgctagaacaggaccagttccatgaacagtatcgggctaagttagtgccggcactacaaacggttagagaccatgcccatgctctgggattaacggggacttatttgagtggtgctgggccgacggtgattactttgggtgattacggtcaactcgctacgttgcaggcacaattgagccaagatacaacactcaccggccaattattcttattgccaatggatgcaactggtgtaaaagtacaaaaatcttaaaataagcttgtcagactcgcaaaattttgttatgatattttttgtgagttgtgatgcggccatggcggaattggcagacgcgcaagattaaggatcttgtcggggttaacccggtggaagttcgaatcttcttggccgcactaacgaatataagaatcgatttcgataggttaggccttgaaggatcgattctttttttgttgcggtaaattggactggtcacgttattccaggcttgcttttttgccaactacttcaactatgttcaccaaatttgccgtaccttattgtttaatctcatgattaccagcattataatgaaaacggttaatctactgattacgatattaagagaaggcgaggaccaggcattgattagaatgagtagatggtggtggcgtatcttggtgggcggcttgctggttagtggcgtggtttaccccgcacaagcggccgtaacgacttatccgattacagggattcaggtggtgcagccgcgggtctatcagacgaatagtcagaacggtgtcggttaccatttaaccgtcgtgcgtcatcagcgtgcccaattgcgtgttaatttacatttaaagtatcaccagcatacacagtggacgcgtactgagcaagctgatatttatcgcaacgggcattaccaacgcttctactatgtgcataatggttatcagcagagcggctggatagctgctaatcagctaaaacccgccagtacggcgtcggttcaactgcgggtaccactgattgaccagctaccggagttgccaacggggtgtgagatgacagcgactaccatgatgctgcagtatgccggcgttaatattaataaggaacagtttgccagccacgtgccgcgcagttcgaatcctaacactggttttgttggtgatcctgcttcggcttacggtattggtctctacatctacccccaaggcttgttaccaacgatccgccactatctgccgtccgctgtagatctcagcggggtgggcctgcaacgacttaaagcacagctcgctaaacgtcatccggtagtcgcttgggttcagggactcgatggttttgcgagtcatacagtgacgctcactggatatacaacggcaactattaggtacaatgatccttggcgtggtcaatctggacagatgggtaaccaagcgtttgagacgatgtggcaattaaatggtcgtcgggcactgagctattaagaaattgataccatagttaacattagttactgtttcataattttatattaaaaatacgctatttgacacacaaaataatcgtttttaatactgtatcgcgctagtgtatcaactttgagcctgaaataagggcttttagctttagtgtattttggcacggaatttgcatatatataagtgagtgcgaaaaagattgcgcttacagtatcaaaaacataaatagttacaggcaatttagatattatttattcgttttatatgactgtaacgaaaaaataggaggtacaaagatggtaagcattatcattgctagtcacggcgaattcgctaaaggcatctatcaatctggatcaatgattttcggcgaacaagaaaacgttcaagccgttacgttgatgcctagcgaaggccctgacgacatcaaggctaagttggaaaaagccattgcttcattcgacgatcaagagcaagtcttattcttagtcgacctttggggcggtacaccattcaatcaagttaacggcttgtttgaagcacacaaggacaaatgggcaatcgttgccggtttgaacttgccaatgttaattgaagcgtatgcttcacgactttcaatggattcggcacacgaaattgccacgcatatcattgaaactgctaaggatggcgtgaaggttcgtcctgaagcattagcacctaaggaagaaaaggctgctgccgctgcaacgactaacaataacgctggtcggccaggaacgttaacatacggtttggcacggattgattcgcgactcttgcatggacaagttgccactgcttggagtaagacggttaacccgactcggatcattgttgcgtctgataacgttgctaaagacgaactgcggactaacatgatcaagcaagcagcgccttctggtgttaaagctcacgttattccaattgctcaaatgattaagattgctaaagacgacaagcactttggtggtcaaaaagcattggtcttattcgaaacgccacaagatgcgctacgtgcaatcgagggcggtgtaccaattaagacattgaacattgggtcaatggcccattcggctggtaaagttcaaccaaacaaggttttggcatttgatcaagatgatatcgacacttaccgtaaacttgaacaagatggcatcgaatttgatgttcggaaggttccaagtgatagtaaggaaaatatggataatattttgaacaaagctgaaaatatgttgaaggaacaaaaatagttccaagaatatcagaaaagatggaggattaaatcatgaatttgaacgtaattcaagtgattttagtcgtacttgtatcatttttagctggtatggaaggtattttggatgaattccacttccatcaaccagttgttgcatgtaccctaatcggattagtaaccggacaattggtcccatgtattatcttaggtgggagtttacaaatgattgccttaggttgggccaacattggtgccgccgttgcacctgatgctgcgttagcatcaattgcatctgcaattattttagttttaggtggtcaaggccgtgccggggtttcctcagctattgcgattgccgttcctttggccgttgctggtttacttttaacgatcattgctcgtacgttagcaactgggattgttcacatcatggaccgtgctgctgaagaaggtagctttagcaagattgacttctggcaatgggttgctatctgtatgcaaggacttcggattgcaattccagccgctttgattttagccgttggtgctacgccagtgaaagcaatgttaaatgctatgcctagttggttaactgatggtttatcaatcggtggtggtatggttgttgccgttggttatgcaatggttatcaatatgatggcttctcgtgaagtttggccattcttcgctttaggttttgttttagccgcaatcagtgaaattactttgattggtttaggtgcaattgggatttccttagccttaatgtacttggcactttccaagcaaggtaactctggtagcaacggcggtggcgctaatactggtgatccagttggcgacattatcgataagtattagagaaggaggcaaactgagatgtctgaaactacaaatattactaaaaaagtaacattaagtaaaagtgatcgtctgcatgtttggtggcgttcaacgttcctccaaggttcatggaactacgaacgtatgcaaaacggtggttgggcttattctttaattccagcaatcaagaaattatatacaactaaagaagaccgtgctgctgctttgaagcgtcacatggaattcttcaatacccatccatacgtggcttcaccagttattggtgttaccttagcgcttgaagaagaacgtgccaatggggcacctattgatgacgttacgattcaaggggttaaagttggtatgatgggacctttagccggtgttggggacccagtgttctggtacacggttaagcctatcgttggtgccttagctgcatcgttggctatttctggtagtattgttggaccaatcttatacttcgttgtttggaatgcaattcggatgggcttcatgtggtatactcaagaatttgggtacaaagccggttctaagattaccgacgatttatctggtggtattttacaagatattacccgtggcgcctccatgctggggatgtttatcttagcggcattgattgaacggtgggttaaggtggacttcagtccggttaaggtttcgaccattaagcaacaagctgggtcgtacattgattgggataaactaccaaagggtgcttctggtgttaaggaagccttaacacagcaagctgccggtcgttcacttgacaaatacaaggtaaccactttgcaagacaacttggatcaattaattccaggcttaatggccttgttattaaccttcctctgcatgtggttattaaagaagaaagtctcaccaatcgttatcattctaggcctcttcgtgtttggggttctgctgcacgttattggttggatgtaatacttgcttgtgtcatatttaaaggatggactcgtgggagctcatcctttttatttacaagcgtgctttgcataacatagagactcgccgtataatcggtatgagaatggatacgaggaggggttagtatggtgcaatcaattaatactaaggttgatttagttacgaacggcaattcgcacatgggattgactgattatggcaaaatcatggtcggtgataatggttttgaattttatgatgatcgcaatgttcgtaattttattcaaattccttggactgaggtgaaatatgtagttgtatccgtaatgtttggtggccgctggattccacggttctcttttcagacgaaacgtaatggtatgatcactttttcagctaaggaccctaaaaaagtgttacgggccgttcggcaatatattgagcctgatcgaattgtaaaatcactgacatttttccaagtccttgggagaatattcaagggtaaaggtaaaaaagataagtatttgaaataatgaccaatgctgtcgagggttctttgccgacggattggtgattatttaatagttagtttaagaagcttaagtatcaacgggtggggttagcgcgggttgatacttaagcttttttttgatgcatcaaaagcagtatccgagcacgttaaggtgcgtcataaatggaatttcaataccatgaaacagaaatagttgtactgacaagtcttaaaaagtaactgattcgggaactatggtagaatatagtgtgttatagtgtatcaaaacggatcagttatttgatagtggtgaaaaggagtggcgaagttgaccagaaaatccaagatttgtgaatacgtccgtcaacatagcgatcgacacggactgacgacggaaatggtagcgactgctttaatgatagcgcgttcaaacgtcagcaaggaattaaatgcactggtgcgagaaggccagttgcacaagctgacagggcggcctgtgcactatgttccggtgaatgcaacagccacaacggccacaacaactagtggcgtagcgaatggagcgacgacagagcgaataccgacagcgcccgtcgcgacgtctgtgcctaaaccggttgtaaatgatatatttgccagcatgattggctcgcatgagagccttgctaatcaagtggaacaggcgaaagcggccattctttacccaccgcggggattaaatacattaatcattggcccgactggttctggtaaaacttactttgcaaacgccatgtatcgttttgcggaaacccaacaagtcttaacgaacccgcaaggcctgattacgttcaattgtgccgattatgcgcataatccggaattattgatgtcgcatttgtttggttatgttaaggggtcttttacaggtgctaatgaagataaggacggtttgatccaagaagcggatgggggcatgttgttcctagatgaagtgcatcgtctaccaccagaaggtcaggaaatgattttttatttcatggatcacgggacttattcacgactcggtgagacggcgaagagtcaccatgccaatgtccgcttagtttgtgcaacgaccgaggacccagaaagtaccctactgcagacctttgttcggcgaattccgattacgattcagctaccagcgttcaatcatcgctcagccaaggaacgtttagaattactgaaggcattattgtcattggaagctaatcgaatcaataaacagattcggttaacggaggacgtggtgcaggccttacttggctcagtcacatttgggaacgtcggtcagttgaagtcgaacattcagctggtgtgtgcccagggttttgtcaatagcatcgaaaatgacagtgaaatcacaatcacgatggatgatttgccacaaaatatccgtagcggtctcatgacagtagcctctaaccgtcacgaactgggggccatctctgagttgttggacccggttctcatcgtgaagccaaatgatggtccaacgccgcttcgtaataagaacgataattatgaattaccatataatttatatgagattattggtgataaagcagcgttactccgacgggaaggccttgataaagaacacatcaatcgtttcatcacgaccgatatcaatgtgcatttaaaatcattttataaacaaaatcagttagaagtttcaccagaaaacaagttagccgagatcgttgatcaggacgtcattgattttaccaagacggcgcagatgacggttcaagacatgctaggttataatttcaaggataactttatttacgctgtgagcttgcacgtcagttcctttatcaaacgcatccaggcaggcaagcccatgcgtcaaatgagttcggatatgttagcgatggtgcgtgaatatccggctgaaatcaaagcagcggaggcgctcaagcaaggattagaggaacggtatcatttaccgattcccaagtccgaagtttattatctggccattttgctcatctcgttaaaatcgatgcagcttaacggcaaagttggcgtgctggtggcagcgcacgggatgagtaccgcgtcttccatggcacaggtcgtcggacaattgttagatgattatgatgttcaggctttcgacatgcctctcgatatggacccgagtgtcgcctatgatcatgtcaagcgacgagtagaaaagcttgattctgggaaaggaattttgttactagtcgatatggggtcgttaacgaccttcggggaacgaattcagcaggagacgggaattgcgacgcgaacgattgacatggtgaccacgccggttgttttggaagccgttcggaaggctagcctggtcgatagtgatctggattctatgtatcaggagctcgttggtttcaaaggttattcgcgaatttcacggaacctaccaacggatagtcagcgcgcaacagtcaagcccgccttagcgacggataagacggcacaacgggcgattattgcaatttgtgcgaccggcgttgggacggctgaacgtatcaagtcaattttagacagtttattagctcaaaactttatcgaaggtatcacggtattcccaatctcagtggtcgaaatgaagacacggatacaacaaatcagtcaaaattatcaaatcattgcggcaactgggattacaaaacccgaattagacgtcccttttatttcattggaagaattgctacaaggtggtggcgaaaagtttattgatcagttagcgacggggatcgattcgccacagaccatggcggaagaaagtcagcagttgacaccggaactctgcgaacggtacttaggcgattacttcacgtttttaaatcctaagaagttaacgggaattttatgggagtatagcgaagtgattgcgacgcacttggatggtgtaatgacgaatgcttttcgcattgatttgattatgcacttagcgggtgcgctagaacgaacggccatcaaagatgaaatttcggcacccaccgaagagatgccagacattatggcatcgaagtggtacccacttgtgcaacaggccaatcagcaattgacagatcaactacagttaaccttctcagatgctgaaaattattatattgtgcaattattggagactcatcaggcaaaggtcgcgatgagttgatacactaacttggcatgctttttgcatgtatcttattgagtagatttaaccgactgaggagggaaagtagatgttagcatttgtcgttgtcagtcatgggagttttgcgcagggcgttgtcgattcatcctacatgatctttggcaagcaagataaggtccaaacggttacctttcaactggacgaagaacctaatgaattagctgataaattagctgctgcggttgcccggtttgacgcggatgaccaagtcttattcttggttgacctatggggcggttcgccatttaacgccgctagtcggatcgttgccgaacatacagagcgcatgggtctgattaccggtctgaacctgccaatgctgattgaggcttacactgttcgtgataagccaattgatgaggtgattgcccaccttgaagagactggaaagattgggattaagcatctcaagttgttacaggacgatggggaagatgaaccgctatgacgatggatattcgtttagcacgcattgatagtcggctactccacgggcaagttgccacggtgtggaccaagacggtcagtcctaaccgtattttggtcgtctcagacgaagttgcccaggatgcacttcgcaagattctaattgtgcaagccgcgccccctggtgtgaaagctaatgtgattacagttgacaaaatgatcgagatttatcaagactcgctatttgatgaagtaaagccactaatcctaactgatacgccccagaacatggcgcgcttagtagcggggggacttgattttagcaaaacgggcattgatattggtagtctagctttttcagcgggcatggtgatggtcaccaatgctattgcaatcggtcaagccgaagcacgggcattatatgcgttacaagcagcgggattaaaggtgtttgcgcagaaagtcccgacggataaaagggttgatgtgatgccgctattagctaaaaatggctttatggcgccagataagtattaacaaagttatgatggacagtggtgtgtcggttatgggcaccactgttctttcattttggctaggtttctaaggatttaccaaaaatacagccgtaaactttgacggataggcttttattgataaaattaaactaatcgaaacggaaagtagcgggggtttaaaaatgccaacttatacaaaattaaccgccatgggacaatatgttccgggacgcgttgttgataatgacgaattagcagccattatggacactagcgacgaatggattcaggcgcatactgggattaaaacccgacactacgcgatgaatgatgaaaacacctcggatttagccgcccaggtcgcccagcagttactacaaaaaagtggtttagctgccagtgccattgatttgatcctagttacgacaattacgcccgatgccttaacacctgcgacggcttgtttagtgcaagctaatattggcgctgataatgcgtttgcgttcgacctgagtgcagcgtgtgctgggttcacgtttggcctagcaacggctgacaagtttattcgcagtgggcaataccaaaatgtgatggtgatcagtgcggaagttaattccaagatgatggactttcaagaccggacggcagccgtcttctttggggacggtgctggtggcgcgttattacaagctactgacaatccagatgaaaacagcttgatcgctgagaaattagaatcgcaaggaaacgctacggtcattcactctggacgagtacggccgattactgaagttgccgcaacgaactacccgcaaacggatgcgttttaccaagttggacgggatgtttttcaatttgccacgacggttgttccagaacagatgcgtgggttaattgcgagtgcgcaactgacacccagtgatttacaatacgtgatctgtcatcaagctaatttacggatcattgaaaaaattgcggctaacttggcgttaccaatgacgaagtttccacataatgttgatcattatggtaatacgtcctcagctggggtggcaatggccttagccaatgtttttgataccttaactgggccagtgttgttaacagcatttggtggcgggctagcgtatggctcagtcttgatcaagaagtaggagtgtgcagatggaattaaaagatttagatcgattagttgagaaatacgcgcgacagggttatcagcaaattcgcgttaaagccggcgacttggagattgaagtgacaaaaccagcgttagcttcagaaacggtaactcccgtagccgctacgcctgccagcacagttgcggagactgaagatgaagtcgttacactgccgagtccgatggtcggggtggtccacttggcaccagatttaaaggttggtcagtcactgacagctggtcaagaactaggccagattgagagtatgaaattattcaatccattagttagtccgaccgatgggacgttaacagcagtactagttgctgacgacgccactgttgagtacgaacaaccgttatttacaatgcgaaaggatcggtagctatgtttcgcaagctgttaatcgcgaatcgcggtgaaattgccgtacggattatcaaagcctgtcaacaattgaatattcagacggtcgccgtttgctcaactgctgatcggcatgcgggttacacacaattagcggatgaagtggtctgtatcggacctgcagctgccagtggatcgtatttaaatgccgaagcgattctaatggctgcaattaatacgcacgccgatgcgattcacccgggatatggttttttagctgaaaatgcggattttgccgccatgtgtgcggaatgtggcattgcctggattggcccgcagactgagcaaattaagttgatgggtgataaggcccgcgctaaggattttgcacggcaacaagccgttccggtactagcaggtcaatcattacagggcttagcatggccggatattaaacacgcggccgccaagatcggttttccactagttttgaaagccagttatggtggcggtggcaagggtattcgagtgcttaccgacgttcatgaactccatcaacaattgcgggctgcgcgtcaagaagctgctgcgtcctttttgaacgatgcgatgtatttagagcaatttctgacaactgcccgccacattgaagttcaagtcctcggcacggggacgaaattattcattcttggtgatcgtgactgtagcctccaattgcacaagcaaaaggttctcgaagaaagtccggcaagtattttgactgagacacaacgccggaccttatacgatctgtcccggcagttattagcgggtacacattatcaaagcttgggcacaattgaatacttatttgcggatggtcagttctatttcatggaaatgaatacgcgtttacaggttgaacacggggtgacagaattaaccaccggaattgatattgtggctgaacaaatcaaacaggcggctggcgtcacggttgattttccagagcatgttggcttgcagcccaagtgtacggcgatcgaagctcgattgaccgctaccttaccggttaagcagacgcggattgaaacgctgagctggccagccgatgtacgagtggatacggattatcatcagggcgatcggctagtaaccatgtatgatggtttaattgccaagttgatggtcaccggtgcgaaccgtcagcaagccgtgcgcaacttacaacgggccttagcgcaagtaacattgacaggacccacgacgaacttaacttttctacagcaaacggtggcccggccggcctacattcatgatcagtacacgattcacagtctagcacgttgggaggcgtcgaaatgagtcattatccagcttctgggacctggcaagcctgccctaagtgcggtcggcacgtccaccaacgccaatggggcacttatcagcaatgtccttattgtcactattggcaacgactgacgacggcgcaacgattagaacaactcgtcgacgaagggtcgtttcagccgttgacgatgactgagcggcctgtcaatcagctggggttcccggactatacgaacaaactgcggcgggcccaacgccagaccgggttaaacgaggctgttgtctgtggaacggccctgattgagcaacaaccctgtatcttagcagtgatggatagtcattttatgatggggacgttaaacacggcggtcacacgtcgcttattgcatgctagtgaacaagcgcgggcccaacggctaccactgatcattgtgaccgcctcaggtggtgctcggatgcaagaaggtgtttatgccttggtcggaatgaatttgattctggcagaattagcacggttagcagcaacgccgttacccttgatcacagtgctgacagatcccactatggggggcgtatcggcgagttttgcgtttaagggtgacctgattatcgcagaagcgggtgctaagattggctttgccggagcccgggtcatccaacaaactttgcctgtcaagctgccggcggattttcaaacggcggatcagctgtttaaaaatggcatggtggatgcagttgttgaacgacctcaattgcggtcaacgctaggacaagcattagcgaattatgggattgggaggtcagcccatggataaacgattacagcgattacgggcggctgatcggatcagtgcgccgactatcattcaagcgttattgccgacaatgacgcaacaacggggagaccgtttattaggtcaggatgcggctttaacggctggctttgggcgcactgccactggtcgccaattagctgttctgggcgttgaccggggtgttgatattgcgagccggcgtcgaaaaaacgggggagcattaactgttcccggctatcgcacggcgttaagagtcgtaacccatgcggctaaatttgggtggccggtcgttagcttaatcaatatgccaggtgctgatgcgagcccccaatcggaacgctatggtcagagtcaggccattgcggacttgattgcggcgactggtcagctgaccgtaccgaacgttgttgtatttctcggtgagggccatagcggtggggcgttagcctttgccaacgccaaccgcattatcatgctagatgatgcacttttcaacgttgcttctcccgaggcagtcaccgcgattttacatgggcaacagaccagcagtgacgccatcgatttattaccaatgacagctagcgctttgcagtcgcgcggcttagttgacctggttattgaccatcaggatcagacattagtcgctgcgatcaaccaggcgattgagacccaacttgctgcactagaagcattgccggcaccggatctaattgaacagcgcgaagcaaagtttcaacactttttacaatcttggccggtcaattaaaaataatcatcaaaaaatgggcttctcagaatttttattctgaagaaacccattttttaatagttgcttagtactgattagtcgtggtttgatcttgagtcgtggtctggtcctgcgtcgttgtatcttgtgtcgtactagtgccataagtagtggtatcactagacgttgtggtacttgatgaacttgaactggaacttgagctacccgttgtaattgaagctgtctcagagaagactgactctgttaaattactgtttgagagtcccagcgctttacggatgcgcttcgaattcttgtaacgttctgacgaagaggcaacttgataagagagcccatcgatcgtcgcgtcagtaccttgaacggtatatgatttggcatggtgagacgcattcttgtacttcgtatcgagtgcgaccatgtcattccaagttaagtcggtgcgcatgttcttagcgagttttttcgtaatcttttcaatattggcaattgacccaagtgagttagactgactaaccatggccataataacctgccgttgccgtttttgacgaccataatcaccctgaggatcgtcataacgcatccgtgagtaatcaagtgccgctgcaccattaagtttgatcttaacgcctttcttaacgttggcattaccgtatttgaaagtcagcttaggtgtcacggtcacgccgcccatcgcgttgatgatctgttttaaaccacccatgttcagtaagacgtagaagtcaattggaacatccagtaacttctctactgacttgacggcaccacttgcgcccccaatggtgtaggctgcgttaattttttgtgattgcccatcgatcatcacttgcgtatcccgtggaatactagtgagcgtcatactttcttttttaggattgattgtcgcaacaatcatggtatcagtccgggctgagaagtccttgccgcgacctagtgcaccagtatcagttcccaacagtagaatcgagaatggcttgcccttcttaataacggcatcaacattccgaagcttggtcgagccggtcgactggtaggtcgtattcatcgtatccttagcggcattccaggtcttgtagccccaccagccacccgtaacgatcaacaggacaacgacgattagtaaagtaattaaccaaggacgttttttgtgtggtttcaaatgtgggttacgctgttgctgttcacgatagcggcgttggcgtggtcccatttcattatcattgttattttctgacatattcgttcctcatcactttagatttttccctcaatagtcattttatgacgtttagcaaatcattggtccttaaagttagtaatttaaaaagattttaataatcaaaaaattactggcatcagtagtaacacaattatagaacactataagtaatattgtgaccggcgtcaaacgtttccatctataaattacggtacaagccatcataaaacagtggtatacttgaataattctcattgaattattattttacatagcttgatagcgatattcaatgatgagcaatttgttaagaggggaagactgagcgtgcaaattttacagacattcgtgcagagtattcaaggtgtcatgacgatcatcgtgatgattgcagttggttacttgttggcacgctggggctggtttaatgaaagtgcgactaagctgattgcccgattggtcactcaaattgcgctaccagcctatatgattgcaacgatcacaaagcagtttacagcgcataaattattatcaacgttgccaggattacgttttccagttcttaatatggctattttgtttggcatttcgttcggggtgatgcgagccttaaatattaaaaagagtcatcgcggcttatttgcctccatgtttttgaactccaatacggtgtttattgggctaccggttaatcaagccttgtttgggaatagcgcattgccatacgtgttagtttattacatggccaataccaccattttctggacgctgggcgtttatttgattcaacgtgacggtactggcactgctaagtttgacttgaagcagacactgaccaagatcttctcaccgccattactaggatttatgattggtgtcttgcttgttctaggaaacattcacgttccaaaattcttgatggatgatttctcatatatcggcggtctaacgattccgctgtccatgatctttattgggatttcaatggccaacgccgggttaagcagcatgcgcttcgaccgggatagcttgggaattttacttgggcgttttatccttgcgccggtactgatgacgctgatgcttattccaatgtcgattccattggagatgaagcaagtcttcattctgcagtccgcgatgcccgtcatgacgaacgcgccagttgtctccaaactgtacggggcggatgccgattatgccgcggtcatggtgacagaaacgacactattgagcctgatcgttattccgattttgatggtgatcgttcaagccaattttattcgttaattattatgtgacttaaaattaaaagtacccgaatgcgtgccactagtgacaggcgttgcgggtgcttttttgctggttattaatgatgaaaactcaatttagttcggtcaacaaggtttgaccaattagatactttctgctcagggccgtcccaacacgtctcgctggtagtttttgatgacaagctgatgagtgcgtgctggatgatggttgaggcggcaagatgccattgaatggttcaagcctgatgaaaattgttttcaaaagcaattaaaaattgaaaaaaataacgcctgattccgcgttaaacggcgttttcccgtggataaaagcgaggtagtatactgagctgatttgaaagtcacgtgaaaatggtgctatactgagaaccgttgcgtattaaattttgattaagaaggaagcgaacgtttcgtgaagaaagcatatctttacattgcaatttcgaccttaatgtttagttcgatggaaattgcgctaaagatggccggcagtgcctttaatccaatccaattgaatctaattcgattttttattggggcaattgtgttactgccatttgcattgcgggcattaaagcaaaccggacgaaagttagtgagtgctgactggcggctatttgctttaaccgggctagtgtgtgtcattgtcagtatgtcgctttaccaactcgcgattacggtcgatcaagcttcgactgtggccgtattgtttagttgtaatccggtatttgcgctattattctcctatttaattctgcgagaacggttgggtcgagctaacttgatctccgtcgtgatttctgtgattgggttgttgatcattgttaatccggcccatttgacgaatgggcttgggctgctattagccatcgggtctgccgtgacttttgggctgtacagtatcatctcgcgttatgggtctgttaaacggggcttgaatgggctgacgatgacttgttttactttctttgctggtgcgtttgaacttctagttttagcttggattactaagattccggctgtcgccaatgggttgacggccatcggtttgcggcaatttgctgccattccggttttggtgaatgttaatctcaactatttctggttactattttttatcggcgtttgtgttactggtgggggcttcgcgttttatttcttggcaatggaacaaaccgatgtttcaacggcttccctagtattcttcattaagccggggttggcgccaatcttagcagcgttgatcctccatgaacaaattttgtggacgacagtggtcggaattgttgtgattttgattggttccgtcgtgacctttgttggtaatcggttccgtgaacgggatacgatgggggcgattgagcagccaacagcggccgccactgatgatgaacatgtcatcaaagccgcgcacaccgtttcaaatcaagaaaattaattaatcgtggacggtcagggtgatattaatcagcttgaccgtttttttgtggcaagcgcgttatcgcacgtaacagctggttgtgactttgaaaaatgaaccaaatcgattatcataggaagtattgaagatagtaggtgggaaagagaatgacagaactagtattggttcgccatggtgagagtacggccaatcgggataatacgtataccggttggagtgacgtcccgctaacagcagtgggtattgcacaggctcatcaagctggcaagcgattacgagctacgggactgcagtttggcgctgtgcatacctcagtcctaaaacgggctatcgttaccgcgaatattatgttaagtgaaattgatcagttatggctgcctgagtataagacgtggcggttaaatgaacgacattacggtgccttacgtggtcaaaataaggatgtgactcgtcaagagtatggtaaggcgcaagttcaacagtggcggcggagcttttatacggtgccgccgttgttgacaccagctgaactagaccatgatcgacgttacaccaagtacggtgccgccgtcgaaccgcggggagaaagcttgaagatggcttacgaccgcatcatgccttattggatcgatgagattgcaccgcggttgttagacggccaaaaccaactcgtggtggcgcatggtagtacgttgcgtgcgatgatcaaatatttagagcatattagtgatactgggattgatggtgtcgaagttgctaacggagtgccaatttgttatcaccttgatcagcaactgcacgttatcggtaaagaagagtattaaatttagtaatagttctcctaagcggtacttttattgaaagtaagtgctaatctggactgtttttttagaccattattagattaatcgagcctgagttaagagcttcagcagacgctgaagctcttttttagttaaagtgttaaataaatgcccagtataagtaattataatcattgataataattgccgacgagtactcaaaaaatgatacaggcttaaaaaattgatataacagtgctttcacaactatttgagtcaatataaatatttttaatgtaataaaatccttcagttttcataaataaatataatatatcacttgtaatagaatggtaaacgctgtaacatatcagatggacaaactcgcgatttggcgcggttaacagccaaaaatctgatcagaaatcttgggttaacgatgatgaagcataaaaatttattattactaataataatgagcctgggtttttgcggcatgctgctgatgtttgcaccgcagcttagtacgctgatcaactcgaatacctcgcgagttgaagcggataagactagtgatcacgatacaactcatgatcaggtctactacaatgaccagatggataattatcaatatgattatataaataacgggactaaggttttgaattataaggctcgcttcaagaatcgggtcatcacgtatcggattacaagtgatagcaaggtgtatcgagcgatttggctacgagccgtggaacgttggaataacactaacgcggtgaggttagttgaggctaaggaccaagcgaaagcccagattacgttgggcgagagtgaagacgagacggagacgaccggatcggaaatcggccggacttggcggacgtactatcaaagtggttcgcaaggaacaacttggatggattcggcgaagtgtgtgatttacacgaatcgctttccagccagcaatcattcggtagaatataagctgtccgttgcgacccatgaattgggacatgcactgggactagagcacgagaacaacaagagtgcggtgatgtattaccagtcgcatcgagcagcacatatcacgactcgtgagattagtacgcttaagcagatgtataaataattataatagtgattgctataagtaaacgtaataataaaaaaatcgactaaactcacgcgagtttggtcgatttttttattgtttgttgttagtagttccttgagcggtagttaagtctaatgcagtccaaaaagcaccatcacgctaaagcagtgatggtacttaatttagatggcccattaaacttaattaggctaatgcacccattggatcccaaggtgctaaaacagttggttcttcggcttgggctgcctttaagtcatcggacaagaattccttgttaacaacaacttggtagcagtattcgtccatccaagcatcgctcatgacgaagaagcccttagtcccaactttgtcgccccagctattttcaaccttccacttagttggttggccgtcaacgaggtcgacaccggtgataaccatggcgtgggtcatcagactttcgccgtaatcaagacgttcagccttcgacattgaaaggtcaacgtcgaataattcatctttactgtagacatcggtagccatgacccctttttggcggtcggaggattgaccaacatcacaaccaaaccagacactttggccagcttgtaattgcttgatggccaattgcttgaagtcggccatagacacgttcaaatgtttgacttcacggccacctaagacgttacctaacatttcaatcgtgtaggtatggttataaggcttgtcgtcggttggggcgttgatgattgaaacgtaatcgtccaaattccagccaacgtacttttcgaagaagctttgtggcgtcaagttttggtcgatgtggtattgtttcttatcatcacgatattcccagtcaaaatgtgaaacgggttcgccaaaggcataggctaacatgcgatagacttcatttaacattttttccttgcgttcttgaatcgcgtcgtcactagttccggcagccactagttcacgtaattcaacggcatctttacgtaattttaagttaagtgtgctgttgatttcagccgattttgaactgttgtaagtttcaggcatgacactcttaggcacgataccgtacttctgaataatggcaacgagcatatcccattggccaccatcttgttgtggcgtggtcatcaaccaggcaactttacggctgctagttggttggtcagcggttgccaacacgttttcatagaaatagttcgctttttcgaacttatcccagaaaaaggtgtagttttgtgatagttcgaaatgtttcaagttgaatttttcagctaatgaatgccgcatcgtgtttaaagcggcgaacatccagcaacggccactttgcttttggttcgcaacgtcacctgtatccaaatcaatggaaaatactggtgtggtttggctcatggcctgaatatcttgactgcttgctaagataccgttcttagtgacactacgttcgatgacttttgcttcgggacgttggtccaagtcggcttgaaagttagcaatttggttcatactgattgctttactcaaaagatcactctcctttaatctaattctaattgtatcggtttatgacgggtggggcaagcggggagtcgcacaaaactatggtcgcgcttcgataacctcgggaccattggcatgaccgacaatgacagtgttgaccatgtctaagaacaggccgtgttcaaccacaccaaccatgtgaattaaatcttcggctaaagcgtggggatccgtgattgggtcgatgtgtaaatcaatgataatattattagaatcggtccggacgagttcatcgttgactttacggaatactgggttatagccccgggcagccattttttcaaagacatgttggctgccgtaaggaatcacttcaacgggtaagccaaaggcacctaattgatggaccattttgctttcatcaacaatccacatgactttatcagaattgatggcaacgattttttcgaagagtaaggcggcgccaccacccttaacgccttggaaatcatcggcgatttcgtcggcaccgtcgatcgttaagtcgagatggtcgacttcgtcaacggatttcatcgggataccgagcgccttagcttgggcagcggttcggtcggaggttgagacgccgacaatgtttaaatgttcatttttgacccgttcacccagagcatcaaccatgaatttaacggttgagccggttccgaggccgacctgcatgccgtcttgaatgtattcaacggctttttgaccaacaagttgttttaactgatcctgattcataatatgaattactcctttgattgagaactagtgactaatacgtcggcagcttcagggtgccgatcaaagtaagccttagcgtaggtacacagtggctgaatacgtttgtgttcaactcgagcggcgtcaataacggctttggttaattggccggcaatgccctgatgaccaaaatcgtcacgaacaaaggtatgttcaatgacccaggtctgatcattattgatggcggggaaggtaatttcaccagccaacttgccgtgatcgtcattaaaataaaagcggtgtgcttcacgcgtgaattccattgatttcaccaccttgtaaagggttttatatctaccgtaattaaaccggtaattgcccgttttgtcaacgaaacttctataataaaagtatggtaaaatgtgaacactaaattaatgttgagaaagtaggaatttgaaatggcacggggatttgaaattgtaagtcaatacgcgcaggcggggttacatgtaccttaccgcactaccaagcaagcagctggctatgacttcgaagcggcggaagattttacgttaccgtcaatttggaaaatgaactttatcaaagtactttggcaaatacatcatggtgaaacgagttctgcagccgatttggatgcggcggctaaagtccttaaaccatggcttgttccaacgggtattaaggcatttatgaatgatggtgaatacttactattagccaatcgttctagcaaccccttgaagcgtaacttgattctaccgaatgggattggcgtcattgacgctgactactataacaatcccaagaacgaaggtgcgattttcgtccaattaatcaacatggggattcgcgacgttcacattaaaaagggtgaacgcattgcccaagggatttttaccccttatctgactgttacggatgaaacgaatgtgacaacgacacgttctgggggcttcggttcgaccaataaataggaaataataaaaaatcggtaaagccaaggtgatttaaaggctttaatgattaataatggtaaaataaacttatacccatagcatgaaaatgacgatccagttaattgagtttgattgattatttaagtctgcatcgtactggctggttgtttagtaagaatcatggttaaaaggtgccaattagatagatttctgttcgtctgcaatgactatcctattccgacctccgggactgggtgacaattgctggaacgtaagccgacgtcgatttgagctaacgcataacccgcgtcatctcaaatacgagtcttattctaagccggaagaaagacacttccgcctaagaataatttggctactgagcattgtcacccagcccctccagccgggaagccgctcgaatggcaaataaacggccgcttaacttggtacaattggttgctgactactttgatacgaaaactttgagcgaaacatcagaatgtaatctctactttgtcgaaacgttcaatgtattatgactggtaactcagaaatagtaagtcatcacaatatcattttcggcctgacagttgattgagaaaattaccgtttatgaagaacaacgaccaattcatcaaaagttgagtacatcttcatcagctattcgaataccatcccgactggaaggtgtttctgacaatgcccagtactgcaagagtgtgaagtctcagtctgacccgaacacgtttcaccaatatggcataaaagcgtgaaaggccagtatttaagacgtgggcttcggctcaaatctgtgcccaccgcgttccggcaattggcagaaatgcctggaggtcggtgtaggacgaattaactaagcaagtttacgctaacccggactgtttccagcgggcctaagctggctgcttttaaatttaaaaaacggcacgttttaatcatgactcatgacagtgtgacgcggatgaagtaattattttagaaattccaatacccaacattaaattgatatgttggcggagaaatggagacgtgtgtacgtggcaaaagcaaaaactcagtttgtttgttctaactgtggttattcaacaccgcgatatttaggacggtgtccgaactgtggtgaatggaatacactaactgaagaacattttgatacaaaaccggaccgcaagtcgcgggtgagctttgcgggtaagtcggctaagccacaacgactcaaagaagtgtcgctgactaagacaccgcgtgtcaagactaagctgaaagagttcaaccgggtcttaggtggcggtgttgtgccaggttcactagttttgatcggtggtgatccaggtattggtaagtcaacgttactactgcaagtttcggggcaattggccgagacgggtggttctgtactatacgtgactggtgaagaaagtgcctcccaagtgaagatgcgggcggaccggctggctgttagcagtgaagacttttatctttatcctgagactgatatgtcgaatattcgttcaacgattgaatcgacgcatccagaatttgtggtcattgattcggtacaaacgatgcaagaacctgatatggactctgcgattggttcagtatcacaaatccgtgaaattacggctgaactactgcaaattgcgaagactaacggcattaccatttttattgtgggccatgtgactaagggtggtgccattgcggggcctaagatcttagaacatatggttgataccgttttgtactttgaaggtgatttacatcatacgtaccgcattttacgggcagtcaagaatcgattcgggtcaacgaatgaactgggaatatttgagatgcggacgggcggtttgtatgaagtggccaatccgtcagagatcttcttggaagaacgtctgaaggatgctacgggttccgccatcgttgtttcaatggaaggaacacgaccaatcttagtagaagttcaagcgctggtaacgccaacggtctttggtaatgcgaagcggaccgcaagtggcttggatcataatcgagtctccttgattatggcagtgttggaaaaacgggcgagtctaatgcttcagaaccaggacgcgtatttgaaagcggccggtggcgttaagttagatgaaccggcgattgacttagctattgcggtcagtgtggcttctagttatcgtgaccagcagactcgtccgagtgactgttttgttggtgaagtcggtttgactggtgagattcggcgggtcaaccggattgaatcacgagttggtgaggcggctaagctaggttttaaacgtatctttattcctaagaataatctgcaaggttgggatatcccaactggaatcgaagtaattggagttgccacgctaaaagaagcgctccaattagcattacaacaaccaaattattaaaaaggggctgatgccatgaagaagttaacggtgcgactagtatttattgtcgtcgggggtacgttaggactaacttacctgccgttcttgtggacgacaattttgtcgcaaccaaatgtgttattgaataacgtttttaccaactttttgttgggggcgctgattctatgggttttgtcattgttcttagccaatgccgctgtacgactggtggatcgagtcgaaaagaacttatccaagcaaaacccaatgacacttttatttggcagtatcggatttattattgggttattgatcgcggttctgatttcgcaattatttaatcgtagtccattattcctattgaacacggtcgtcccaattattttgatgttgttttttggttacattggtgcgcgagtcgggactacccggatcgacgagtggcggaaagttttcaacttccgccgtcgtgaaaaggaaacaagtccggagattactgatgctcagccagatcagaactatcatcattataagattctagataccaacatcttgattgacggccggatttacgacattgtcaagactggtttcttagaagggacactgttagtaccgaacttcgtcttgtatgaattacagtacattgcggattcagctgatagtattaaacgtgtgcggggtcgtcgcgggctagatattttaaataagctacaaaatgaaaatattatcccggttgaaatgtacgagggcgattttgaggatattccagaagttgatagtaaactcattcaattggctaaaaaagtcaacggtgtgatcgtgacgaatgactacaacttgaataaggtgattgagttccaaaacgtacaagttctcaatattaatcagttggctaagtcgttgaaaccacgggttattcctggtgaagagatgaatgtcatggtcgtcaaaaatggtagcgaacgccaacaaggggtcggttacttggacgatgggacgatggttgtcgtcgaagatgggaagttttacatcaatgaaaaggtggatgtcgttgtaacgagcgccttacaaacggatgctggtcgaatgatttttgcccgtttagcgcacgctaatcgcggaattccggatcatgcggatggaaataataagcacaacaataatcatagtaataatcgaaataataatcgcgataatcggcactaggttaagcgattcaacggtagcaactcatttgatgggggctaccgtttttttgttcaatgatgactaatccaggacgtcgtaagggaggcggccgaatcgcaacaaaataggagggttaatgctcattatcaataaattgggatgttgttagtgtacgattagggcctgtttcgatatttttacaatgggttcagtctgaaaccttaatttttagcggtaaacatggtaaactggaaaagcaagtgaaagtcggaatattctggtcgatagaaaggttccggcgtaacatttaagatgaaaaaatacgaaagaggcgttaatcacattggcaaagagcaagattcgtgtgcgttacgcaccaagtccaactggccatttacacattggtaatgctcggactgcattgtttaactatttatttgcccggcataataagggaaagttcattcttcggattgaagacaccgatttaaagcggaatgttaaagacggtgaaaagagtcagatggacaatttgacgtggttagggattgattgggacgaaggtccggataagggtggcgactttggcccttaccgtcaatcagaacggaaatcaatctatgacccgttgattcaacaattaattgatgaaggtaaagcttacgaatcttacatgacggaagacgaattgtcggcacaacgtgaagctcaaaaagcgcgtaaggaaatgccacactacgtctacgaatttgctggcatgacggaagacgaaaaacaggcgaagatcgcggctgctaaggcggctggtatccaacccgttattcgcttccacgtcccagaaaatacgacctatgcttgggatgacatggttaaaggtaaagtttcgtttgaatccaagacggttggtggcgactttgtcatcaagaagcgtgacgggatgccaacgtacaactttgcggtggttgttgatgaccatatgatggaaattagccacgtcttccgtggtgatgaccacgttgccaacacgcctaagcaattgatgatttatgaagcctttggttggcaaccaccgaagtttggccacatgagcttaattatcaataccgaaaccggtaagaagttaagcaagcgtgacgaaaccgtattgcaatttatcgaacaataccgtgaattgggttacttaccagaagcaatgcttaacttcatcatcctactaggatggtcaccagttggcgaaagtgaattgttcagtaagcgcgaattcatcaaaatgtatgatgaaaagcggttgagcaagtcaccagcagcttttgatggcaagaagttggaatgggtgaacaaccagtacattaagaaggctgacgaaaatgaagtctttgcaatgtcaattcgccaattgatcaaggctggccggttaccacaacgcccagatatgagccagattgaatggacacggacgttggtttcattatttaagaaccagatgagctatactggtcaaatcgttgatttagcagatctcttcttcaatggtccggctgatatcaatgatgaagctaaggccgaacttgataatgacacggcactccctgtcttgaaggaattccggcaacgaatcgaagatattgacgtcttcgaagcaaccgcaattcaaaagacgatcaagagcattcaaaaggatacgaagatcaagggccgggcattatacatgccgatccggatcgccgtttctcacgaaatgcacgggccagaattaccagaaacgattgaattattagggcgtgaaacgaccaaaaagcatctcgatgctatgattgcggaactcgccaagtaatgaatggattattaaaatattagttggttgtcgtaagtggcggtcgtcgtcagcaagacaacgcaattaatacatcgtgcggtcagcaagctagtccccgggtgagcgttatctcagtatcgcgaaagttacccagtggcgcgtgactgcatatgaaagtatcttttgtatggtggagtttcggttccaccgtgcgagggatgctttttatttgtgtttcaaacatggtaaactatcatcaaaagtaatgattcaattgaaaggagttgtcgccaatatgttaagtgtttttaatacgttaacgcgtcaaaaagaaccgttcaagcccatcacccccggagttgtgaaaatgtatgtctgtgggccgaccgtttataactatattcatatcggtaatgcgcgttctgcaattgcctttgatactatccgacggtattttgaatattgcggttaccacgttgactatgtctccaacttcacggatgtggatgataagctgatcaaacgtgccgctgaagatcacaccacggtaccagcagttgctgaccggtttattaaagcttttatggaagatacgactgcggtcaatattgaaccagcgacggttcacccgcgggcctctgagaatatcccagaaatcattgcatttgtacaagcattgattgaaaagggctatgcttacgaatcagctggcgacgtatattaccgcgcacggaagtttaaaaagtatggtcagttatctgaccagcgaatcgatgatttagaagtgggtgccagtcagcatactgccgatgaagaaaccgatcgtaaagaagatccaattgactttgcactctggaaagcagccaagcccggtgaaatttcatgggaatcgccatggggtgcgggtcggcccggctggcatattgaatgctcggtcatgtctactaagtacttgggcgatacgtttgatattcatggtggtggtcaggaccttgaattcccacatcatgaaaatgaaattgcccagagtgaagcgaagaccggcaagacgtttgccaattattggttacacaacggttttgtgacggttggcgatgacaacgaaaagatgagcaagtcattaggtaattttgtgacggtccacgatattattaaaacggttgatccgcaagtgctacggttcttcatggcgacgacccagtaccggcgaccgattcaatatacgcaggccaacttagacgaggcagctaataacttggataagttacgtaatgcttatcgtaatctcacgttccggttgcaagatgcgacgaacgggacggatactgcggtggcagaacagttacagacactcatcactaactttggaaccgcaatggatgacgatttcaatgttcaaaacggggtggctgctgtgtatgaattagctaagttagccaatgtctatgcagccaaggcaacggttcaaaaagagacgttgattgccttacagaaggcattagtgcagttgactggcgtcttcggcgtcacttttgaaatggttaatgcgacgctggctgatgacgcgattcaagcactgatcgatgaacgagaagctgctcgtaaagctaaggattttgctaaggccgaccagattcgtgatgatttgaaagttcaggggattattttagaagatacgcctcagggtgtgcggtttagaaaggaataatatgcaagttgattatcaacaattaaacgggattgcactcgcgtacctcggtgacgcggtgtatgaaccgtttattcgccaacatttgattgaaagtggttttactaaagccactaagttgcaccaccacgcaacccactatgtttcagccaaagcgcaagcggcactgatcgaacggatgcaggccgaagaagttttaacgccaactgaagtggacgtttttaagcgtggacggaatgccaagagtcatacgtcggccaaacataccgatgtcgtcacttaccggatctcaaccggttttgaagccgtttttgggtatttacaattgactcagcaggcggaccgaattgcagaactggcacagtggtgtattaaacaagttgatgaagggagggtttccagtgtcaaataacgaacaagaccaaacagcagctgactttgtaatcgggcggcaccccgccatggcagcaatcaagagtgatcaacagatcaacaaagtctttattcaaagcggtctacaggccgatgtactgaatgacattgccaagattgcgaagaaacgtaatttgatcgtacagtacgtgccgaaacaaaagttagaccgtttaaccgacaacgccaaccatcagggggtagctgtgggggtggctgcttttgaatatgccaccattgatgatttatttgctgttgctaaggctaagaatgaagcgccatttttcttgatcttggataatatcgaagatccccataacttaggttcgattatgcggacggccgatgcagctggcgcccatggcatcattattccgaaacggcgcgccgtggggttaaccagtacggttgccaagacgtcaacgggggctatcgaacacgtgaaagttgcgcgggtgacgaacttggttcaaacggttaaacaattgcaagaagccggtctgtggatctttgggactgatatgaacgggacggactaccgacagtgggatgcttccggtgccgttggtttgattattggtaatgaaggtaagggaatttcaccattacttaagaagagtgtggacgaaatgttgaccattccaatgattggtcatgttcaaagtttgaatgccagtgtggcggccagccttctgatttatcaaggctacacgtcccggcatccactgggaaaataagatgaaacaacaattattgattgtcgatgcttacaatatgattggcaactggccagaactcaatcatttaaaacaaacggaccggttgccgcaagctcgtgacgagttaattagcatgttgactgagtataaaaaaattacgggccttaatattagcctggtttttgatgcgatgtacgttccgggtaattctaagagttatcgccaagctgatcttgagattatttggacgagtaaagaccagaccgctgacagttatatcgaaaagtacgcgggtgaaaagcaatcgcgagtacttcaagtgacggttgcgactagtgatcaggcagaacaatgggtaatcttttcggaaggtgcgctacgagtaccagctttggaattacggcaccgcgtcaagactgcactgaaagatgtgcgtcataccgccgtgcgtacccaggatttaggtgccgttcgtaaatcaccctggaatgaggatcaattatcggccttggatcaataccgccaacaactagaacgcaatcacgttaaacatcatcacaagtaattaggtggttgccgcgagcgtgggttgtttctaaatcgtcataattaatatttaaattttgcaaaagataaccagtggcaatttaaggctcgaaagcagttctagtattaaaatatctagtaatcaaatgccccagttcagctgctgttcactagatgttaggatggcttgtcataacagttttggtgttatcggagtttgcgctggcgattgcattaatcggttggttagacagcgcagtggcttcttgcaactccagcggacgcgcgtactcgtcgccaacgggcttaagtaggtcgcacttgtctttggcgttagcaatattttgatattactaataattagtgcgatatggcactattaggttgatgaataggacgatcatagtagttttgatagccgcgtataagaggatttctgtgagtgctgaggtggctgaattgaaacgttcgttcgcttgtgacggcacaattaacccggtatattagcattacagatgctcaggggtgcagtttctgaaactagtcagaagcgaggaatgtcacgtgaatgaacagcaattgatccacttagcagcagatggtgatgatgcaagcattaatgcattagcccagcagtatgtgccagttgtttggcggttgcggcggcaatactatgtccggaactttgacgaggatgattggcttcaagaaggtcgaattgcagtttatcgagcggctaaaaagtatcaacggctacggcaatgtagctttggcacttattaccgggtgctattgagtaatcagattattgatcatattcggcggacacaggctcgcaagcgtcgtccggaaggggatatcttatcactggatgttaatgatgaggatatcttatgcaatattcagacgctaagggcctcgacccttgatgtggttcatgttcgtgagcaggtgcggatttttccagcaatctgttcggcatttgaaggattggtttttatggatctattggcagggcaatcgccagaacggattgcattgagtcggcaagtggaagttgatcaagtggtcaacgccacggatcgatgccgcaagaagatgcgtgactttttacaagacgctgcctgaaattgacattcgaaaagttccatgctaatgttatacctgatttattatggaggttttgtcgatggcacagaaaaaagttgcactggcatgtaccgtttgtggttcgcggaactacacgattgatgctaacccgaatcgaactgaccgcttagaagttaagaaattttgtaaatattgtggtaaacacacacttcatcgtgaaacgcggtagggggattagacatgcgcttatttaaattttttggtcaagttggacatgaaatgaaaaaagtgacctggccaacttggcgggaaaatcgtcgtgattcgtggacagttgtctcaacatcactgttcttcgtggcgtttttcgctttatttgattggattatccaattattattacaaatgttaacaagctggcattaatggctttttgaacaaatttttgttataataatggcattgaaagaaaacttcgtgcaaacgaggtttttttattttgccaaaagacattttaaaggagaataataatggtcgagtctgttgagaaaagatggtatgtcttacatacctacgctggttatgaaaataaggttagttctaacttggaatcccgtattcaatctatgggaatggaagacaatattttccgggtcgttgttcccgaagaagaagctcatgaagtcaagaatgggaaagacaaagttgaaatgaagaagatcttccccgggtacgttttggttgaaatggtcatgacggaccaagcttggtatattgttcggaatacgccaggtgttactgggttcttaggatcacatgggcaaggtagtaaaccaacgccattgttgcctgaagaagcggaacaaatcttgcatcaactaggcatgagtgctcggcataccgaattggacgttgaagttggcgaacaagttaccatcatcgatggtgctttctctggcctttctggtgaaattactgaaattgacaacgaaaagatgaagctcaaggttaatatcaatatgttcggtcgggaaacaagtactgaattggacttcgatcaagttgaccagattcggtaattaatttaagtaagctggtggaccatcttggcagaagtaattttagtcatcatcggcgccttagtgctcggtattttggggcgtatcacctttaaattttggcaatacgggcgaccgcagcatttgcggcagtcggtgtcggctaattcagcagatgatagcgccgtgacgctatttattccagggtatgcgggcaaccggttctcttttggtggcatgctccaacgttttacggccgggggcatcgccaataagtcattagtcgtaatgattgatcgacataatcatccccatgtgactggtgagctagacgcttaccgcccaatggtacagttgatttttgccacgccacgcgttgctgtacggcaacaggcggcgggcgtcttggcagttgtgcagtatttgattgcgcatgagcacgttcagacgatcaatttagtcgctcattcgatgggtggtgtggtgctctttcaatacttgacgacagctgccaaactggtcaatttaccggaagtccgcaaggttgtcacaattggtgcgccgtttaatgatagtgaggtcgggcagaatacgtatccgattgaaaaccacccgttgacggcgaccggaccaactaagaccacgcccgtttataattattttttgcgaacgctccaacgattgccaaacacgatttcgtatttgaatattgcgggtaacattggcgatgcggcgcaaagtgatggtgctgtcgctctgaatagtgcgttgtcattgcgctttttactgcgaccgacgcgtgaccagtatcaagaatttgtggtacatggtaagaatgcccgccattcacgattacatgaaaactatgaagttgatcgccaaatcgtccagtttttatatccagaagccacaaaaaaggttgctggtgaaaaatagatatgctacaatgatatttgtgcgtcacgtatgcacgtttacgtgggaggagcaaaaactcagctccatttaccacatcacggactaaggaggaatgtctcgtggctaaaaaagtagctaacgttgttaaattacaaattcctgcgggcaaagcaacacctgctccgccagttggcccagctttaggtcaagcaggtatcaatatcatgggtttcacaaaggatttcaatgctcgtactgctgatcaagcaggtatgatcatccctgttgtgattacggtgtacgaagatcgttcattcgacttcatcactaagaccccacctgctgccgttctattgaagaaagctgccggtgttgaaagtggttccggtgaacctaacacgaagaaggttgcaactgtaaccaaagatcaagttaagcaaatcgccgaaactaaaatgcaagatctaaacgcagctgacgttgaagcagctatgcgcatgatcgaaggtactgctcggagtatgggattcaccgtcgaaggctaattcagtactgttgagtatgtcggacacttcatcaaaatgaatgtgtcaagtgggaggaaatctccgtttgaaccacatttgcaaggaggaaaacacttagatggcaaagaaaagtaaacaataccaagacgccgctaagctcgttgatcgtgacaaagcttacgatgtaactgaagcggtagacttggttaaaaaaatggatttcgcaaagtttgatgcaactgttgaagttgccttcaaattaaacgttgatacaaagcaagccgaccaacaacttcgtggcgcggttgtccttcctaatggtaccggtaaagatcaaaccgttatcgtttttgctaagggtgacaaggctaaagaagctgaagaagccggtgctgactttgttggtgaaactgatttagttcagaagatccaagacggttggttagactttgatgtcgcaatcgctacccctgacatgatggcccaagttggtcgtttaggtcgggttcttggacctaaaggcttaatgcctaaccctaagactggtacggttacgatggacgttgctaaagccgttaacgattcaaaagctggtaaggtgacttaccggactgaccgtgacggtaacgttcacgttcctgttggcaaggtatcattcgatactgacaagttagttggtaacttcaagaccattgaagacaccatcgtgaaagctcgtccagcctcagtacgtgggactttcatccaaaacttagttgttacttcaacctttaccccagcggtacgtgttgatttagcatcattttaaggattaaattctgaaaacaattgaccccgtgggtgatctgtgatagattactagaggttaagtaatatctctacctaagactcaggcggcttaacggccttaatctacctgccgaggacattgttttttctctatgtcttggtggacatagggatttttttataaatccctgaaccaaaattctgggaggtgaatctgttgagtaaagaaacaattgctgttaaagcacaagaagtcgaagaagttgcagaacaattgaagagctcagtatcagccattgttgttgattaccgtggtttgactgttgaacaagtaactgatttacgtaagcaattacgtgaagccggtgttaagatgcgcgttatcaagaacaagatcatggtgcgtgccgctgataaggccggatttgaagacttaaaacctgtatttgctggtcctactgccgttgccttctctgaagaagacccagttgctcctgcaaagatcttggctaacttcgcgaagaccgctgatgcccttcaattaaagggtggcgtgatcgaaggtaaagttgctgatcttgaaactgttcaagaatacgctacgatgccatcacgtgaagaattattggctacgatcgccaacttgttacaagcacctgttcgtaacgttgcatacgctgttaaggcggttgctgaaaaaggcgacgaagacgcagcttaatttgctgtcagtgtgttaaaaaaactaaaatataagttcatataaaatggaggaacaaaaaaatggcttttgataaagatgctattatcgactcattaaaagaagcttcaatctcagatttaaacgacttagttaaggctatcgaagaagaattcgatgtctcagcttcagcccctgttgctgttgccggtgctgctggtggcgacgctgccgctgctaaggattcatacgatgttgaattaactgaatccggtgaccaaaaggttaaggctattaaggccgttcgtgatatcactggtcttggcttgaaagatgctaagggtcttgttgataacgtaccttcaatcatcaaagaaggcgtttcagaagacgaagccaacgatatgaaagctaagcttgaagaagttggtggtgtcgttacccttaagtaattatttacttaacggaacgtcatcagaccacaccctactatggggtgtggttttttttatctctgaatgtggctttggtgtgaatcatcacgtgcatgaccacgcatataacgattactgagaatttatacttaggctaagtgttagtgcaatttgatatcaaccaccgtatgattacggtgacttggcgttagaggcgtaaccgtattggattaagcaagtcaaaacaagcccaacagaacgtcgcatagtacgtctgttgggcttgttttaaaatttcacttgggttgaacttctggtcaacagggcactatcacttttgtggctgctgcgtgataggctgaatacgatgatcaatgatcgttagtgactgacctgactagtgccatcagtatagttcaaggtcataccgggctggatattgaaaatatagacattaaaactaacagtattgctaccaactgactgaccacgcatttgaacaccgcgggctaacaattcgttacctttgaaaatgggggtcacttggtagcggacgtagtttttcggactttctttcaaataggccgcaacttggttttcataggtcgtcatttcagggtcattcaaagaacgggttccggtcatgaggttcttgatattgttgttctgccccgttaattgatagccaatcagatgactgcggttgtaaagccaaccgctactgatgcgtttgttatgccaaccagttggtcgaacattcaaggcctcacgttcagctttgggcatcagtgactgatttaagagggcattagcagccgtcacccggttaagtgagtctaaattgccatattgttgccaggcaccctgactcgtactgagctccttagcggtaaatgcgggctgattctgattaatcgtgatcgtttgttgaccgttgtaagttttactagccaacgcattgttacttgggttatggtcagaattgaccttggttggtgctgttgtcgaagttgcgccagcttgcttgttcgtagccttgagcttgtcaatatgttgttgactactcgaaagttttttcgcagcctgctttaagctgctagcagaagcacgattggcagcttgaagtgccgtcagttgcttgtcattattagccgttactaagtgggtcttagtaacggtctttgtcttcacagttggctgagtggattcatcagatgtgccgagaatactaaagctgacgagcaatgcgataatggccggccaactatgccgccaccattgacgcccacggtagcgccgatgcaagcgccagaaccagtacagggttgcaaataataagatggtgccgatcaatgccatgaagtgatcctcctatcgaaatgacttacggaaaccagcggcccgcgccgcgtcttccgtactaaagtaaacggcatttttaccggccatccggtagttttgacccgtttcaacgtgataaattttggaattacggttacccacgatgcgtccagtttgggcggtatcggtatcgccagaaaaattattctgccgactcgtggttgcggtactagtttgagtttgttgactttgagcagctgcttgactgctggccttgaccgcttgcttagattggctagcggctgcgacggccgaagcggactgggcttctgactgggagcgtgattgtgcggccgcttcactagcagctgatttggcggcagcctgtgacgctgattttgatgatgccattgcgtcgtcatgttttgcttttagttgttcggattgacgcttagcctgactagttgcaattgcgagttgggtcgtgtttgaactaagagctttggctgaggccgcgttagcccgactagcggcccttgcttttgcccaggcggctttattagcagcagtccgtttctcaacccgaaccgtcttggttttgacactggtatggttggcggcttgttgattaccagtggtacagccggttaagatgagtagactcgttagtgcaacgacgagtttttttgcgtggtgcataagaaattcctccttatttatgtatcactttaattatacataaacggtaaaggttggtaaagcaagtttggtaactaaaaatcaattaatattggtttatgctggtattaatttcgacaattaatcataattagtgctaactactaacacccattcggaacaatttagtagtagatatttaaaatgttcatagcttaatacggcgacaaatcagacctgtgggggttattaacgacctataacggttgtataaacaggctaagattgcgataatagaacaaacacaccaatgggggaatttttttgaaggcaacgttacagaaaatcgggacggcactcaataaacgcatgggaatcatcaaagcattatttgtattctctgtcctgttatttgtgattacggaagtcggcaaaattgcgaaggaagtcagtggcgcgcagttggcgaatgcgcttgcttcgcaaagctggtggcatctgttaagcatggtcgtgattggtattatcgcagtgacaccaatgctgacgtatgacgtcatgattacaaagtttttacccaaccactattcacttggctatatcttaaaagctggatggatcaccaatacatttacgaatatcggtggttttgggggcgtgctgggcgcctcactgcgtgctaacttttataatcgcgaagccactaagaaacaaatcgtgtttgccatttccaagatcgctttgtttttagtttcgggattgtcattatattgtatgatttcactcgtgctagtctatggctttggcattgggaacatgtatggcagttactggatctggctcgtcggtggtgcactgtattttccagccatctttatttttacacgagtcaacgattcggaattcttcgatggccttacgctcggcaacgtcgttcggttattgagtgggtcgtttggtgaatggactggctgtgtgctgttcttcttattaattggaaactttatgggattacccattgattttgcagcggtcgtgccgttattcgtgattgcttcggttgtcggtgaagtgtcaatggtacccggtggtattgggtcattcgacgttttcatgatttttggcctcggtgcggtcggagtttctcgaccagacgcagtcgcatggctcttattttaccggttattctactatattatcccgtttgccatcgggttggtcttattcatccatgacaccggccatcgcttaaacgtgcgcttagcgggtattcctaagcaggcattacaacgtgttgctcagatggtactgacggtttttctctatttttctggttttctgatgttgttgatgtcaacggtccctaactttgcatataacaataaactcttcttacagttttatccgtacacctttttctttattaatcaggccagcagtattattatggccttcttactgattggggtggcgttgggaactgctggccgggtcaaaaaagctttttggccaacggtgattgtcctgctgattgcaattttgaatacgattcgctggctcgtcgtttatgatgcaatttcgatgaaatttgtgattttcttgattgtgattctagcgctagtggctttgtcgcggcatgcttattatcgtgatcggttggctttttcgtgggggcaaacgttgtgggttagctgcgtgtatgtggtgacctttatcttgtatacgattgtgggagtctataacgcgccccaaattcatcatcggcatgcggttcctgaagctctgttcttcccatcacaaaagctctggttatttggagtgattgggttagtcttagcggcaatgattttgattattatgtaccgctactttgcgagtggttataacgcccgattacgtcaaaagatggatgcggctcgggtcaaacaagtgattgaaacttatggcggcaatgaaatctcacacttggcttatttgaatgataagttagcatattactatcaagtcgatggggtcgatcaactgattttcttataccaacagaaggccgataaactgattattatgggagagccattcggtaatcaagcggtattacaaactgccttggaacagttattggatgacgcagatagtgacggttgctcgctagtcttttacgaaattagtgagatgctgacgatgcgcctacacgaaatgggctttgactttatcaaaactggtgaagaagggcacgttaaattggcagactttagtttggctggtaaacggctacggggtgagcgggccctaatgaataagtttacccgtgatcactatgagtttaccatcttgcagccaccgttcagtgccgacgttatggctgaattacgagccgtttcggatagttggttagcaggtgagacggaaaaaggattctcgctcggattttttgatgagcagtatctcaatcaggcacccgtagcggtcgtttatgatcctgaccaccgaattgtcgcgtttgcgaatattatgccgcagggaaatcatcagacgacttcaattgacttaatgcggtcaagcaaatcggcgccatccggcattatggacacggtctttgtgcacctatttgaacaggcgcgtgacgatggctatgcttatttcaatatgggaatggcaccattatccggtgtaggggtttcacgctacagttttattcaagaaaaaattgctcatttaatttacgaatatggctaccagttatatggttttcagggattacggtcgtacaaagagaagtatgtgactgagtgggaaccgaagtacattgcgtaccgaaaacgtaattcactaatcttcaccattttacaattgctacaagtcgttaatacccgggtacacaagtctgagcggcaccggccagtatggttgttgaaacgattgaaataactgaatagtatgtcataaagtaagtatcgttaatgacatagcaaaatgccccatcactgcgagaagcaatgatggggcattttatgatgactttagaattcagccgactaatatgatgagggctgaactaattgtggcagaagcactagagctgttttgcgtaggctagattatttagttcgtatacttaggcggtaacacatgtttgaaatcatggaaaccagcgaaaatttcatcaagatcatgcccattaatgaataggtcgaggttagcctcgggggcaaaccctaaatcggcggtcttttgtagcatggcgactagatcgtcgtagaagccgtcgatgttgtagagcgcaatcggcttttggtgaatatccatttgactccaagataacatttgtaagaattcttcaaaggtgccaaacccgccaggtaaaacgataaaggcgtcagcgaggtgaagcatcttttccttgcgttcggtcatcgtgcgcgtttcgataaaagtcgtgacgtccttaaatgcaagttctcttgcgaccagaaaatgcgggatgatcccgataacgcggccaccagcatccatagttgctttggcgactttccccattaaaccatggtcgccaccgccatagacgagttggtaatcattagcggccaagtattgaccgagtgccaccgttttctcactaaatgcgggatctaaaccagaattagacccacaaaaaacacagatattatgaattgccattctaaactacccccaagataaaattttctagcaaaaatgcggcccggataggcgccgcatttttgtgaactaacgtgttgattaatcgtctggattaccaatatcgtagtcggtgtcttgcattgcttcaacttgacccaagcggtaaccattcccaacttgtgagaagaagtcatggttagaagtccccgttgaaatcccgttcatgacgaccgggttaacgtcttccgcagtatctgggaagagggcatcttggccgagattcatcaaggctttgttggcgttataacgactaaaagtcaagacttcatcagaccaaccaatttgatcgtaaactaaatgaatgtagttttcttcattctcatagagtttgtataagaaatcgaacatccagtctttaaattctgcctgctgcttttcagaacggtctttgaagcctaattggaacttataaccaatgtaagtgccatggacactttcgtcccgcaaaatcaatttaatgatttcggcaacgtttggcaattggttgtggcccaagtagtacagtggcgtatagaaaccagaatagaacaggaaagtttccaaaaagacgttcgcaactttttgcttcaatggatcttcgtcgatgttatcgtaaagcttgtagatccattgggcttttgcttgcaagaattcttcactgtcactccagtcaaaaatttcattaatttcgtccggcgtattcaatgtttcaaaaattgttgaataactctttgcatgaacggattccatgaactggatgttattcaatacggccgtttcatgtgaggttaagacgttgcggcgaagtgcttgcagaccgtcttgtgattgtaacgtatccagcagcgtcaaaccgccgaaaacgtgtcccacgacccaccggtgatcatcatctaattcacgccagtctgccatgtcgttggaaactggaatccgggtgtctaaccaaaattgttcggttaacttttcccaagtacttttatcaattgcatctgaaactcgatcccagttaattgccttatagttgccattactgagcagtttttggtagtaagccaagtctgttgccatttgttatcctcctagagatctaagatactaaattacgcagctttcacattcgttaacaccgacttcgccatcgtcgtccgtaaaggtccgaatataataaatcgatttgatccctttgcggtaggcgtagttccgtaaaatgtttaagtcccgcgtggtcatcttatcagtgcgaccatctttccattcgtataagccagctggaatagttgaccgcatgaagagggtcaagctcattccttggtcaacgtgttgttgagcagccgcatagacatcgataactttacgcatatcagtatcgtatgctgacttataatagttaattgtatcattagataggtaaggagcgggataataaatcttaccaattttcttttcttgtcgttcttcgacccggttgatgattgggtgtaggctggcagtcgtatcgttgatgtacgagattgacccatttggggcgacagccatccggttttgatgatagagaccatcacgcataacggcttctttgaggtcttcccaatcagctttggttggaatgaagatactgtcaaacagtgcagcggtcttgtcatattttggttgccaatcttgggtggtgtacttgtcaaagtaagaaccatcggcatacttggatttttcaaaattaacgaaggtttcgtgacgttcacgcgcaatttcgttagaagcttttaaggtccagtagtttaagagtaagaagtagatattggtaaagtcaacggcttctttactgccgtattccatctgattcttcgcgaaaaaggcatggagccccatggcacctaacccaatggtatgggcttgacggttccctttttggatggaaggaacgacgtcgacgttagagtggtcagtaacaaaagttaacgcgcgcaccatggcttcaacagaatgtccaaagtctggagaggtcattaagttaacaatgttagtcgaaccaaggttacaactaatatcagttcccaacttctcatactgttgttggtcatcaattaatgatggggtttgcacttgcatcacttctgagcacaagttactcatcacaattttaccgtcgataggattttcgcggttcgcggtatcaatgttgacgacgtatgggtagccagattcttgttgtaacttgctgatttcattttcaaggtcacgcgccttgatcttagttttacggatgttcgggttcttaaccatattgtcgtattctttggtgatatcgacatatgagaacggtaccccgtattcgcgttcaacgccgtaaggactgaagagatacatatcagcgtcagccttgatcaactcgtaaaacttgtcgggtacggtgacaccgagtgaaagcgtcttgagccgaatcttttcgtcggcgttttccttcttagcagaaagaaaggcaataatatctggatgaaagacactaaggtaaacgaccccggcaccttgacgttgacctaattggttagagtaggagaaactgtcttctaataatttcatgacgggtacgaccccactagcagcgccatcgatatgcttgattggatcaccggcaccccgtaagttgctgaggttaataccgaccccgccaccgatccgagaaagttgtaacgcggagttaatcgtccggccgattgagttcatatcatcggtcgattgaatcaagaagcaagaaatcaattcaccacgccgggcccggccagcattgagaaaactgggggtggctggttgataacgttggtgaacgatttcgtcggccaggtccatcgccaagtcttcattaccatcagcaaagtagagggcgttcattgccacacggtcaataaagttttccaagtaatagtcgccatcatccgtctttaaggcgtattgggcataaaatttgtaagccgccataaacgtcttgaagtggaagtcttgcgaccgcaagtaatcgtaaagtttttcgataaagctaaaatcatacttatcaatggcaggggtttccaaatagtcgtgttcacgtaggtagtcaaagcgcgccttaagactatcaaatttcatcgtgttcggttcaacattttgttcaaggaaagcggcaagtgcctcctgatccttgttgagcggaatctgattgttaacgggaatattgatctcattatttaagtcgtaatacgtgacgtcttttaaatcttttaaggtcataaggaatcctctttctatcagtataattgtggctggcaaaatcgacgacccacaatcagtaggttgatgattgtgggtcgtttatcatattttaaagggtaaaccagctatgtaaccacgcaaaaaagcgtgaacaaactaaacagctaattgttttaaagcatccggacggaagccggcaatgctgtcttcgccattgatttcaacgaccggaacagcatggaaaccttgattcttcaggtaatcgacgtattcaggattcgtattgatgttcttctcttcaaaggcaatattgtgcgccgtgaggaacttcttagtcatcttgcattgcatgcagttgtttttagtaaatacagtaacttttttcatttttcatcatcctaactcgtttttctgataaatttagtatacaacatgtggtgaaaaaaacaatcaaaaaacacaacatctagggtgtggtaaaaatcacaagtcctagatgttgtgttagtgtcagcttttaaccgactaaaaagttttttaaattatttgtggttcactcgctgaatcagttatcatagatatagaccagaaatttagaggaaaataaatatgaccaactattattatacacacaatccggatattgtgcatgatgaaaagcaatggaattttgaaatttttaatcactcgtttaaatttacgacggacaacggtgtcttctccaagcgtaccgtggattacggctcacgaacactacttgcagcgtttgatccaactgatttgccagcgggcccaatgctagatttgggaaccggatatggtcccattgggatggcgctcgcgtatcaatcacccgaacgaacggttgatatggtcgatgtgaacgagttagcgctaagcttagcgcgtaaaaatgttgctttgaaccaaattacgaataccaatatttttacgtctgatgtctatcaacaagtgaccgcgactaattacgcggcgattgtcaccaacccaccggtgcgcgcaggtaaggcagtggtggatgcgatgttaacgggggccgtttcacggctagtcgttggtggaacactcaccgtcgttttacagaaaaagcagggcgcaccatctgcgaagaaattgatgcaaacgacctttggtaattgtcaggtgattaagaaggacaaagggtattacatcctacaaagtgtaaaggagggatagtcgtgacggaaccaacagcggaagactggatgcaagaagcattacatgaagcgcggatggcctacttaattggcgaagtgccgattggggccgtgatcgttcaccagggtgaaattattggccgtggtcacaatttacgggagcatggtcaggatgcaacgatgcacgcggaaattattgcgattcaggaagcttgcgaatatttgcatagttggcgattagccgattgtcagctatatgtcaccttggaaccatgtttgatgtgtagtggggctattattaatgcacggctacctgaactctactttggtgcccgtgatcccaaggctggcgccgttcgtagtttgtatcaggtgatggatgatacccggttaaatcatcaagtaacggttcatgaacgcatcttggcacgtccggccggcgagatgttggaaaacttcttccgtgggattcgtaaacggaaaaaggcggctaaaaaagcacgacgtgaagctgctgaaaaaaattaggccgatggctggtaattgtggcgcaaatcatgtattatagtatttgccgcaaggccaaaaggcaagggtggatttacgaatcgtgtcaggtccggaaggaagcagcactaagtttgcttcatcttgtgccttttgtttttatgaaatgtaacagctcttagccattcggttgagagctttttatttaaattaaatattgagtgctagttttgaacgtgctgataggttggtttatttttatttacctattattatagtagtaatacgttatttgggtgatgcttttcaggctgatagttaaagccactgcttgttgaaggaataaccaaacgcctaacaaaggtggttaaaggcctgggcatcgactcgttggcaagtgcgcttagatgcttaatttgcataactgacactgatcgttagtggaagcagcacaaccaggaagctaactgttcaggacgtttaaacaatggcttataataagtaatgataaccaaagtatgactgatgtaagaaaggaagaatcgcatgtatcgggcactatatcgggtttggcgtccccaacgctttgatgagattgtcgggcaacagatgattacccagacactaaaaaatgccattatgacccaccagacgagtcatgcgtatctgtttaccggtccccggggaactgggaaaacgtcggcagcaaagatttttgccaaggcaattaactgtcaccatcttgttgatggggaaccttgcaatgaatgtgagacttgtacggcgattaccaaggggcaactaaatgatgtcatcgaaattgatgcggcttctaataatggcgtggaagagattcgtgatattcgggacaaagcgaagtatgctccaacgcaagcggactataaagtctacattattgatgaagttcatatgttatcgactggcgcgtttaatgcgttgctcaaaacgctagaagaacccccggctaacgttatatttatcttagcgacaacggagccccataagattccattaacgattatttcacggacgcaacggtttgattttcggcggattacggctaaggatagctacgatcggatggtgtacatcctcaatgagaaggatgtgacctatgatgaaaaagcgctacgcgtcattgcagcggctgctgaaggtggaatgcgggatgctttaagtattctggatcaagtaatttcgtttggggataacacggttacgttggatgatgcgttaatggtgacgggaagtgtgaccaagcagttgctggctaactatgtcagtgaggtcaccgaccatgatacgaagccggcactagagacgatgcgacaaatcttacaagaaggtaaagatgcgaaccgtttcattgaagatttgatcagttatacgcgtgacgtgttactctatcaacaggcccctgaaatggtcgatagtgtggcgatgggcgaggatgatcaacaatttgaagcatttgccaagcaaatcgatgctgaagtcctgtaccaaatggtcaagacgttgaacgatattcaacaacaaatgcggttcacgacgcaccccgacgtttatttagaagtgttgacggtcaagctagctcagttggatggtcaagcggccgttcaaccggtagctgcggcaacggtcaatcctgaagatcccactgtgcataaactggcacaacaagttgaacagttgcaaagcgaggtcaaaacgttacgttctcaaggtggtagtatcactaaacctgcaccggctaagccgcggtcgagtaatggcccggttgttaagaaggttaatgtcagtcagatttatcctattctgggagcggcaacgaagaatgatctcattaaggtgcgcgatgtttggactgatttgatgaatattttgagtgtgacgcagcgggccctaatgcacgtggcccaaccagttgcggccagttcagaaggtgttgtggttgcgtttgactatgcgtttgtttatcaaaaagcgattgatgaccagaccttgatcgatgcactcggaaatggtttggatcggctgatgggacaggcacccaagattgtctgtgtgcctaaagaacagtggccacaaattcgtaaggattatttggccactcaccagccaggaggtgcaacatcagagcaacaagcaccggccaaagaaccggtcgttgaagaagctaagaatatgttcggtgatttagttgaagtacagccggactaaagacgaaaggaactgataattatgatgcgtggaatgggcaatatgcaaagtatgatgaaacaaatgaagaagatgcaggcgcaaatgacagccgaacaagcggctttaaatgaacaaaccttcacgggtgcggcgccagacgacatggtcaaagtcacttttactggtgataagaagatgaaggatattacgattaaccctgatgctgttgatcctgatgatgtggatatgttacaggacttagtcgttgctgcggtgaacgacgcattgactaaggtcgatgaacagacacaaagtacaatgggaaaatatactaagggattacagtaaaaacgaggtaagtacatgcagtatccagaaccaattgctaagttgattgatagttatatgaagttgcccggcattggtggcaagactgcgacgcggctggcgttttatacaattgatatgaacggtgatgacgtcaccgagttcgctaagtcgctgattgcggccaaacgggacctgcatttttgtagtatttgcggtaatatcaccgaagatgatccgtgtgtgatttgtaaggataagtcgcgtgatcaaagcaccgttctggttgttgaagaggccaaggatgtcatggcaatggaaaagattaaggaatacaacgggctgtatcacgtcttacatggggtattgtcacccattgatggcaaaggtccggaagatatcaacattgccagtttattgaaacggctacagcaaaatgaagccatcaaggaagtcattattgccaccaacgctacgcctgaaggtgaagcaacagcgatgtacatctcgcggttagttaagccggcgggaatcaaagtgacccgattggcgcacggtttgtcggttggtagtgatattcaatatgcggatgaaatgaccttattcaaagccgttgaaggtcgccaagaaatgtaattggaggtgccaccatgtttaaacgtaaacagaagatcaagcatcccaaggaagtttttgatgaacagttattgtcgaccctgaatgccgctaagttggactgggaccgtgcgaagcagaaccaagaagcggtttatgataataatacgagtgaactagttacgcagaccgccttagcgcgtgctaagtatttatatctgtatcgtgaagcacgtttacgtcaagttcatgggcagacgattcagcgctcggtcgttgataaatagactgttagtgatttaagagataacttgtttcaaaataaagacgcacgtcgttgatttttgtaaatctacggcgtgcgtttttgatttagaaccctagcattattttaccagttaatctgtcatgcattgtgattaagacatgctaggtgcggcaattggaatagaagatgtgtatctactaatgaataacaaactaaaatcggtatttatcaatcgtgggtagtactacctaataactttttagcaattcaccgaataaatcatcaaaaccacaattggtagtagccgacccacgtaaaaatcgtgaaaaagtaccctcactagtggtaaccgtattagacaggtactcaaaaatcaagtacaattgctacatataagaaaatagatgggattgggaatgttgacaggaaaattagttacttttgaagggccagacggtgccggcaaaacgtcagctttaaacgcgattgtggccaaattacagccacaattaggggatcgcttagttgtgacgcgtgaaccgggcgggaatcaaatctcagaagcaattcgaaaaatcattttagaccgtcataatacggcgatggacgaccgtacggaagcgttactctatgcggcagcacggcgacaacatatcgtccaaaccattcaaccagcattgcagaacgaccaacttgtcttgtgtgatcgctacatcgatagctcggtcgcttatcagggggctggtcgtggtattggggaacaagcggtttatgatatgaatcagttcgcgaccgcggggctaaccgcagatttaacgttgtattttgacgtagatgctgccgttggattaaaccgcattcaacaacatcgccaaaatgaaattaatcgcttggacgtggaagccttaagtttccatcaccgggtgcaagcagcgtatttgagattactggctgatcatcctgaccgtatcaagcgcgtcgatgcaagtcagccattggaccaagttgtgacgcaggccttagagattatggcgtcacagttaccggcttatgtggcatccaagggaggggaagaccaatgaaattaattattgcaatcgttcaagataaggacagtaaccggttgagcagccagttcattgaagccaatgttcgggccacgaagctctcaacgacggggggcttcctacgttcaggtaataccacttttatgatcggtattgatgatgaccgtgtggatgaagttttagccatgattaaagaaacgagtcatgcgcgggaacagtttatgacaccaccagtcaatctagacgtgacgatggatggcgcagctgcctatccagttgaagttcaagtcggtggcgccacggtctttgttctaccaattgaacaatttcaccaattttaatgaaggatgattattaatggcaacaaccgagtcatttgcgcaaacgttagcggcgaaacagccccgcttattagcggcatttaaacacatcatcgcccagaaccatctggcccacgcgtacttattcgcggggatggaaggcgctggacaaccagaactggcccattggattgcgcaacggttgttctgcctgcatattaatgatggtgaaccagatggcacttgtgaggagtgcgtccggattgctaatgggtcgcaccctgatattgtgacagtggctcccgagggtcagcgaattcacgttgatcaggttcgttacttaaaagctgaattctctaagagtgcggtcgaaggtaaccggaaactgttcatcattaatgatgcggagaagatgacagcgagtgctgccaatagcttattgaagtttattgaggagccaagtggtaacgtcacggccttgttattaacgactaataagcaactgatgctaccaacgattatttcacgaacccaggtgatcgaattcccaccattaaatgcgcaggcgttacagcagacgtttgaacaggccgggattgcgccaaaccaagcgcagatgttacggggcctgacaaatagcgtgacccaggcgcaggcgttgctagcggatgattggttaccacaagctgcgcaagcattgtggcggtggtttgaccaggctgttaagggtgatccacggagttttgtggctgtgcaggtcaatttagttggtttggctaaggacgctgatcatcagctggttatgttggatttaattgcggccttgttccaagatctattgcaattacattttgaggtggcaacgacagcgttaacctttggtcagtaccaaaaagaattggccgggttaacggctgaagtcagcgatgagcagttgattgcggcgacagaactagctttaacggccaagcgccagctagctagcaatattagttttcaaaatgtcttagaaggcttaacgttaaagttatggccgatttttcaaacaaacgcttaaataaaggaaaacgagggtgagcgcgtggataagcgtgatttatacgatagtttcggtgagatggaacaacagatgcaacaaatgctagacaaaatggctaagttacgcgccgatatgacaacggtgttagagaaaaacgcggaattggtcattgaaaatgaacatttacgtgaacacatggtcgaaattgaaaatgaattgccgaaaaaagcggctagcacgaccacgctctcaaagtcacggcaaaacttggaaaaactctatgatgagggcttccacgtctgcaaccagttttacggcaaacggcgtgacgatgacgaatcctgcgttttttgtttggaagtcatttatggtgaacgtgaacgcgcatagtcgaaaaagtctgggagtagtcccagactttttgtgcttttcaccacgagtcactcataggaacaagtcacggtcgagaggattgttaggaggacgttttggaaacacaacaaagttttgcagatcatgcgggtatcgggaccttgtacttagtaccgacgccaattggcaacttacaggatatgacttatcgggcagtggcgacgcttaaaacggttgacctaattgccgcagaagatacccggaatacccaaaagttattgaatcattttgaaattacaacgaaacaaattagctttcatgaacataacacccaagaacggattccccagttaattgaaaaattacagacgggcgttaacttagcacaagttagcgatgcggggatgccgtcaatcagtgatcccggcaaagaacttgtggcagcctgcattgccgcgaatattccagtcgtgccactaccaggtgccaatgccggcctgactgcgctgattgcttctggcctagtgccacagccattttatttctacggctttttaccgcgtaagaagaacgaacaaaaagctgatttagctaaattggctcggcgacatgaaacggtggtcttgtacgaatcgccattccgtgttgccaagaccttgaccctcctagcgaccgtctgtgaagggacgcggccaattgtggcgtgccgggaattgactaagcgttacgaggagtttgcgcgcggaaccttgactgaaatggtgacgtgggcgcaagatcatcagttaaagggcgaatttgtccttttgatcggtggtaatccggataaggatgaaccagaaacaatggacgaattggcacagttgccagtcaaagcccaagtcgaagcgttgattgcagccggagataagcccaacgtggccattaagacgattgcgaagcgacggaatattccccggcaaagcgtttataatcagtttcatgaactaaataccaacgatgaggagtcttgatgaatggcaactttaggcgcaaatgcgagtctttacagtgaacagcaccggattacgtattatgaatgtgaccgcactggtcgcgcaaccttaacgacattaattgatattgccgtactggcatcagaggatcaaagcgacgcccttggtttaacgacggaaatggtgcaaagccatggtgtcggttgggtcgtcacgcaatatgccatcgatattacacggatgccccgccaagacgaagtcgttacgattgccgttcggggtagtgcttataatccatattttgcttaccgtgaattttggattcgggacgcagatggtcaacagttggcctatattacgagtatctgggtcatgatgagtcaaacgacccggcgaatcgtaaaaattttaccagaactggtcgcgccgtatcagtcggaagtcgtcaagcgcattccgcgcttgccacgaccgattagttttgaagcgaccgatacaacgattacgaagccgtaccatgtccgcttctttgacattgatcccaaccggcatgttaataatgcacactattttgattggctcgtagatacgctacccgcgacgttcttgcttcaacatgatttagttcacgttgacgttcgctatgaaaatgaagtcaagtacgggcaaacggtgactgctcatgcgaacatcttaccgagcgaagtggccgatcaggtcacgacgagtcatttgatcgaagttgatgatgagaagtgttgtgaggtcacgattcaatggcggactttaccagagccgattcagtaattcgctgggttggtatttacactagtgtgttaatgatgtggtcatgagcgacttggtcgattagaacgcacgtttttattagagtcgctagcgattcagtatgctatgattaatacatccatacaggggaggttcattatgtcaattttagttttagggggagctggctacattggttctcacatggttgatcggttagtagaacacggtacggacgtcgtggtcgttgataatttggtcacgggacaccgtgctgctgttaattcggcggccaagttttatcagggtgatttgcgggatgcggattttttgaatcacgtttttgatactgaggatattgaagctgtcgtgcattttgctgccttttcaatcgtaccagaatcaatgagtaagccactgaagtactttgataacaatactggtgggatgatcacgttacttgaaacgatgcaggcccatgatgtgaagcaaatcgtcttctcatcaacggccgctacttatgggacacctaagcagattccaattaaagaaactgatccacagttaccaatcaacccgtatggcgctagcaagttaatgatggaacagattatgcactgggcggacgtcgcctatggcattaagtttgtcgcgttacgttactttaacgttgcgggtgccaagccagatggcagtattggcgaagatcatggccccgaaacacatctggttccaatcattttacaagttgcgcaaggaaaacgcgatgaacttaaaatcttcggcgatgactataatacgccggatgggacgaatgtgcgtgactatgtgcatgttatcgacttagctgatgcacatatcttggctttgaagtacttggctgcaggaaatgaaagtaatgcctttaacctgggttcttcaactggtttctctaacaaacaaatgttagcggctgctcgtgaagttaccgggcaaccaattccagctaagctagcgccacggcggcctggtgatccagactcattggttgcggcgagtgataaggcgcgtgacgtgctaggttggcaaccaaattatgacaatgttaacgatattattgaaacagcgtgggcttggacgcagaagcatcccaatggctacgatgatcgtgactagtatcggttagctgataattgaaagcggctttgaaatctcgtcaatagatttcaaagccgcttttgtggtcgtcaaaaaaggtgcatgtcaggattgagtccttggcacgcaccttttagattgatcaatgcagttagcggtgaagttgttgataatcaccgataattgttaagagtcgttgaatatcagttgtatcaacatcaccgatggtaccaattctgaagctagggatatttgaaaccttcccaggataaatgacgaagccgcgttgcttgatgaactgatagaagtcagcaaaatcaaagtcgccgttcgggtatttgaatgacgtaatgatgggcccttgaatggctggatcaatcactaattcaaaacctagcgcttgtaagccgtcgctaaggagttgttgactagcacggtaacgttggtagcgtggtgtcacgccgccttctgcttgcaattcaatgagtgcttgcgcaaaggcatgtaccacgtgggttggcgaagtgaagcgccattttcctggttgcttggtcatggcttgccattggtcgtagagatctagacaaagtgaacgagcgttgtcagcagtgtgggccaaggtcgcttgttttgcaatgatgaacgcaaaaccgggcacgccttgcacacacttgttggcactactaatcaagtagtcacaatccaattcatcaatgctaatcgtgacgccacctaaactggacatggcatcgatgatcgttacgatcccgtgttcatgcatgatgggcattaaagcttcgattgggttgagaatcccagttgtcgtttcgctatgaacggttgcgaagtgggtaatctccggatgatcagctaaggttgcttcaatccgaaccggatcgacggcttcatcttcgttgaacacaacgtcgatatgtggaatatcgtaatattctgcgatttgactgattcgatgcccatatgcgccgttaatgccaatcattaaagttgcatcggtccgtggtactgctgtgccaatggtggcctcaacaccaaaactgccgcttccttgtagtaggacggtcgtatagttttctggattggcttgggccatagctaagatttgttgccgaatggtttcggtgacgtgccgatagtcactatcccaagtacaataatcaatttgcattgcgtccttaacactggcagtcgtactgagtggaccgggtgttaggagtcaataaggttgtttcataaaaatcgggctccttgtctgctaatgatcagtggcaaccggttgattgatttgatcaagcaatgccggtaattcagccatcgattgtaaaatgtaatcggcaccagcgcgttgataagcggcagtgacgtgggctcgtcgttcagcttgttcggccgggctaagggcgttgaaggctaactccgaaagtcccatgatgttgctaccatcaataatccctacagagactgcgtcggcgttgttgccttctaagatatcattaacggaatccccaattttcatgacggtcgttggatcagtgactgtgagctgttcagctgctaacgcaagcattgccggcgctggtcgaccaacaccgccagtttgttctgaagtgatgttgacggcgggacgatagccttgcttagctgcgatcggtaagaccagggctaacatttcagcgtcatagccggtggtcgtgccatagctgatattgtgagcggtcaaatagtcaattacagctgacatgccgggctttaattgtccgaattcagtcagggagctaagcaagattgccttgaagttgctaaagatttgattgcagtcgtcttcagtcggtaagacttggaaacgcgcctgccagtcgttttgaacggccggtaaatccatgattttatggatatgggtgtacttatctagtcccatatcttggcgaatctcagcttcagagatttgaataccaacgttggcaaaggctttttggaaagccacgatgggcgcccggctgccatagtcaatggtcgtgccggcccagtcaaaaattactgctttaattgtcattgatgaaaactcctttgaatttacttagttgttctttaagtagtggccacgtaaccgcatagaaaccagttcgagcacgattgcgacacccaagagtaggtagacaatcaaaccaacttcatggaaatcgaagtagaaactgccagccatgaagaggtagtaaccgatatcgtcagcaccagctgcagcaccaacggcgaccgcattggcaaagttaatttcaaaccggataaacgtccagctaagaagtgctggaatgattgacgggagaatggcctgaaaaacaattggccaaaaacccacgccactcgcctttaacgcttcaatcgtatcttgcgaggtttcttcaatactttcagaataagccttaaccaagtacgctacactgtggaaggtcaagccgaccacggcggcactagcacctaatcccatgactacggagtaaattaacacccataaaatcgttggaatggcacgaataaaggccatgactgctttaatactagtagctaaccaactgggtgctaagttacgggcagcaccgacggcaatgaagaaggcgattagcgctcctaacaaagttgtcaacatcgctaatgaaacactagtcattagggcccgtaagagttgccccagtgtgtcttgaccaacgctagggtgtaagaacatagcattcaggttgagacctaagctatgcaaagcgtcaatgatgttcaggttggcattattgagtgtgactaatgaatagacactgataagcgttaggccaatcataacggctcgcaggattttgcggggccgagtcaccaacgaaatcgaccgggttggtggtgctgacggttgaagtacttgtgttttgggttgactgttttcaatcatgcaattgccctccgaattcgattagatgtcaattctaaaacaatgactaaaatcgcaattaacaaaacaattagaccagcagcgtcatagcggaacgccttaaaatagtagtcaaagagaaaaccaacacccgtacccgtcaagagtccgaccaaggttgcgtcccgtaagttgttttcaatcatgtagagaatccaactagtcaaggtactagcggcttcgggtaacaccccacagaagacacattggaaatagttggcgccaacggcttgcagtgcttgaagcttttcggcatcgaggtcctcaatagtttcagtaaaggcccgtgttagatagcctagcgtcataaagaacagtgccaagaagcccgtaaagtcactctgtttaaaagaaaacagaagaatcatcgcccaagcgaccaccggaatattacgtaagagtgaagcaccaaaacgaataatccagcggaggacaggcgttggggtggtcgtcttagcaccgagaatcgcaaagatcagggcgaagagactagcgaccatggttgatgaaattgccacgagcaaggtccgccacagctgataaagaatcggtcccagataagaaatcgaacgacttgtcggaataaagttggtaaataaccacattaagcccgctggaatcttactgatcgaagcccacgcctgaaaattaacgagggccatggataagacgtagatgccaattaaaatgagcaaaacaactgataatcgcaaccgacgttgccgaaaaaagcgttgcggtgtcattggattagttttcattggcagccaccgccgttgattggtcaggttggcgataaatgtgttgtaagaccgcgtcgtcaacttcattagtggcgccttcgaaaacgatggcgccgctgttaatgccgacgatatggtcggtgtacgccattgcgatatcgacctgatgtagattaatgaggataatcagttgtttttcctttgccaatcgccgtagaatgtccatgacaatggtcgttgatttgggatctagggaagcaatcggttcatcacataaaatcatcttaggatgttgcattaatgcccgtgcgatcccgacccgttgttgttggccaccacttaattgatcgcaacgttggtaggcgtattcttttaaccctacttcgtcgagtagttgtagcgcctcttgtttttcggcgctactgtaaaggccgagcatgccagcaaccgttgatttagcgcctaagcggccatgcagaacattttcaagggccgttaacggactgatcagattgtagttttggaaaatcatgccgatatgatgacgaactttgcgtaattcagctttgttcgcttgacgaatgtcagtgtcatcgagcaaaatttgaccactatcatcgcggatcaactgattgatactccgtaaaatagttgttttaccagcaccagacgggccgatgatggcagttacttcgcccggtttagctgtgaagttgactgctttgagcgaatgcttattggaaccatatgttttatctagctgaataaccttgagcattggcaaatcctttcattgtgaactaatggtacgtggtttagtaacctactaacttatgcgttggcgcgtaccacttgtcggtaacattaactaatttggacttttctgatttcttagggaacatcattggtgtcttcgcatttggttcagagaagatctttttgttttgggcaaaggacttcgacgtgaactcagtggcgatcttcttttgatcatccttgctgagggccttggtattgtatacccatgggccttgttgaacaggcatcatggcaatgttaacgaccgacttgccggctaaacttgtaaatggcgcttcggcgttatccttaacagtgaaagttgagccgaccttgtcccatgatcccttggtaacgtttaagtatggcattaaatcagcatcatcaaaggcagcgacatccgcatcccccttgattaagttgaccgcggaaccctgatgagagccaccatagagcactttactaaagaatgatccgctttgagttaatttatcttggtcagcggttttgatgttgaattcacgtgagatttcagccgttggtactaagaagcctgaagttgaactgttggaaacataagacatcttcttgcctttgacgttcttaatactgtacttaccgttttcttcatactttttggcatctttttgttgtaccattaagtaggagttataagtagcgtctttcaaggtacctttagcatcagattgtgcggcaaaaggtacaacatctttgctcttgtggtgtgcttggatataaccgttagcccccatgtatgcgacttgagctttgccggatgcaattgcttgaatcgcaacgttatagtcggtcgtggtttgtaatttaaccgtcttacccgttgccttttcaactgcttgcttaatggccgtacgggaaccagcaaaactcttggctgattcgttaggatagaagaccaccgtgatggttttgctgctatccgtactgctaccaccagatttagcactggttccgctagcgcaacctgcgagtcctaaacctaaaaccgaaatgaatgaaagacctaataatgacttactaacttttgacatagtttccaattacctccaagtaattttagttacttgtgtagcataacaaggtattgtaaatgtgcggacaaggattagtgaagtatatgtataagttatgtaaataatatttacattcggttttcaattcagcgattggtaagtatgagtggaaactggtcaggatagttgttgattgtttctggattgaattggttggttactaccgtaaagctttcaaagtaagtaaattatgataagatatgtgaagtaattcaaaatgaggagttttttaaaattatgaagttgttggcgattgatacttcgaatcggccattgagtgtcgcggtattagaagatacccagatcttggccacaacgaccactaatgttggccgtaaccacagtagtacattattaccgattattgaacaagccatggctcaagctaaattggcaccagctgatttagaccggatcgtcgttgctgccggaccagggtcgtatacggggttgcgaattggcgtgacgactgctaaaacacttgcctttacattagataaagccttagttggtgtatcgagtttggccgtgttagctggcaacattgtgacggaaggccaattagtggcgccgttatttgatgcgcgtcgtgacaacatctttgccgggttatatcggattaagaaccagcgcccagttgccgttatcgctgatcaacatatcagtgtggccgagtggggtcaacgattagctagttatgatgaaccaattacctttgtcggcgcggatgtcgatcaatatgcggatgctttgcagcaatcgttagctaagcagttcgttcatgcagccccacaacttgacttgccccaagccgtagtactaggtttgatgggtcgaacgctgacacccgtgagtgaaattcataactttgtgccaaactatttgcgtttaacgcaagctgaacgtgattggcaagccaagcacccagaaaaggaacatgcgccctatgttgagaaaatttaaggagtactttcaaaaaatgaccaccggtggcaatcagcgccgccaacgtgtattggccattcaaaatcacatcgttaaagtgggcgaagtcaattactatgtctcacgcgcactgattaccgatgtgcccgagatgctagccattgaacgggccgtatatgcgggacagacaccgtgggatgaaaatgcgtttaagacggaacttcgccgacagagcggtcgtttctatattgtgatgcgtcatgaagatcgcctcgtcgctttttgtggttgtgtctttgatgatcgccgccaagatgcacatatcaccaatattgctgtacatcccgatgttcaaggccaaggactcggccattttatgatgcaagtcatgatgaagcgggcgcgtaagttgcattaccaaacggtgacccttgaggttcgttacagtaatacgattgcgcaacaactttaccgcgatttagggtttgaaaagactggtatcaagaaacggtactattttggcgaccatgaagatgccattgatatgacttatcgcattccggtagctacggatgactgaacgacagcttgtcgccagtacgcagcttgacgcgggtcgggccgtccaagtttgttaccagttagcgacattagcatatcccggtggcgcaccttggcggcaagcgacgtttgcggcggacatggcgttaccaacggtacactatgatttattacggtggcaggatgaactgatcgggtttgtcagccgctcaacagtgcttgatgagaccgaaattacgaatattgcaattgatccggcctatcagcgtcaagggcatgcgcggtggttattaacagcctgcttagcacaattatcggcagggtccgtattcctagaagtccgggctagtaatctcgccgctcagcgcttgtatcagcaatgcggctttgaccagattgccacgcgtaaggaatattatcatgatcccgaagaagatgcgtggatcatgcgtaaaatgattaattaaaaggatgggaaccgtggaaaaacaaaacttgattttagcgtttgagtccagttgtgacgagactagtgtggcagtgatcaaagatggccatgagattttatccaacgtgattgcaacgcagattaatagtcacaaacggtttggtggcgtggttcctgaagttgccagccgtcatcatattgaacaaattacaatttgtattgaagccgcacttcaagaggcacacgtgacgtatgctgaccttgatgctgttgccgtgacgtatggccccggtctagtgggggcactgttagtcggtgttaatgcagctaagacagtggcatacgcgcaccaattaccgctgattccagttaaccatatggccgggcacatttatgccgctcggtttgttaagccattcgaatttccgctaatggcactattagtttctggcggtcatactgaattggtctacatgcaagcagatgggcagtttgagattattggtgagacacgtgacgatgcggctggtgaagcttatgataaaatcggtcgggtattgggtgttccatatccggcaggtaaagtcattgacgagatggcacatgcaggtcacgacactttcaaatttccgcgagcaatgattgatgaagataattacgattttagttttagtgggctgaagagtgcgttcatcaatacggtccatcacgcagatcaaattggcgcgactctggataagaacgatttagcggctagctttcaggccagcgtggttgatgttctgatgagtaaaacgttacgagtcctcaaacaatatccagttaagcaattagtcttagccggtggcgttgcagctaatcaggggctacgtgaacggttacaacaagatttaccaaccgcttttcctgacaccgaactaatcttagcgcctctaaagttatgcggtgataatggtgccatgattggtgctgcgggctatgttcaatatcagcatcaccaattcggtgacgcggcgctgaatgccgatccaagcttagaatttgattggatgccaggtatgttgaagtaatgaagcagttataaacgggtgtgaaaagtcagtccttttcacacccgttttagtatcttttcattaattatgattaaaagaggatgattcctagaatcaaaaatgaccagcttaagcccgctggaaatagttcaagttagtgtaaacttgcttagttagttcgtcctacaccgacctccaggcatttctgccaattgccggaacgtggtgggcacagatttgagccgaaaaatcacgtctcaaatactggcctttcactaaccaagcacaggacgcttgctaagtgaaatttcaccactgggcattgtcagaaacgccttccagtcgggatagcgttcgaatggctgataggggcgtactcaacttttgctggatttgtcgttgtttttcataaacgttaattttatcaatcaactgtcagattgaaaaggtcttgtgataactcactatttctgaattaccgtagtaataattgaatatttcgaaaaagtggagaaggcactctgatatttgacttaaagggttcagtatcaaaatagccaacgacaaattgtaccgagttcagtggccgttcatcagccattcgagcggcatcccgactggaggggctgggtgacaatgctcagtagccaaattattcttagctggaagtgggttccttccggcttagaataagactcgtatttgagaccgggcgggttgtgtacggactcaaatcgacgtcggcttacgttccagcaattgtcacccagccccggaggtcggaatcggacgcgcattgctgacgaacaggaacccacctaaccggcacctttcaatcatgatttatgccgcggataggggcaaaataatagtcgcctcaagaattatattaattcttgaggcgactattatttttatctgatgagtcattggaaaattagctcaattcttctaaagcttcagcttgttcggtccattcggtttcaacttgttcttgttgagtattgatggcttcaagttctttttgtaggtcttgtagtttaccaacatcggccgatacttcaggttgcgccatttcagtttgaatctgtgtggcttgttcatctaaggcagtcatctgttcttccagggcggtaactgagcgctcgagcttgcgcttttcacgttgttgctgcttgctggcttggtaattttgctggcctttggagcggggagcagcagttgtggcactggttgaatccgctgcaccggcttcagcagctttttcggccgcttggctagcagccgcagccgcgatttcagcttgttcttgtttcttgtcgatgtagtagtcgtaatcacctaagaagagttccgtaccttccggagaaacctctacgacactcgtggcgacttggttaatgaagtagcggtcatgtgacacgaataaaagggtgccgtcaaagtcgttgagggcgacttccaaaacttcacggctatcgatatccaagtggttagttggttcatctaagattaagaagttgtcattttgcatggcaagtttggtcaacagtaaccgggcccgttctccaccagatagggcatgaacgggtttatcaacatcttcaccagtgaagagaaaactgcccaaaatggtacgaatgtctttttcaggagtagtgggatgttcatcccaaagttcaccgaggacgttttttttgtcgtttaaattacgttgctcttgatcgtagtagcccgtaacgacgttggtgccaaaaacggcctggcctttaatgaatggaatctgtcccaaaatactctttaggaaagtcgattttccaataccgttcggtccaacaatggcaatagcttcatgtttcttaatattcaagttgtcgggttccgaaagaatctgaccatcatagcccacggctgcatctttgacggtcaacacaatgttgccgctttgtttagccgcatgaaagccaaagtgggcagtcttctcgtcactatcagggcggtcaaggcggtccatctttgctaactgcttacgccgagcctgggcccgttttgtcgtagaagcacgcacgatgttacgattaacaaagtcttcaagcttgctgatctccgcttgttgcttttcataatgtttccattgtgcttggattcgagccgctttttcttgcacaaactggtcgtagttgccagtgtagtgcaccatttcatggtgtgataagtcatagacttcgttaacgacccggtctaaaaaatagcggtcatggctaacgattagcagcgcaccagagtaagactggagatagctttccaaccaagtaagggtttcgacgtccaagtggttcgtcggttcgtcaaggataagcaagtcccgtttttcaagtaacaacttggccaaggccaactgggtcttttgtccaccggatagtgccgtcaccgacttatcgtacacatcggcgtcgaattggaagccgtgcaacacgccccgaatctcagcttggtagccgtacccgtttttttgttgaaattcagtttgaatctgatcataggttttcagggtctgttgataagcctgctcatcattcatgattgcggggtcgctcaattgattttcgagctggtgcatccgtttttcgatggcatgtaactcagcaaagacactactcatttcttcccaaatcgtattgttactatccagtccttggtcttgcgccaagtaaccgattgttaagcccttgcgcattgaaatctggccttcgtccggtaccgtttcgccggcaatcattttaagtaaggttgattttccggccccgtttcgaccgacgagggccacccgagcgtgttcttgaatatccatttgtacgttatcgaacaagacatcggcgccaaaacgccgcataacttgctgtacttgtagtaaaatcacgctttattaagctcctttcacatttaattcgtgacataattgtagcatattgtaacggcctgacccaattattcggaataataagtaattattatttcacaaagtcacgcgttatgctagaatagtgtcagcaaattcacaagcttttaattaggaggacacgtccgaatggcagaaacaaaaattccacgggcaacggcaaaacggttaccgatttattaccgctatttaaatatcttgctagatgcagataagaagcgggtctcatcgaccgagttgtccgaggcggttaaagtagattcagcaacgattcggcgagatttctcgtattttggggcgctcggcaaacgagggtatggatacgatgttgaaacgttacttgcatttttcaaaaagattttaaatcaagacaccttaacgaatgttgctttaattggggtcggtaatttgggccacgccctactgaactttaattttcacaaaaacagtaatgtccgcatctcagcagcatttgatgtcaacgaggcgattgccaatacagtccaaagtggggttccagtatacccaatgacggagctcaaaaagcaattgatcgaacaacagattgagattgctatcttaacggtgccaaccacggttgttcagaaaattaccgatgacttggttgatgcaaacgtcaaaggaatcatgaactttacgccgttacgaatctccgttcctgagacagtacgggttcagaacgttgatttgaccaacgaattacaaacattgatctacttcattgaacattacggtcagcaattaggtgacaatggtaatgacgatgaaaatgagactgaagattaataactcgctttatctttgaaattaaatggctataaaaaggcttctctgaattattcagggaagcctttttaacatacttagatcacgaatcattgattgtaacgtataaatattcggtgaaaattaacgttgaaacgctaggttagcgctacctagtaatgatactagtgcagtaagcctaataatgtgggtaacacaaccgatgcgttcattaggatgtgagccgtcatcgatgtttgaatccgaccggtgtgctggtataaccagcagaataataacccgataaaggcatagaggataaagtgaccatccgcatgtgcaaagctaaatagcacactagaaatcaaggccgccccaatctgaccagtaaccgcacttagattgccaaagataactttgcggaagacgatttcttccataatcggggcaccgacaatgatggctaagaagaaagcgggatattgttgcccaacagttaagagggtggtcgtgttggttgacgctgttgactgtcccagtaaagccgtcatttttaaaatgatgacttgaccaacgatgactaggacaagaccgatcaatccccagatgaacgtcatgaaccagttacttggttgtttttcaacaacgttttttgtccgcatgcgactcgccaaccagatgagtaggattgcaccgactaagtagtcgaccgtttgaatcacgaatacttgggcccctagctgatggaaagcagtcacaaggacgctcggtagtgcgtaaataataaagtagatgataagaataaagattgattggcggcgattaaccatcaagtcacgtccttttaaaagtttgatttaagatttattgatacttcaatagtattcattatagtcgatttgacattctttgactaataattgacaaatcacttgcaatcttgaattaaaatgatatagttgacaatgtaattagcacttgaggttgaggagtgctaaaaaagaataaatggagggattcacgtgttaaaaccattaggagatcgcgttatcttgcaacaacaagaagaagaagaacaaacaattggcggtattgtcattgccaataacgctaaggaaaagccccaaagcggtaaggttgttgccgtcaatgacggtcgtgttttagataacgggacaaaagttgaccccagcgtgaaggtcggcgatcaagtattattcgataagtatgccggtaccgaagtcaagtatcaaggtgctaagtatttggtattgcacgaaaaagatatcgttgcaatcgaagactaatccatttaaattgcgcaacttaaaataaattaaattcatgaggtgaatagagataatggctaaagaattaaagttctctgaagatgcacgttcagcgatgctaaaaggtgtcgatcaattagctgacacagttaagtcaacgttaggtcctaagggtcgcaacgttgttttggaacaatcatatggttcaccaacaattactaatgatggtgtaacgattgctaaggcgatcgaattagacgatcatttcgaaaacatgggtgctaagttagtttctgaagttgcttcaaagactaatgacatcgctggtgatgggacgactactgcaacggtcttaacacaatcaatcgttaatgaaggtatgaagaacgttacggccggtgctaaccctgttggcattcgtcgtgggattgaagaagctactaagacggcggttgactcattacacgctatggcacacgaagttaagacgcaagaagatattgcgcaaatcgcttctgtatcttcagcaagtgaagaaactggtaaattgattgccgaagccatggaaaaagttggtcatgacggtgttatcacgattgaagaatcacgtggtgttgatactagtttagacgttgttgaagggatgcaattcgaccgcggctacttatcacaatacatggttactgataatgataagatggaagcggatcttgacaatccatatatcttaattactgataagaagatttcaaacattcaagatattttaccactattacaatccatcgttgaacaaggcaagccattgttgatcattgctgatgacatttctggtgaagctttaccaaccttagtcttgaacaagatgcgtgggacgtttaacgttgtcgccgttaaggcacccggttttggtgatcggcgtaaggaacaattacaagatatcgctatcttaactggcgggacggttatcactgacgaccttggccttgaattgaaggacacgaccatcgatcaattaggtcaagccaacaaagttacggttactaaggataacaccaccattgttgaaggcgctggttccaaggatgctatctcagaacgggttgaatttatccgtaaccaaatcggtgaaacaacttctgactttgacaaagaaaagttacaagaacgtttagctaaattagctggtggggttgccgttgttcgtgtcggtgccgctactgaaactgaattgaaggaacgtaaataccggattgaagatgctttgaacgcaactcgggccgccgttgaagaaggctttgttgctggtggtggtactgctttgattaacgttatcaaagatgttgctgcattgaaggaaactggtgacgttcaaactgggatcaacattgttaaacgtgctttggaagaaccagttcgccaaatcgctgaaaatgctggtttggaaggctctgttatcgttgaaaagatgaaggaacaaaagccaggtgttggtttcaacgccgcaactgatgaatgggttgacatgatcaaagctggtatcgtggacccaactaaggtaacgcgttctgctttacaaaatgccgcttctgtttcagcccttctcttaacgactgaagccgttgttgctgaaaaacctgaagaaaatgcaccagctgcaccagccgcaccaaacccaggtatgggcggtatgatgtaaacaaatcgtaacattaagcacttactcggctgagtaagtgcttttttagtgctgttagggtgtgaatcaactagaataaaggtattgatttatccatattagagcggtaggattagtcgttaacgcaaaatgtgggtgcggtgaagcacccgacatttaactggtagtatttggcagggtaaagtagtagaatctactttgactcagtttactttgggataattattttggaataaaggagttattatcatgtggcgttatttaaagcggttagttattgggaaaccgttaaaaaccatggacgagggtgggcaagcactcaccaagttcaaggcactggcgctgctatcgtcagatgcgctatcatcggtggcttacggtactgaacagattacgaccgttttgattacactttcagcggccgcgttgatgtatcaattgtacgtggcggcgcttgtgttagtgctgttgtttgctattacgatgtcgtaccgacaaattattcgggcttatccatctggcggtggcgcctacgtggtggcaagtacgaactgggggcggccagccggattagttgccgggggatcactgctggttgattatatgttgaccgtagcggtttccgtcacttctggtactgaagcaatcacgtcagcgattccggcgctagctaattatcaagtattgattgccgtactgattgtcatcgccatcatggcgttaaatttgcgtggaatgcgcgaatccgcatcattcttaacgtttcccgtttattttttcattattatgattatcggcatgattctatggggcgttatgaatattgcgagtggtaacttaacttaccacgcctccgcagcagttggagcaccggttcaagggatgaccttggtgctgttcttacgggccttttcttccggttcgtcttcgctgactggggtggaagcaatcagtaatgcggtgccaaacttcaaacgaccgaaacgcaagaatgcggcgaacacgttagcaattatgtcattagtcttggccgtcttctttggtggtattacttatttaagttattacttaggcattaaaccacaagtagacaataccgtcttgtcacaaattgctacggcggtctttggtcacggcttattctactacttgttacaattatcgacggcgttaattctggccgttgcggcaaatactggtttttcagcctttccaattttagcttataacttggctaaagataaatttctaccacatgcttacatggatcgtggggaccgcttgggctactccaatgggattatctcattggcggtcggggcaattgcgttgatctttatctttcatgggaagacgacgcttttgattccactttatgcggtgggggtctttgtcccatttactttgtcgcaatctggtatgattattcattggttccgcgaacgggggcaatggtggtggatgaaggcggcggtaaacttacttggggcgttgatttcgattctcctagtgattttcctattcttgctacatttcggcaatgtttggccatacttaatcgttatgccactcttactgtacatgttctaccgaatccacgtgcactataaccgggttgcggcccagttacgcgtggttgccaaggaaaaagcggcgattcatgattatgacggtgcaacggtgatcgtcctcgtctcgaatgtgacgcgggtaactgctcaagcagtcaactacgcgcgatccatcggagattacgtcattgcgatgcacgtgtcctttgatgagaaccctgaaaaggaacacaagacggcggcagagttcaaagagaccttcccagacgtccgtttcgtggacatccattcgtcgtatcggtcgattgcaaccccgacgttacgattctgcgatgtgattgctaaacgagcagcggaacgcaacttctcgacaacggttcttgtcccacaattcgtgccgaagaaaccatggcagaatattttgcataatcaaacgagtctccgattacgagcggtattaaattctcgtgaaaatattattgtttcaacttataattaccatttaaaagaatagtgacttagtattgaaacccggtatagctaccgggtttttatttttgtgtcataatatgagtaactaaggttataatttagatacttaatcagcccagtgaccggcaaatgtgaacgaattgtgttgcctttactaagttttagtgaagcgagttgtcaagcgtcactgggatttgtataattatcgtaatagagtgagaagggagttacgcacaaatgatcagatttgaaatcctagtaagcctagtggcgaccatgatactttctgcgatcttgacgccgtttgtgcggaaacttgcatttaaaattggtgccgtggataaaccaaatgtacgacgggtcaataaaattccaatgccgacaatgggaggcttggctatttttatctcttacaccgttgggacgactgtgttgtatctcatgcaccagtttcccagtcgcatttttttcgcactactcggtggtgagctgatcattattgcgactggtgttatcgatgatatttatgagctaaaaccacggcaaaaaatgttagggattacgttagccgctttggaggtctactttattggtggtatccgaatgacgactttcacgttcccgttgctggggctgattcactttcagtggctgagtttaccggtgactttactgtggatactggctatcacgaacgcggtgaacttaattgatggactggatgggctagctaccggtgtttcgattatttcgttgagtaccatggggatcatcgggttgttcttcttgaatgctaatatgttcgtttcgttgttgatttttactttagttgcggcgatgattggctttcttccgtataatttctttccagctagaatttatctcggtgataccggttcgttgtttatcggctttatgacggctgtgttctcattatttggattgaaaaatgtcaccttaatctcagttggtattccggttatgatcctgggagtgccaattacggatacggtgtatgcgatgattcgacggatcctgaataagaagcccatttcgcaagcggataagcatcatttgcaccaccgcttgatgcaattaggattgacccatcgacagactgtgatggtaatttatgggattgcacttattttctcatttatttcattgctctatccgatctcatctatttggggttctgtgttattgacgattggtttattatttgggctagagttattcgttgaagcaatcggattagctggtgacaatcggcaaccgctactggattggatcaaacggaccgtcgcgcgtttgacctccaagagtaatcattaaaaaccaaataaatcattgaaaattattaaagtgttacaggcatctaccgtgtgattagcggtgatgcctgtttttagttggtcatcagttggttcatcaatcttaactttaccaaaactatacaagcaatttacacaatcgtcattcacaatttacaaacgattagtaatattaagcatgttccgaagcaatcaattacgtgtaaccgtcggacggtgatgttgctccatcactagtcgtagcactcctacccagttttgctatgatggttgccgggttggttgcttaattttgatagtcaattgaagaaggggagtttcaattatgaaaaaagcactgacactcggcgcattagcagtaacgatgaccattttactagctggttgcggcagtagctcagccacaagtacgaagagtactagtagcagtagtggtagttccaagactactaagatcgttgcaactggttcaaccgctttacaaccattagtggaacaggctggacaggcttaccagaacgaacatgctaacgtgaccattaacgttcagggtggtggttcaggagcaggcttaagtcaggtggcgaagggttcagtcaatattgggaactctgatttatttgcacaggaacaaaaggggttagacgccaaagggttagttgaccataaagtggctgttgtggggatggcacccgttattaataaggatgccggtgtcactaatatttcaaaagaacaacttatcaagattttccaaggcaagatcactaactggaaagatgttggcggtaaggacgaaaagattaccgtcgttaaccgtgctcaaggtagtgggacccgggcgacgtttgaaaaatggggattagacaacgcgaaggtcgcaactagccaagaacaagattcgaatgggaccgttcaaaaaattgttagcaccacgcctggtgccatcagttacttagcattctcatacgttaagagtgacgttcaggcgctttctattgataacgtcaaaccaaccgaagctaacgtagcgacgaacaagtggaagatttgggcttatgaacacatgtatactaaggggcaaccaactggggagttgaagaacttcttaacttacatgacttctaaagccgttcaaggtagtttagttgagaaattaggatatattccattgacttcgatggaggttgatcgtggccaatctggtgcaatcactaatttaaaataaataacagacaaaaagtcgagcgatagctcgactttttttatgggccgcaattagtgcaacgcggactttaacaatgaaaaaacaaatcatcggctcaagtgctgggtgttattgttaagacgagttggctgtttcgattttgactgccaatcaaagtttgtgaggctcccaattatatataaccagcaatctagttgccaggcgtagtgaccggaatttctgtaaattgttcaccttgctccgaaaaggtaacttgaccgctcaagaggttagtgatgtcctgctgaatcgttgcaatttcggattgagtgactgcgatgatttgtgtgacttgaacaccgtagtcggtattcagagtcgttagcttattttgttgtaaatagtaggttaaagcatcgacgttacgatagtcgagcgtgatggcgatgcgggtttgtaagattcgctgaaccttaccactgacttcaattgcttgcgcgggggtgccattataagctcggatcagtccaccggcgccaagcttgataccaccaaaataacgggtcacgaccgcaagcacgtcgtgtagctcgttggtcttgagcacttctaagattggtgagcccgcagttccgaccggttcaccgtcatcactcatccgctgaatatgatcatcatcaccaagcatgtaggcgaaacagttgtggttggccttaggattatctgctcgaacagcggcaatcttagcttgagcatccacttcgtcactgatgcggtatagatgagcgatgaagcgagactttttgatggtttgttcaaataccgtgtcttgggtgatggtgtagtagggtttagtcaaattaatcggttcctttcgtgaataaatcgttaaatggcgtacttgataactaaggaggtgcgcacaatggaagcacaagtcttatatggtcgtcagctcgcattatctgcaaatgaggctgccgcagtacctgctggcacgcagatactgccagccatgcaggttgatgaacatcaaattatctgtcagcgttgcggcagtcacttggaccgactgcgagcccaattacccaatcagcaatattactgttatcaatgtttaaatttaggtcgagtgagtacactagttaaactctatcatatgccagaaccgaatgcttttgcaacggtcccggtttgcacgtggcaaggaaccctaacgccccagcaagcggactgcgcgcaatcaatcaaagctaacttcatggcgcataaacggcaattattatgggcggtgacgggagctggaaaaactgaaatgctgtttccaggtattgcgtgggcgttagcgcatcagtggcgggtcgccattgcttcaccacgagtcgatgtttgcttagagttagcaccccggctccaggcggcctttgctgatgttcaaattgctgtgctacatggccgcaatcccgctccctatcagtatacgcagctgacgatttgtacgacgcatcaattgctacgttttcgtcaggcgtttgacgtattgatcattgatgaagttgacgcgtttccgtttgctgccaatccccgtttggcgtttgcagtgaatcaggcagctaaggtggagggggccattctttatttgaccgcgacgcccagccaaagtttgttgtcccaagttcatcgtggtgagcttgcaatcagttatttaccattgcggtttcaccaacatttattaccggcaattaaggttaagctacagccaaattgggctcggctcttgcaacaaggaaaattaccacgagaccttatccggcaactccaacagtatcaacaacagcaccagcgctttttactatttgtcccgcgcatccaacaattagcgccagtgtttgcggtactccagcactattttccccatatgaccggagagacggtgtactcagccgatcctgagcgactgactaaggttcaacaaatgcggaaccagcagtttcaatacttagttacgacgacgatattggaacgaggggtgacgtttccgggaatcgatgtgattgtgcttggtgcggacgacgaagtgttttctacggctgccctcgtccagattgcaggacgggtcggacgcagcagtgagcgtccgactggcctcgtctggtttatttgtcacagtcatagccgcaatatcaaacgcgctcagcgccagattcgggtgatcaatcgaaaggggcgacaattacgtgctagcatgcctactgtgtcacaacattatcacgactaagtttacgttgccctggattcttagctggcagccggttatgcggccggtcgtctgctcggtttgttggcggcaatttgtacgcatcgatcgggcaacggcatgttccaaatgtggacgtgctcaaaagcgaccgcaaccgtgtacagattgtcagtggtggcctgaaatcggtccctttcataacgaggcgttgttcgaatataatgatgcgatgcatgattattttcaacgctataaatttcagggtgattatcaattacgccaagtctttgcgaagatcatgcaacaagcagtggtacaacggtgtgctgagatatgcttagtggtgcctgtcacgcccacaacgttgcaaacacggggctttaatcaagttgccggctggttagccgcacccatcgcgcccgggttaatgacccaggcaacagcgaagtcagtgccacaatctaagaaagaccggcaagcgcggttgagaacaccacaaccattcaagatggctcctaatacgattttggccggccggcgggtattattagtagatgacatctatactaccggccgaacgatgcgccacgcggcaacgctacttttggaaaacggtgccaagagcgtgacggggctaacactagcacgttaatttcgagggaaagtggtatttggattgtttattatagcgctttctattataatgaatttaagcaaagtaattaaagagtggtcctttaattactttgggtacacagcaatgtgtgtgaagggagagaagatctatgctaaattttaatattcgcggtgaaaatatcgaagtgacccaagcaattcgggactacgttcaaaaacgggtgggtaagttacagaagtactttgacaataatgttgactcaattgcccatgtcaacttaaaagttcacccagacaagacggctaaagtcgaagtcaccattccacttccctatttagttctccgggcagaagaaacttctcctgatatgtatgctagtgttgatttggttactgacaagttggaacgccaaatccgcaagtataaaactaaggttaaccgcaaatcccgtgaaaagggttataaagcgattgattttgcagcgactgatgaaacagttgccgctgccgacaatgatcaggacgataagttagacgttgtacgtacgaagcgagtggctttaaagccaatggataatgaagaagcgattctgcaaatggatatgctcggccatgacttctttatctacgaagacgcggaaacggacgcaattaacatcgtctatcggcgtaacgatggtcgttacggtttgattgaaaccgacgacaatcactaattttaaaagcgcaacttatgaggactggtcagttgaccagttctttatttttatcccggaacgcccgtataacatattgtgatcatgagagtgacttagcccgcgttagtaagctgaagttcgactcacggcacgtttttgccagcgactcaagacagttaagcaaatattgatagaattaaagaacacgggtcagtgattgttgggctgtggttaaagactaatatttagttaaggatgtaaataaaacggtcgacggtatcggttacataggggcctgtggttttcattgctagtaaataatggtaaaatgacagatggtattttattttgaaatggacaattgaaattaaaattaagattaattatttggagaggatacgtaaatggccaacattttaaaacgctgggttgaaagcgacaagcggactattcggcgtctggataagattgctaataaagttgaagcttatgccgacgaatacggcaagttaagtgatgctgacttgcaagcgaagaccccagaatttcgtgaacggtacaaggagggcgaatcgctcgacgatttgctgcccgaagcatttgcaacggcgcgtgaaggtgcgaagcgggtacttggtttatacccattccacgttcaaatcctcggtggaatcgttttgcatcaaggtgacattgctgaaatgaagactggtgaagggaagaccttaacggccactatgccagtttatttgaatgccatctctggtaagggtgttcacgttgtaacagttaatgaatacttatcagcgcgtgatgcgactgaaatgggtgaactgtataactggttagggatgagtgtcggaatcaacggggctgaaaagtcgcctgaagaaaaacgtgccgcttataacgccgatattacttattcgacgaacggtgaaattgggttcgattacttacgtgataacatggtggtctaccgtgaagacatggtgcaacgaccacttaattttgccatcattgatgaagttgactcaatcctgattgatgaagcccggacaccgttgatcatttctggtcaatcagaaggtacaacgggaatgtataagcgggctgaccgttttgctaagacgttgacgaaggatgaagattacaaggttgacttggaatctaagacggtcgcattattagacgaagggattcggaaggctgaaaaatactttggcttggaaaacctttacgatactgataatacggcgttgaaccattacttggatgaagctttgcgtgcgaactacatcatgttgaaagataaagactacgtgatttcagacggtcaggcgttgatcgttgattcctttacggggcggatcatggatggtcggcgcttctcagacgggttacaccaagcaattgaagctaaggaacacgttgagattcaagaagaaaccaagacgatggcgaatatcacgtaccaaaacttattccggatgtacaaaaagttatctgggatgactgggacggccaagacggaacaagaagaattccgcgaaatctataacatggaagttattacgattccaacaaaccgcccgatgattcgtgatgaccgttcagatttgctttacccaacgttacaaagcaaattcaacgcggtcgttaaagaaatcaaacaactccatgaaaagggccaaccaatgttaattgggaccgttgccgtggaaacgtcagaatacttgtcgcatcgtttggatgaggaaaacattccgcacgtggtcttgaacgccaagaaccatgcgaaggaagctgacattgttgcaaacgccggtcaacgtggtgcggttaccattgccaccaacatggctggtcgggggaccgatatcaagttgggacctggtgtcaaagaagtcggggggctcgccgttattgggactgaacgtcatgagtcccgccggatcgataaccaattgcggggccgtgctggtcgtcaaggtgatcctggtatgtcacaattctacctctcacttgaagacgatttgatgctacggttcggttcagaacgaatcaagaacttcctgcaacggatgaatgttgaagatgatgatgcggttattcaatcacggatgattactcgacaggttgagtccgctcaaaaacgggttgaagggaacaactatgactcccggaagaacgttctacaatatgatgatgttatgcgggctcaacgtgaagtgatttacggcgagcggcaacaagtcattatggaagaaaaatctttaaagcccgttatcatgccaatgatcaagcggaccgttgaacggaccgttcagttacacatgcaaggcgatgccaaggactgggatttagatgcagttgttgactttgcccaagctgctatggtgaaggaagattcaattagtgtggctgacttgaaaggtaagtcgccagcagaggttgaagcttacttgatggaccgggtcgataagatttatgcggacaaggctaaacagctttacgatgcgggtcagatgctagaatttgaaaaagtcgttattctgcgagtggtcgattctcattggacggatcacattgatgcgatggatcaattacggcaatcgatcggtttacggggctatggtcaattgaatccgttagttgaatatcaacgagacggttaccagatgtttgaagaaatggttgcggatattgattatgatacgacgcgactcttcatgaagtctgaaattcgccaaaatattcagcgttaaaatttaacgttagtgctagcgagtctaagactaaggtcttaggctcgttttacagttaaaccagatattaaataattaataaataagttgaaagaagggtcctttgtggaattaagtgaatataaacacctgattgaagaaatgcaaagtgctgtcgacgactttagggggtcgctttgacttagatgctttgaacgaaagcattcaagaaaatgaagctcgaatggccgaacccggtttttgggacgaccaggctgccgcccagaaagtcatcgatgagaataacgtgttgaaaggaaagtatgatacgtttaagcaattagctgatgaagtcggtgacttggcagtcgcttatgagttactgagtgaggaacccgatgctgagatgcaggctgagtttgaaacggactttcagcacgctgaacatgatttacaacagtaccggctcaacttacttttggacggtccgtacgaccgcaataatgctattttagaaatccatcccggagctggtgggaccgaatcccaagattggggtgcgatgctactaagaatgtacacgcgctgggctgcgagtcacaatttcaaagtcgagactgttgactaccaagctggtgatgaggcaggcattaagagtgtgactttattaattagcgggcacaatgcttatggttatttgcggtcagaaaaaggggttcatcgtcttgttcggatttcgccgttcgatgcggctggtcggcgccacacatcttttgcgagtgttgatgtgatgcctgagttagatgataccgtggatgttgatattcgacctgaagatttgaagattgacgtttatcgagccagtggggccggtggacaacatgtcaacaagacttcttcagcggttcggattacccacgtgccaacgggaatcgtcgttgccagtcaagcacaacgttcacaattacagaaccgacaaacagcattgaacatgttgcgagcgaagttgtacgaacgtgaagaagagaagaaggctaaggaacgggcggccatccaaggtgagcaaatggacattgggtggggctcacaaattcgctcctacgtttttcatccgtatacgatggtcaaggatcaccggactaattatgaatcacatgatggtcaggctgtcatggatggtgatcttgatccgtttatggatgcttacttacaatggaaattagcccaacgtaatccgcaatagattgcacaaatactaaggtgacctatcattgcgcaggtcgtcttagtatttttttggctactagtcttataatatagagatattaaagcggtaatagcaggactgacggaattgaaacggcgttggtctccttgggcaaaaatgctatactaacttcagagtttaacgttaggggtcacgcacatgcaggtattaaagatttttgaattgtttcttttacaaccgctagtttggttaggattgctgcgtagttatttaaccgctaaacggcgggtgaagagtgaacggcagcattttcagagtgctatcaacccacaattagttgaagtccaccactttttagtggatggctgtttactaggagttctaatgacaattattagcttggcattgggattagtggtggcccccatctgggtggttatatacgaagtagtggcggccattagcttgatcattattcctggtgcactggtaccagtgaccgcttttggcctcagctggttagtttattggattatgagcccggaattaacgacggtggggggcgctttacaacggcacggtgttgccatgaccagtatgagtggcaatttggtggtgaacggactattgttattagccatcgtgctggcggctacggcggtcttgttacgacactatgattatgagggccgttcaccgcaactacagcccgaccaacgtggaaagcgacttgttcgttaccagtggcaacaattgttggtcttaccagttggggtactggtccccggtgattggttacacgcaactatcagttggtggcctgtgtttatggttggcgagcgctccttcagcattttattgttgcctttattagttgggacgagtgttcgcgtttataagcagctgccacaaattgcatggcggcagttagcggcccgctatggttgggtaacactcgcgagtgttttggttgcaatcattgcccgttttgcagtgctcagcccgcagtggttgctagcattgatgggattaatcgttgtgctaacttggggaatcttagcacagcaccgttattatgatcgacaccaacagtttcgatattctgatactgaacaaggtgtgcgggtgattgggttacgcccccacacgcccgcggataaattaaatctcgatttaggagatattatcttggaatgtaaccggcaaccagttaatacggaagctgaattttacgcggccctactgaaaagtccgacgtatgttcacctcaaagtgcgcaatcggcaacaggaattaattattaccgaaacggcgatctataatggcgccccacacgagttaggaattgtgttattcactgatcaggaggattaatgaccatggataagattttagtggtagacgacgaaccagctatcgtcacgttattatcatataacttgaagcaggcggggtacgaagttgtgacggcgacggatggtgcggacgcgttgtcattaggcctggcccaatcatttacatgtattttgttagatttgatgttgccgaaactcgatggaatggaagtaacaaaaaagttacgacaagaaaaggttcagacgcctattattattgtgacggctaaaaatgatgagtttgataaagtgttcggcttggaattaggtgcggacgattatataaccaagccgttttcaccccgcgaagtgctcgctcggatcaaagcagttattcggcggacaacgccggacgagcccgtgacaccaccggcacccatgccgcctgctaatcgtgcggtaatgcttgttggtgatttacagattgatcaaaacaaataccgagtcgcgcgcaacgggaaaaatatcagcttgacaccaaaggaatttgaattacttgtgtattttgttgaacgagaaggtcgggttctcagtcgtgatgcgattttaaatcacgtctggggctacgactatgctagtgagacgcggatcgttgatattcacatctcacatttacgtgaaaagattgaagcagattccaagcagccacggttgatcaggacggtccggggttttggctacgaatttgtgggtgacggccatgcataatcgctggcaacagacgacacggttattgctcatggaaaatgtgttactggttttgatcgtgttggtcgtgttgcagcacttttcgccaattaagtggtcctggcgcctagtcggttgtttagttggtgcttggctggttttggcagtaatcgagggcttgatcgcttggcggcaacaaagtgaacggcagcgcacgatcgaccgtatggaagctaagcttcgtcagatgagtagccagcaatttccaccacatatcttattgccacaatcggaccccttatacagcctagcacaagcggtcaaccagttagagagttatcaaaaaagtcagacgcgccgtgcggaactgcaagaaaaagagttaatgatgattatgcggtacttgcctgtgggagtgatggtcattgaccaccggcgacaggttcaactgtctaatccggcgatgagtgaactattgcaagtctcggttaatacggtggcccacatttataccaaggatattcagctgtacgcgttgactaaattgattgaagatacgattactagtggcaaaaatcaacgggcaacgattacgttgactccagcgcctaacacgcaggttgtcgaggcttcaaccgtttatatccaaggcaatcgttcacaatttcaaattgtcctgatgttgtatgatatcactgaagtctatatgattgaacaaatgcaggatgattttgtcagcaacgctagccacgagttgaagacgccgattacagccatttccggtttcactgaaacgttgttaagtggtgccaaggatgatccggacacgcttgaccaattcttgcatattattgcggatgaaagtcaacggttgattgatctcattcaggatgttctgtcgctatcgcgaattcgtgctcagaatacgacgatgttaaccttagttccgcttgctgttcgaccattgatcgaacaggaactggctgtagttcagcaggcaatcgaacgtcagcacttaacgatcaataaccaagtcgatgctgatctaatgataacgagcgattcacagaagttgagtcagataatcaaaaatctgttaacgaatgcaatcaagtataatcgacctcatggtagcgtgacgattgccaccatggtcagtcatcaaacgtggtcgctgatagttaaagatacgggcattggtatcagtgccgatgatcaacagcgtatttttgaacgcttctatcgggcgagtccgtcacgttcacagcaacttgtgagtgggactggactcggattagcgattgttcaagaattggtcaacacaatgcacggaacaattgacgttgtcagtcaacggggcgttgggacaactatgacagttacattgccactagctgcgagtgcttccgagcagtagtaaggcgttaagcatacggacagttctgattgtaactggtggtctatcaaatgatgacgtggtgacggtatgagttgcattgctgagtcaaaagatgtcattagttgagcattgaatgtgtcgtaattaagccagacgaattgataacgatttttaaggtaaatgtaaaccttgaaaatcgttttttttgtgcacttttttaattttcctttcatattgggggctaaaagccggtaataattaaaaatatatcgacgtttacacaatctttacaaaactcatataaagcatttacacaaactttgtattattgaatatgagcaatgggtaggaggtatatagttatgagaaaaagtcgggtcatccaattaatcgtgttaatcgcgatcattggactagttggattagggtacacacatcgcgatcaaactagtgccagtgaatcaattaccgcggttggatcaacggccttacagccactggttgaagcagccggtgaacaatacagcagcaaccataccggtgtgtttatcaatgtgcagggtggtggctctggaacgggactcagtcaaattcaggcgggggccgtggcaatcggtaattctgatatttttgccgaagaacagtctggcattacagcgagcaagttaattgatcaccgggtagccgtcgtcggtattgcccccatcgttaataaaaaggcgggcattaccaatttgacgcagcagcaactcattcagatttttactggcaaggtcacgaattggcgtgaagttggtggacgtaatttaccgattacgttaattaaccgtgctcaaggctccggaacccggaagacatttgagcgatacgccttaaagggtaatcagagtgttgattcccaagaacaagattcgtcaggattagctcggtcaattgttgctagtacacctggcgcaattagttatgtggctttttcttacttagacaactcagtccagaccgtcaatgttgatggtattcggccaaccgaaaaaaatgtgcggaataatcgctggtacatctggtcctacgaacatttatatacggggaagcaccccaatcagttaaccaaaaaatttattgattacattttatcaaccgctgttcagcagaagttagtcaagcagttaggttatatttcggtccatgacatgcaagtacagcggaatgcggccggtaaagtttcagttatgaaatgagggagagcgcatggataaaattcgagaaagcttattaaaaaaatcagttgctagtaaaattgaacggcgtggtaaggccattagtctagtttgtctagcgctaattgtcgggattgtctttttgattttctactttgttgcatcacgggggttagcaaccttttttcaaaatcacattaatctatggcaatttctgagtgggacgcagtggaaccccggaacagtcggaacgaatggacaaccagctgtgggggcactaccgatgattgttggatcgtttttgattacgattctttcggccttcattgccacaccgtttgctatcgggacggcggtctttatgaccgaaatttcaccacggcggggggcgaagattctccggccagttacggaactattagttggtattccatccgtagtgtatggatttatcgggctacaagttgtcgtaccgtttgttcgtaatacgtttgggggtagtggctacgggattctttctgggacctttgtgctatttgtcatgatcttaccgaccgtgacgtcaatgacggcggatgcgctgaattcggtaccccgttattaccgagaagcctcgctagctctaggggcgacgcgctggcaaacaatttataaagtcgtcctgcgggcagccattcctggcatgctgactgccgtcgtatttgggatggcccgcgcctttggggaagctctggcggtccaaatggtgattgggaacgcgacgttgttgccgcataacctagtttcaccagccgcaactttgacaagtatcttgacgatgggaatcgggaacactgtcatgggttcattacaaaataatgcattgtggtcattagccatgatcctgttattgatgtccttagtctttaacttagtcattcgctacattggtcgaaaggggaaattaaaccatgaacgctaaacgcatcgataaaattgccactggcgtgctatacggcgtcgcagcctttgtggtcatcatcttagttgccctattgggatacattctgatccaaggggtgcccaaaatttcgtggcattttttaacgtcgccggccctggcttttgaagcgggtggtgggattggcattcagttgtttaactccttctacttactatttttagcgttattgatttcattaccgatttcactgggtgcggggatctatctaaatgaatatgcgccgcaaaatacggtgactggcctgattcggacgaccattgaaattctgagttcattgccatccgtagtcgtggggctgttcggatacttgttctttgtagtgcagttcaagttaggcttctcgattctttccggggcgtttgcgctgaccgtgtttaacttaccgattttaacccggagtattgaggaagcactcgccaatatctcagataatcaacgggaggccggctacgcgttagggctatcacgttgggagacggtgacgaagatcgtggttcccgctgccttaccaagcattttaacgggggtcgtcttgagtgccgggcggatctttggtgaagccgcagctttaatctacactgcgggtcaaagtgcaccagccttggactttggtaactggaatccatttgatatcagtagtccactcagtccactacgtccagccgaaacgttggccgttcatatttggaagatcaactcagaaggaattatgccggacgcgaaagccgtttcggcgggggcttcagccgtattaattattgcggtattgctctttaacttcttagctcgttggcttggcaaacgcttgtacaaacacttaaccgctgaataaaggaggccgttttgatggcagataacacaatgacgacgacacaacgtaacatcatggcgtttgatcctaaagatcatgaaatcgcgctttcaactgaggatttacacgtcttttatggtaaatccgaggctatttcagagggcgatttacagtttgaacgttataagattagtgcgttgattggcccatccggttccggaaagtcaacctacttgcgttcgctaaaccgaatgaatgaccgtattgcaacggttaagggcaaaattatgtatcgcggcttagatattaacagtaatgatattgatgtctatgagatgcgccggcacattggcatggtgtttcaacggcctaatccgtttgccaaatcaatctatgagaatattgcttttgcactccgccagcgcggaatgaacaagaaacaagacttggatgaaattgttgaacggtctttacggcaagcggcgatgtgggaccaagttaaagatgacttaaataaaagtgcgttagctctgtctggcgggcagcaacaacgactctgtattgctcgggcaattgcaatcaagccagacattttactgctcgatgaaccagcgagtgctttggatccagtatcgacaagtcaaattgaagatactttgttagaactaaagcagaattataccattattattgtgacgcataatatgcaacaagcatcgcgaattagcgactataccgcgttctttaacctcggcaaagtcctagaatactcagagaccggtgagatttttaccaatcctcaggttgatctgacgaatgactatatttccggaaactttggataggaggaccgttcatgagtacaattttaacgaccgagaacttatcattattttatggtaaaaaagaggccctcaaaggaattaacattgattttgatgataaaggaatcacggctttgattgggccctctggctgtggtaaatccacctttttacgttgcttgaaccggatgaacgatctgattcctaatgtaacgatcacgggtgaggtgaacttcaatggtcacaatatttatgcgcccacgaccgatacggttcaattgcgtaaagagatcggcatggtgtttcaacagccgaatccctttccattctcaatttatgagaatgtcatttacgggttacggttgacaggagtccatgataaagaacgcttagacgcggcggtagaaaaaagtctgaagcaggctgcaatttgggatgaagttaaggaccggttgcatgccaatgcgctatcattgtctggtgggcaacaacaacgggtttgtatcgcacgcgtcctagccgtcgaacctgatattatccttttagacgaggccactagtgcacttgatccgatatcgagtcggatgattgaagaaaccctattgaatttgcgccaggattacactatcataactgttacgcataacatgcaacaggcgtcacgaatttctgaccgaacggcgtttttcctgaatggtgaattaattgaggtcaacgacacgaaacagattttcatgaatccagttaaacaggaaaccaatgactatatttcaggacgatttggttaggaggaaaaaaacatgcgacgactttttgatgatgaactaaacgatattgatgcaaacttcactgaaatgggaatgatggttagcgagacgattgaaaaggcagtcaaggcgtttatcgaccatgaccgcgacctcgcacaagaaatcattgataatgatgctaaaatcaaccaacgggaagttgaactagaacagaaatcatttgagatgattgcgttataccaacccgtcacttctgatttgcgagaaattgtcaccattttgaaagccgtctctgaattggaacggatggccgattatgcacgtaatattgctcacgctacgattcgggtcaaaggaaatgtgcgcgtccctgaaattgaggcagcgttatcagaaatggggaatcgcgtgcgaaagatggtcgaagagatgttggcagcttacgtcaaaagtgatgatcaggaagcacgccgggtcgcagctaaagacgcaaaagtcggggagatgtatgatcgtattaatgagaaggggatctccaagatggagcgccatcctgagacggtcatcggttccacggattacctgaatgttgcaacttacctaatgcgcatcggggcgttagtaactaatattggtgagtggatcgtgtatttgaatactggtgagattatcgaattgaatccagaaagttctaatttagtgtaactaatcataaataattgcttaaagccggtcgtctagtttgcaaccggcttttacaattagtaagatatggttagataaactgataaggagcgtctaacgatgaaatcaaatacaaaacaaaagttaactaaatctaataatcgcgttttcgccggcgtcctcgggggcattgctgaatatttgaactggaatgcaacgattctacgagtactctacgttattttaactttggttacccatggctttggtgttttggtatacttagtattaatgacaattatcccaagtaaaccagacaatacgggtttcttcgaacagatgcggcaaagtaccggtactcaagctaaaccgcaagcgcatgggcgcaaagagattcataacgttcatgaagaggatgatccgcgtcactaagattaatggagtgattatacagtgggcttttggaaacgaattttaatcaatacaatcttatttattgcgattgctggcttttttcagagcagttttcacgttgcaagtgtgtggatggctttaattgccagttttgtgcttgcaattttaaacgccgctattaagccgtttttgctgttattatcgttaccgattacgttattgacactcgggctattcagtattgtcatcaatggttttatgcttcagatgacatcctacgttgtgggtaaggccaatttcggcttttcgagttttggcatggcgatggttgtttcgattctcatgtcaattgctaacgtgattgtttccaactttttcgcgaaagacggcgttgatggtgaataaagcgctttaaagtgctaagattagaagatagaaataatccgttttcagtcataaaagtgtggccgcttgaaagggtagcgtaatggcgcgactggacaacgcgggccacacttttttattagtggaacaattaggagggattcttttggcaggaagtgtaaccgttgccgatttggtgaaaaatacgcgcctggatgtgtatcatggcgctgacttattagaaaagaaagatattacaacgagcgacatttcacgtccggggctggcgttgaccggttacttcaactactatcctcgtgaacgagtgcaattgctaggtaaaactgaaaccgcttattcgaaaaatatgagtcatgatgaacgactgatgatttttcgtaagatgtgtcagttaaccacacccgcgttcgtcatttcaacggggttacccgttccagaagaactcgtgcaagccggtgaggaaaatggcgtgccgattttaggaacgaaaatgacatcatcacggattctaagtaatatgacgaattacttggaaggtaaattagctgaacgacaatctgtccacggggtattagttgacatctatggattaggtgtgctgattactggtgattccggtgttgggaagagtgaaacggccctggaattagtcaaacgggggcatcgtttgattgctgatgaccgggtcgatgtctatcaacaggatgaacaaacgcttgtcggtgaagcacccgcaatcttgaatcacttattggagattcgaggtatcggaattattgatgttatgaatctttttggcgctggggctgttcgtcaagataccgacattgaccttatcgtgcaccttgagaattggacgcctgataagcaatttgatagactaggaaatggagaacagaaccggaaattctttgatgttgaagttcctgaaatctcgattccagttaagactggacgtaacctagcaatcattatcgaagcagcggccatgaactttcgggccgagagcatgggctacgatgcgaccaaggtctttgacgataacttgaacaagttgatcaaaacgaattccgtgcatgattctcacaagtaataaggagatggcagtagcgtgaataccgttttaggggcacttaacccaattgcactgcggttaggaccaattcaggtccattggtacggcgtcattattgctagtgccgtcgtcattgcggttgcactagcagtacgtgaaggtcagcgacggggtgttcggcccgatgacatttacgatatgattttatgggcacttccgtttactttaattgcggcgcggacttactatgtgattttccagtggtcatattatcgtcagaatcccggtgaaatcatccgtatctgggatggtggaattgccatctatggtggcttgattggcgccggaattgtggtcattttattctgtcggtcacgctttatcccaacttggctaatgcttgatattgccgcaccaacggtgattatgggccaaggtattggtcgctggggtaactttatgaaccaggaggcttttggtcgagtgactagtctgagtttcttacaaggcttgcacttacctgattggctgattaaccagatgtatatccgtggcgcgtatcggcaaccaacattcttgtatgagtcggtatgggatctattaggatttgccttactgatgctcacgcgtcatcgcacacattggtataagcagggtgatgtcttcttgacttatgttgcttggtacgcctttggccgcttcttcacagaagggatgcggactgactcgctcatgctatttaacgttattcgggtctcacaagcgttgtcagtggtactgttctttggtagcattggcttaatgatctggcgccggcatcacaatccgaataatcgttggtatttagcgggttctggtcaaaaggttgtcgcagaaaataagtagattagagggttatttgaatgataaaaaaaattgccgttttaggtgctggctcatggggtagcattttggcaaatctgttggatgaaaatggccactcagtgcggctctggtcgtactcaccggcccaagtcacagaattaaatgagaaacacacgaatgagcgatacgttcctgattttaaatattcagaaacgttgactgcttattctaatctaacacaggcgattgatggtgcggatgtaatcttgtttgtcgtaccaaccaaagcgattcgcgaagtggcccaacaagtgactgccgtgcttgccaagacccatcagcggccgattattgtgcatgctagcaagggactcgaacaagagacacacaagcggctgtcgcaagttttggcagaagaaattcccaccgaattacgacaagcgatcgttgtcttatcgggccctagtcatgctgaagaagtggcccgccacgatattacgttgattacggcggctagcgccgatgaatctgcagccgaattagtacagcaactcttcatgaatgactatttccgcatttacacgaataccgacgtggttggtgttgaactaggtgcggcgctcaaaaatatcattgccctgggtgctggtgcgctacacggcctgggctatggtgatgacgccaaggcagccttaatgactcgtggtttagctgaaatcagtcggctcggagtggcgttgggcgcagagccgttgacatttatcggtttatccggtgttggcgatttaattgttacggcaactagtgtccattcgcgtaactggcgcgctggtaatgagttaggtgctggtcaggacctcaagacggtgattgataccatgggcatggttattgaaggtatcccgtcaactaaagccgcttacgagcttgcacagcaacaaaatatcgaaatgcccatcactgaagcgatttatgatgtattatataagagtgccgacattaaggaagtcattccacaattgatgcggcgcgaggggaaacctgagattcagtaggaatttccaaactaatttcactatttttaggaggatttatcacatgtcaaaagttagaaaagccgttatcccagcggccggattaggaacacggtttttgcctgctactaaggcgatgcctaaagaaatgttaccaatcgttgataaaccaacgattcagttcattgttgacgaagctcgtaaatcggggatcgaagacattgttatcgtcacgggtaagagcaagcgtagtattgaagattactatgattctaacccagaattagaggataacttacgggctaagcacaaggaagaaatgctcaagctggttcaagaaaccacagacattaacttgtactttatccggcaatcacacccacgtggtttgggcgatgccgttttaacggctaaagctttcgttggtgacgaacctttcgtcgtcatgcttggtgatgatttaatggaagacaaagtaccgttaaccaaacagttaatgaatagctatgacaagacacatgcgtcaacgttagctgttatgaaggttcctcatgaggaagtttctaagtatggggttatcaatcctgaaagtgaaaaggaaccgggcctatacaacgttaataactttgttgaaaagccatcacctgaagatgcgcctagtgatcttgctatcattggtcgttacttattaacaccagaaatttttgatgttcttgaaaaccaaaaacctggtaagggtgacgaaattcaattgacggatgccattgatacgttgaacaagactcagcgggtctttgcccatgaatttaaggggactcggcacgatgttggctacaagtttggctacttgaagacgacgatcgaatacgggttaactcatccggatgttaaggctgacttgcggacttacatcaaggatcttggtgctaagttatctaaagaagatagcgccgctcctaaaacaacgaagaaaccaactaaataatacttgattaattaaaacaaccgtgaaatctattaagatttcacggttgtttttagttaactgctgaataattgcgattcactaattaagctggcacctagtggtcggcttttaatttgaataaatggggcttgccataataataaccttggcgtagtgaaatatttaagtcattcgccatttgatcttcggcatcgttttcaacaccctctagaattaaccggatatcatgttgtaccgcaatgtcgcgccagaattttaattgaatgggaatctcgttttcacgatcttcggcccgaaagttttgcatggcgaatttgatttcttcggccgattcgagtagcggtttaatgtggtcgtaaacgttgattcccgtgccaacgtcatcaatgctaaattgtaggccgttagccttgtacttatcaatttgttgttgcatcgccgccagtgtaaacgtatcttcaccgggttcttctgtgacttcgacgataacatgaaccgggaataactttttctgagcatcaatgactgcggcagcaatatcatcatttagaaattgcttgcgattaaagttaattgatactgacccgatttttaatgcaagctcactagccgtagcctttagtaagctgacttgtacatcgatcggaatattatcgaagctttctggtaaggtccaccggtcctgatcagtctcacgatagcgaatcagcatctcgtagccaatcagtgaattattaaatttatctaactggggctgaataaaatagcggtacataagggaactccttagacttgaattaacacgatttgatgcttcctaatacatactataccaaaaaatgaataagtgaaactgtttgacaccatctttttttgcatggtatcgattatcaattgggctaatgatgattgtgctaaactgcttggtgaacaaggtaattttctgaaaatgagtaaaaagtcaattagtggttgcctggcaaagctggtatggacgatattgtgagaataactgcttgccagcgtatcgctgattggtttttaaaagtagttacgtttcatcataacctgtatttatattgactagagttatgtatttgcgcagtaaagcggttataatatacctatggttaaataaataaaattataattgggagcaaaatgaaatgaagattgtaattgttggatgtacgcatgcggggaccgctgcggctgcacaaattctgaaggatcatccggaggctacggtcacgatttatgagcgtgatgacaatatttcattcttatcatgtgggatctacctttatctcgggggaaaggtcaatcacttggaggatatgttctattcgtcaccagaaacgttagccaagttgggggcaatggtcagaaccaaacataacgtgttaaaaattgacgcccagtcgaggaccttacaagtggttgacatgactactggaaaagtgtttggcgatacttatgataaattgattatgacgactggttcaaatgttgcggtcccgccgatttttggaatcgatgagtctaaggtcctattatgcaagacctacagccaagcacaggaaatttaccaaacagcccaagacaatcagcggatcgcaatcattggggcgggttatattggaaccgaattatctgaaagttatgcaaatacacatcatgaagtaacgttattccaatcgcatgatcaaattttgaataattacattagtaaagaaatttcagaccaagcagttcagctattaaaagatcatggcgtgaacgtgctattgaatcaccaagtaactgcctttactggtaatgatgatggtgaacttgtcattgaaaccaatcaaggcgattttaatgctgatctagcaattgtcggaactgggtttgttcccaatacagaactgttacgcggtcaagttgagatggataagcacggtgccattatcatcaatgattacgttcagacctctgacccagatatttacgctgctggtgattcttgtgtcgttaacttcaacccaactgggcgttcggcttatacgccattagcaaccaatgcggttcggcagggtgcgttagcgggggccaatgtttttggtaaccagcaacgatatatggggactcaagcgacatcggccatgcaactcttcgatcacacgctggcaaccacggggttaacactggcaatggcgaaattgaatcatattccagctgaacgggtgacttatgagggcaactggcgaccagcttacatgccaagtacggcgaaactgacgattgaattaatttataatccggaaaatcgtaaaattctcggtgctcagttcttaagtgcgcatgaagtggcacagtctgctaatgcgttatcaatcgcgattcaaaatggaaacaccatcgatgatctagcatttgtggatatgttattctcacctaattttgatgaaccattcaattatctgaacctcgtcgcccaacaagcgattgaacaagaacgccaggcaggccgcaatcacccacgaattacggcctatggcgattgggccaagcaaaatgacaaggatttacaataagaagtaagtcttaccatgggttgaattcaagtgaactggcataattttatttatttaaatctcggtttttagtcaatatatggttaaaagctataattgacttcagttgtgtacaaacaagatagtcgacaaatgtaaattttgggggtatattaagcgtcataggaatttaagtggaaggggtctttagaaatggcaaagagttacgacgtgattattattggtgcggggcctgccggcatgacagccgccctctatgcttcacgagccaatctatcagtgctactattagatcgcggaatctatggtgggcaaatgaataataccgccgcaattgaaaattatccgggcttcaaatctgttttggggccggatttggctaaagacatgtatgaatcagcgacccagtttggtgctgaatacgcgtatggtagcgtcgaatccgttgaagatcgcggcgatgttaaaatcgtgacgacggatagcgatacgtttgagactaaggcccttgtcattgggactggttctgaatatcgtaagctgggtgttactggcgaggatacgtatggtggccgcggtgtctcatactgcgcagtttgtgatggagcgtttttccgtaacaagcatgtagttgtcgttggtggcggtgactcagcgattgaggaaggcacttacctgacacagcttgctgataaggtgacggttattcatcgtcgtgaccaattgcgggcacaacaaatcttacaagatcgggcttttgctaatccaaagatggaatttgtttggaatagcaacgtgacggaaatcatcggtgatgataagaaggtcacgggagttaaggttaataataataagactggtgaagacagtgagattgcggtcgatggtgtctttatctatgttggtattaacccaattacgaagccattcagtaatcttgggattactgacgaaaacggctggatcgaaactaatgaccacatggaaaccaaggtccctggtatttttgcagtcggtgatgttcgtaagaaagatttacgccaagttgcgacggcggttggtgaaggcggaactgccggtcaaggcgtttacacttatatcactgctttaggcgacaaagttaacaattaaataaaattaaaaaatgcgtagctgatttaattgagatcagccacgcattttttattggtaaatatagcgttagtcattgtttgacgatgaccaaaggttcgcgaattagtgttgatagggaaatagaagcaattgcttgttagtatacgttgccaggtaaatatcactgacagtatagtgctgggcctgcaattgggtcagtaaccaggcttcatcatgattactagtttcaagcgcatcgaggttgacctgaccatcgacgattattggatacttgacggcgtcgtcgcccacttgggtaatcgtcagttggccgttttgttcaagtacggcccgtttgacgtagcgaatatccgtgataccttccgtacgcaagcgaaacatcagatcgttagcactcatcccatttttgagggccgtgctgacgagtaattgcccatttttaatcaatagctgtggctgtccatcaatcaaacgtttcacgtagcgattgtgatgtgttaggaatcgcaggaccagcactagcagtgtccagatgagaagcactaaaatgtattgtaaaacagtaacgctggtactataaatcatgcccccaacgattgcaccgagaacgtagttttgaacttggtcgagggcgctgattggcgcaaggttacttttaccagatagattgatttgtagaatgatggtcaatagcccgagggccagtttgatcgtcacatcccagtatgaaaacatatattgcccctccttaacataattgattgttgattgaatcggtgtggctttagtcagggtataactgtttccatccgtattgatcgtcacgttatagatatggtcatggactttaatgagcatcccactgctgacagaacttgtattagaccagaccgcggttttacgaacccctttttctttggcgacacgctgcataatttgtgtcacttgtgatttttggttgaaactatttttgattgtctgccattcattaaattgaatgccgacgagcagcaataataataaaaccatgataatgaataagtcgcggtattttaggtctgttttatggcggtaccataaccagctgagtatggcgattattaatataatgatgccgatggctgcgagttggacaagagtatgattgttattttgatggactaagtagttgtatgaataaaaagtcatgatggcctccttataagatttattatagcaagttttgatagtgactgaactaactagcacttcagaatttatgggtattcgcactgatgcgggcccactacgcatttaaaatgcattaattaatggattttcttagtaaattttactttgtaaagtgtgtcaatgttgtatactatttttgtaagcactaacaaatatcggaattggagatggtttttgtgagttggcaggatacttataatacctggaaaaaccaagcgacacttgaaactagtttaaaacaagaattgacgggcatggctggcgatgacgccgccttagaagacgccttttatgaaccaatggaattcggaaccgcggggatgcggggggtacttggacctggtatcaaccggatgaatatttatacggttcgtcaagcaacggaagggttagcacgcttcatggataccttgcctgctgaggttaaggaacgcggggtagcaatcagttttgattcccgccatcattcagaagattttgcgcatgaatctgcgcgagtattgggccaacatggtatcaagtcatacgtttttgaaagcttgcggccaaccccagaactttcatttaccgttcggcatctgcatacttacgcagggatcatgattacggcgagccataatccgaagcaatataatggctacaagatttatggcgaagatggtggtcaaatgccacctaaggaatctgatcttatcacatcatatattcgtaaagttgacgatgtctttgcgattgccgttgctgatgaacaacaattattagctgataagacggaaaccattattggggatgatgtcgatcaggactacttagctaaggtcaaagaagtgacgatcaatcaaaaactagtggatgaagtcggtaaggacatgaagttagtcttcacaccattacatgggactggccggatgcttggcgaaaaggctttgaagaatgccgggtttaaaaacttcagtgttgttaaggaacaagctgtggctgaccctgaattctcgacggttaaattccctaatcctgaatttcctgaagcctttaagatggccattgatttgggtaaaaaagaaggtgcggatgtcttgattgcggttgatcctgatgctgaccggttagggacagctgttcgtcaacctaatggtgagtatgttctgttgacgggtaatcaaattgccgctgtcttgttacactacatcttgcaagcaaacaaggatgccgggacgttaccgaccaatgcggccgcagttaagtcaattgtttcaagtgaatttgctactaaagtagcggcttcatatggtgtcacgatgatcaatgtcttgaccggtttcaagtatattgctgaacaaatcgaacattttgaagccactggcgaacatacctatatgtttggttttgaagaaagttacggttacttaatcaaaccatttgttcatgacaaggatgcgattcaaaccacagtgcttttagccgaagtagcggcttattataagcaacaaggtaagaacctttatgatggattacaagacttgtttaaggaatacggttacttccgcgaacaaaccacgtccgaagaatttgatggcgttggcggcagcgataagattgcggctctgatgactaaattccgaagcgaagcaccaactgcctttgccggctacgatgtcactgggactgaagacttccagagtcaaacggaaagctttgctgatggccacacggcaccaattgctttgccaaaggcgaatgtcttgaagtatcatttaaatgatggcacttggatcgccattcggccatctggtacggaaccaaagatcaagttctacattggaacgctaggtagtacgttagaagaagctaatgataagttagcgaaatttgaagatgccattcaagcgtttattaaagaataaattggttatttagtcagaagttgtacggcccagctgactagccatgctaagtgataaataacgccttacgaaatttcaagttaatttcgtaaggcgttatttagttgttgttcatattagaaattaattcattgtcggatattcaaagttgacggggtcaccgggtaggcgtaataattgcggtttgccatagtaataaccttgtcgaagattaatatcgaagtgactactcaagcgatcatcttcggcgtcttcaatcccctctaagattaaacgcaatccgtattcactactgatggcccgccaaaaatggagcttttgctgaatcttaggatctttgatatcactgcggaagttttgcaacgcaaattttaattcagaagctaatggcaaaatttcttggatactcttgaaatcgttaattccggtaccaacatcatcaagtgaaatttgcataccatgttcgatgaacccccgtaagtgtgggattaacatggtatctggataatccttaggactacgttcctcagttagctcaacgactaatttagcaggatagagctgaacctgactttgaataatggccttcgcaaccgttgtatccatcaattgttcgcgactgatattgactgcacaataacgaacttttagtccaagaattttagtcgttgcaatgagcagatcagaggtaacttgtgaactaattgcggtaaaggattcaggcagacgccagccgtctggggttagttgtttgattagtagttcgtatccgtaaactgtattgttgagtaagttaagttgaggttgtacaaaatagcggtaaattggttccataagtaccatcgccttttataataagtttaaaatcattgaatcgttttaatatcaaccgaatcgctgtatactctaagtatacgtcaacttaaataaatgtttaacttaatccaagttaaattttaacttttaatgaaagctgtggtcgaaacaatgaaagttgccattattggctgtacacatgcggggattgccgccatgaaacaaatcttgaaatattatccgggcactgaaattaccgtctatgaacggcacgcggatatttcatatatgtcttgtgggacttatctacacttagggggtaccatccataatttggatcaagcgttgtacgctaatcctagtgaatttagtgaacaaggtgtgcagatgcggatgcagtatgatgtgatcaatgtgaatgctgataagcatacaattttggctcaaaatttacagacaaaagaattacaaacggatcactatgataagttagtcatggcgacgggttcaatcactgcaatcccggctattccgggcgtagagaatcctaaggtcatgctttgcaaaacatgcgaacaggcccagcaactctacgaagcagctaaacatgcacaccatattgcaatcgttggtggtggctattcgggggtggaacttgctgaggggtacgtgaagtccggacacactgtgacgttgtttcaacggggcccccacttaattaatgagtatcttgatccacaaatttctgagaagatcgaagacttgttaacgacgaaaggcatccaagttagaaccaatgcacaagtgacggcttttagtgatacggctgataatcgactacgagttgcaaccgctgatagtgaagaaatatttgatatggctgttatttgtccgggtgtgattccacaatcagagttattggcgggacaggtcaaccgaactaagcagggggccattgtaacggaccgttatatgggaacctccaacccggatatatttgcggctggcgatgtgacggaaattagctttaatcctacgaaggaacacgcctatatgccattagtctcacatgcaattcggcaaggtgcactggcaggaattaatatctttgataaacgcttaggtgcaattggtacgcaagcgacgactgggatgttgatttttgatcagaccgtggcttgtgcaggtctgaccttaacggcggccaaagcagctaacttcgatgcccaagcagctttttatgaaggcaattatcggccggactttatgcctaccacggcgaaagtcatgattgagttggtttatgatcaacaaacgcggaaggttttgggtggtcaactaatgagtgctcatgaagtttcacaatcagcaaatacgttgtccgtagtgattcataatggtaatacgattgatgaattagccttcatggatatgctattctcacccaactttgatgaaccgtttaattacttgaatttagtggcgcaggctgcagtagatcaggaacatggctatcgtcggaataattaagtttttgcactaattatggtcagaaggtgctggttgttaaaatcaagaacagccagcttagacccgctggaataagttcagattagcgtaaacttgtttggtgagtgcgtccgataccgttctccaggtattgctgccaattgctgggatggtattcaaaacgaatgtgctacgttaacgtttgttccaagtctaacggagtagatggttcagcgacagattagcttgggttaagcggccgttcatctgccactcgagtggtttcctggaagtcagacgaggacgcgcatatgctgacgggcaacaatccaactaactagcatgttttaataataagtgctggtgaatccataaaaataatgagccaaataaggtgactgccaaacagtgggtttcataacctgactgtttggcggccacctttatattatttgaaagtgattggtcaagcatagtcgttgggatcagcggctaggggttggtaagcgtccatttcggtgtcgcggtagtcccaccattcgttaacgtagccgacaaagcccgcggcggtcatggcggtgtccagcagctgataatttttttcttgaagtgcggttcgaggagcgtcacggtgagcagctgccgtgaagtcatcgaaggcagttggcattgttaactcactaccatcaggatgggccagggtcaaatctaaggtgacgcctttttggtggctgaaattaggattaggctgggcaacaaattctggatcaggatacacttcaaataaacggcgctgggcgcttacgggccgataagcatcccagactttgagtcgataaccttgttgtttaaccagggcgcttgccttggcgagtttgtgggccgtgccagtgcgaacaatggccgtggtaaagtcgtaaatcacttgatgagtaaagttattagtggtggcataacgcaggtcaacgatgatttcggagtctaagtgttgaatattggtgaaaccagttaaagcttgatccatagtaggtcctccttagaatttagttatgcttattgtatctgattggccgatattttaccgactaaaagggttgcaaatggtgtcaaactttctgctagctttcaatccgggtccctgatatgatggaaagcggtgtaaatttaacaattgattgaagaggtgaggtcgcatggatcgacaaacacgacgcgcaattttaattttagtttttagtgagtttttagtttgtttagggattagtttagttattccagtcatgccgtttattaaaaatgaactgcatttaacggctaccgatatgggaataatgaatgcgctattcgcattggcacaatttgtggcctcacccattattggccgggtttcagacaaagttggtcgcaagcccgtattaacggtagggctagtcttatatatggtctcggaagtactatttgcgctaaccaaccagctgtgggtctttaatatttcccggattgttggtggcttatcagcagcgatggtcgttccgacggcgatggcgttagcatccgatattacgaccaaacgacagcgagctaaagtaattggctggttatcggcggcctttagtggtggcttgattttaggccccggtatcggtggggtattggctggtattagttataagacgccgttctgggttgctggtgcattgggattactcagtgccattgtgctcgtcattctgttgcctgcggatcgtcagattgatcctgatcgcgaagcaattacggccacgacaacgacgaccaatcatccgatgacgcgggcattttggaccgtcccgattattatattatttacgatgattttagtgtcttcctttggcttacaggggtttgagagcatttatagtatttacgtgaatgaagtctttcactttagtctgagcaacattgcgttggtcttgactttaaatggtttgatttcgctcttcctacaggtggcactatttgatacctttgtccagcgttggggcgaacggcgggtcattcgggtgtgctttgcagctgcggcgctctgcactatctggattacgcaggctcattcgaaagttgctgtcatggttgcaacgctcgttattttttcggcattcgatcttttgcggcccgctattacgaccctattaacgaaagcaagtgaggccaaccaggggctaatcaatgggcttaacatgtccttaacgagtgttggcaatatcgttggcccaatcatgtcggggatgttactagatatgaattatcactatccatatctagtggtggccggattcttgattgtctcttatttaatggcgtttatgttacgattaccgaaccaggttcattcacatcagcaagtttaacattgcataacagttaagctaatcagcgaaagcgctccgggtttgcgtccccggggcgcttttgttacacttaggccaaattagattgaaggatggtgggctgcaatgggaatgcatcaatattttcagagcttaagtaatttagaaacgattcaacgggccccgggtttttttaagtatcagaatcattcagttgcggcgcattcatttaaggttgctgaagtcgcccaatttttaggtgatgtggaagaaaatgccggacaaattgttgattggcgagccctctatgagaaggcgctgaatcacgactataatgagcggtttatcggggatattaagacgcctgtcaagtacgcaacgccgacgctacggacgatgctggcggatgttgagcataaattatcacaaaattttgtgcaaaatgagattccagctgagtttcaggcagcttattcacggcgtctatcagaaggcaaggatgaaacgctagaaggccagatattgtcggtagccgataaaattgacctattgtatgagtcgtttggtgaaattcaaaagggtaatccggaaccagtttttagggatatttatcaagaaagtttaaaaacaattgtcgcgtttaaaaagatgactagtgttcaatatttcttaaaagcagtgctaccagagatgttagcggaaccgttcacgcatcaggatcaattacaggcgctgacgacccagattttaacggccgggccgcaatccgattaatggcgaaagtatgttcgatgtgctaaaattaaatgcgatttgaatgtgatagggaagcgcgggcttgcctattttttatggtgcgacagtaagatttagttatcaatagatgatatgaacgggtgaccgtttaaaaggaggactacgtttgattgatcgggtagataataatcattttgacttagtttcagattaccaaccaacgggcgatcaaccccaagcgatccagcaattaaccgctggcattgaatcgggagaaaaagagcagatcttgttgggggcgaccgggaccgggaagacctttacaatttcgaacgtgattgcaaaggtgaataagccaacgttaatcttgtcacataacaagacgttagcgggtcaattatacggggagtttaagaagtttttcccgaacaatgccgttgaatattttgtgagttattacgattattatcagccggaagcgtacgtgccttcgagtgatacctatatcgaaaaggactcggcaatcaacgatgaaatcgataagttacggcactctgcgaccagctcattattggaacgcaacgatgtgatcgtcgtggcatcggtctccagtattttcggtttaggggatcctcacgagtaccaagatcacgtagtctcactgcgagtcggcatggagatcgaccgcaatgatctgttgcgtaaacttgttgatattcaatttgatcgtaacgatattgatttccagcgggggcgttttcgggtccatggtgatgtcgtagaaatctttccggcttcacgggatgaccacgcattgcgcgttgaattctttggcgatgagattgatcgaatccgtgagattgacgccttaaccggtgaaattgtggctgatcgtgaacatgttgcgatcttcccagcgacccactttatgacgaatgatgcgattatggaacacgccatcaagggcattgaagatgagttggacggccgcctgaaagaattgacagccgatggcaaattgttagaggcgcaacgactcaagcagcggacgacctatgatgtcgaaatgctcaaagaaatgggctacactagtggtatcgagaactattcacgttttatggatggccgtaaacctggcgaaccaccgtatacgttactggacttcttcccgaaggactttttgctcgtggtcgatgagtcacacgtgacgatgccccaagttcggggaatgtataatggggaccgagcacgtaaacaaatgctagtcgattatggcttccgtttgccaagtgcgttggacaaccggccattgaaacttgaagaagttgaacagcatattaatcaagtggtttatatgtccgcaacgccgggcccttacgaaatggatcggaccaagcacgtcgtccagcaaattattcgaccaactggtttattggatcctacgattgaggttcgaccgattatgggtcagatcgatgacttagtgggtgaaatcaataagcgcattgaggtcaacgaacgggtctttatcaccacgttaactaagaagatggcggaagatttgaccgactactttaaggatttaggcatcaaggtacggtacttgcacagtgatattaagacgttggaacgaacgcagatcatccgcgacctgcgtctgggcaagttcgatgtgttggtcgggatcaacttgttgcgggaaggaattgacgttcccgaagtttcactagttgcgattttggatgcggataaggaaggtttccttcgtaacgagcgttcgttgatccaaacgattggtcgggcggctcgtaatgagcacggttcagtgattatgtacgctgacaccacgactgattcgatgcaggccgcgatggatgagactgcacgtcgtcgagcagtacagatgaagtacaatgaagatcatcacatcacgccacatacgattaaaaaggccattccagagctaattgcttcgacgaagaccactgaagacgcgggtaagaaggatgacttcttagaaaccgactttgatgatatgactcgtgaacaacaattagatatgattagtaagttggaagaacagatgaagaccgccgctaagaagctcgactttgaacaagccgcaacgctgcgtgatacggtcatggaattgaaagcacaaattagctagcaggttgctggcttgagattgaggaggcctttttttggcaaatgataagattgtcattcacggtgcgcgagcccataatttaaaagatatcgacgttaccatcccgcgcgacaaattagtcgtgattacggggctgtctggctcaggtaagagttcgttagcgttcgataccttgtacgcggaaggacaacgtcgctacgtggaaagtttgtcagcgtacgcgcgtcaattcttaggacagatgcaaaaaccagacgttgattcaattgatgggcttagtccggctatttcgatcgatcagaaaacaacatccaaaaacccgcgctcaacggtcggaaccgttacagaaatcaatgattacttacggttactgtgggcccgagtcggtgaaccgatttgcccgaacgatgggacaccgattgcgagtcaaaccgttgaacagatggttgatcggattcagaaattaccggaacgaacgaagttgcagattttatcaccaattgtccgccagaaaaagggcgagcacaaaaagatctttgaaaagatcaagcgtgaaggtttcgtgcgggtccgtgttgatggtgatattcatgatatcagtgaaacttttgaactgaacaagaatcaacaacacacgattgaaatcgtcattgatcggatcgttgtgaagtccggtgaccgttctcggttatttgattcttttgaagcggcgttgcgattaagtgggggctatgcgattgcggatgtgatcggtggcgaacccattatgttctcagaacattatgcttgtcctatctgtgggtttactgtgggagaacttgaaccacggttattctcgtttaacgcgcctcagggagcttgtccagactgtgaaggtctcggaatcaagctagaagtcgatgaggaccttgtcgtacctgataagtcgctgacgttggctgaaggtgcgttagcgccttggaatccaatcagttcacagtattatcctgaaatgttgaagcaagcttgtgaacagttagaaattccgatggatgtgccgtatgaagacttatcaaaagctgatcaacaaacggttttgtatgggtctaacggaaagacgttccatttccactaccagaacgactttggtggtgttcgcgatgttgacgctgtgtttgagggcgttatcaacaatgttgaccgccgctaccacgaaacgaatagtgatttcacccgcgatgtgatgcgaaagtatatgacggaactcacttgtcagacttgtcatgggttccgcttaaatcgcaaggccctgtctgtcaaagttggtggcgaacatatcgggatggtctctgacttagccattggtaaggaactcgatttctttaacgagttgagcttatcagaacaaagtctcgtgattgctaaaccaatcttgaaggaaatccgcgaccggttatcattcttgcaaaatgtgggactggcgtacttaacgctcagccgttctgcacggacgctgtctggtggggaagcccagcgaatccggttagcaacacagatcgggtcgaacttgtccggcgtgctctatatcttggatgaaccatcaattggattgcatcagcgggataacgaccgcttgattggttcacttaagaagatgcgcgatctggggaatacgttgatcgtggtcgaacatgatgaagacacgatgcgggccgctgactatatcgtggatatcggcccgggtgccggtgaaaacggtggtgaggtcatggcggccggaacgcccaagcaagtggctcgctcgcagaagtcactgaccggccaatatctatcgggcaaacggtttatcccactacctgaaactcggcgtccgggtaatggtaagaagattcgtatcactggtgcggccgaaaacaacctcaagcaaattgacgttgattttccactaggcgaatttgtcgtggtaacgggggtttccggttctggtaagtcgaccttggttaacgatgttttgaaacgcgtattggcacagaagttgaatcgtaattctgaaaagcctggtaagtataagagtgtcaggggtattaagaatattgaacggttagttaatattgaccaaagtccaatcggccgaacaccacgcagtaatccggccacatatactggtgtctttgacaatattcgtgatttatttgcacaaacgaatgaagctaaattacgtggttacaagaagggccgctttagttttaatactaagggtggtcgttgtgaggcttgtcacggtgacgggattctaaaaattgaaatgaatttcttgcccgatgtctttgtaccttgtgaagtgtgtcatggtaagcaatacaattctgaaacgttggaagttgaatacaaaggcaaaaatattgccgatgttcttcaaatgaccgcttcagaagctgttaagttctttgaaccaattccaaagattcgacggaaactacagaccttggtcgacgttggtttgggctatgttaagttaggccaacccgccacgactttatcaggtggagaagcccaacggatgaagttagcttccgaattgcacaaacaacagtcggggaagaatttctacatcttggacgaaccaacgactgggttgcacagtgaagatattcggcgcttgattggtgtcttggatcggttggtggatgcgggtaataccgtgttaatcatcgagcataatttggatgttgtgaagtcggcggattatttgattgacttgggcccagaaggcggtgacggcggcggaacaatcgttgctactgggacaccagaacaggtcgctgaagtggctgaaagttatactggccaatacttgaagcccgttctagaacgggatcgagcacgtgaagcaactgcacctgctaaataacgggcaatgtgctacacttgagtttgtaatgtaattttaatttagaggagttgtttgtacatggctaaagtagaaagttttacattagatcataccaaggttttagcaccttacgttcgtaaaattacggtggaaaatgggcctaagggtgatgccatcactaattttgatttgcggttagttcaacctaacaagaccgctattgatacggcgggcttacacacgattgaacatatgttggctgggttattacgtgatcgtatggatggcgtgattgactgctcaccatttggttgtcggactggttttcatttgattacctggggtgaacatgacaccgttgaagttgctaaggcattgaagtcctcattagaattcattgctggcccagctaagtgggaagacgtacaagggacgaccatcgatagctgtgggaattacaaggatcattctttattctcagctaaggaatgggccaagttgattttatcgcaaggaatttcatcggatccatttgtacgcaaagtcgttgaatagaccaaaatataaaaagtaatggtggtgccggccaccaattaaaaagagcctagcttttcataacgaaaagctaggctctttttgctgtttactgacattgtgcgagcttagcggtcctgaatcgtgggaaaacaatctaagattagattaaggtagtgtttcaaaaataacaaaaaatatactgatttcggtgaatgtctgcataaaaattctacattttagtgaatattgcacaaatgatgaatatatttaaaatattattgaataaaattaaattgggtggtacgatactgtcattgataaaagcaaagataaaaatttcggaggtacaaatcaatggtcaaacaaaatgataaaattattctcgcttattctggtggtttagatacgtcggtcgcaattagttggttgaaggataagggctatgatgttgtggcctgcggaattgatgttggtgaaggcaaggacatggatgcaatcaaagaaaaggccctaaaattaggggctgtttcatcatatatgattgatgctaagcaagaatttgctgaagaatatgcgttaattgctttacaaggtcataccttgtatgaaggtgaatatccgctggtctcagcactttcacgtcctttaattgctaagaagttagtcacattagccaagcaagagcacgctgttgcaattgcccatggttgtactgggaagggtaatgatcaggttcggtttgaggttgctatccacgctcttgcaccggatgtcaagatcgaagcgcctgtacgtgattggcactggtcacgggaagaagagatcgattacgctaaggaacacaatattcccgtaccaatcaatttggacagtccttactcgattgacgaaaacttatggggccgggccaatgaatgtggcattctagaagatccatggcagggcgcgcctgccgatgcgtttgaccggacgaaggccttagctgatacgccggatacgccaacgactttggaaatcacttttgaagctggggtgccagttgctttagatggtgaatcacttaacctagctgatttaatcatcaagttggatcagattgctggtgaacatggaattggtcggatcgaccatattgaaaaccggttggtcggtatcaagtcacgggaagtttacgaagcaccagctgcaacggtattgctcaaagcacataaagatttggaagatttgacgtttgagcgtgagttagctcacttcaagccaatcattgaacaaaagcttgcggatacgatctacaacggtctttggttctcaccattgatggaagcgatggttgccttcttaaagcaaactcagcaagtcgtcaatggggtagtccgggtacaactcttcaagggtaacgttattactgaggggcggaagtcacccaactcactatatgatacgaacttggcaacctatacatcagcggattcatttgaccaacaagcggcagttggtttcattaagctatggggcttaccgacgcaagttaatgcccaagtccaagcgaaggctcaggccgaagctaagactgataaggcacacgcctaatgagtaccaagaagctatggggtggccggtttaccgaaacgggtgctaagtatgttgatgactttggggcatcaattagctttgaccagttgcttgccgcagaagatattgctggttcactggcacacgttaaaatgttgaagaaaactggtattttgcctgccgctgatgttgatcaaattgttgctggtttggaaaccttggctgagcgtcaaaaacaaggtaagttggaattttcaacggtcaacgaagacattcatatgaatattgagtcattattgaccgaagagattgggccagtcgctggaaagttgcacacggcccggtcgcggaatgaccaagttgccacggatttccacttgtacttgaagcatcaattaccactaatattggaccggctacatgaactggaaacggtattggtcgataaagcgagtgagaacgtggagacggtcatgccggggtacacgcatttgcaacacgcccaacccatctcgtacgcgcactacctgttagcttattaccaaatgttcaagcgggacatggaacgcttcgagtttaacctgaagcataccgatatttcgccattgggagccgctgcacttgctggaacgacttttccaatcgaccgggaatatagtgcgaaactattaggattcagtgaagtctatcataatagtttggatgccgtttctgaccgggacttcgtgcttgagtttctcagcaatgcttcgatcctgatgatgcatctctcacggttttgtgaagaaattgtcagctggagcagttatgaattcaagtacatcagtttgagcgatcagttttcaacgggtagttcgattatgccgcaaaagaagaaccctgacatggccgaattgattcggggcaagtccggccgggtttacggcaacttgatgggattgctaactgtcatgaaagggattccgctcgcttacaataaggatctgcaagaagacaaagaaggggcgtttgatacggtcacgaccgtgttaacgagtctccacgtcttcaccggcatgttggcaacgctgaccgttaatgaagatcggatggctgatgccacgactaacgatttctcaaatgcgaccgaactagccgattaccttgcaaacaaaggaatcccatttcgggaggcccatgctattgtggggaagctcgtcttggatggcttgaaaaaacagcggccgttgcaggatattccactcaaagaatatcagtcaatctcaccgctgatccaagaagatgtctaccatgatttgaacgcaaaagttgcggtggaacggcggcattcgctaggtggtactggttttgatcagattagacaagaattgcaacgggcacaaacgcaattgtcagcctatcaatctgaaaccactgattaattaatgcttatcaatttgaccattgatattatttttaaagatgacctctaagtggcggagcctcggcatttagaggtcgtttttagtgctatcgacattttgaaaaagcattaagctaacataaagtctatcagaaaaattggaaactcttacattaactggtaagatggaattaatatcggatatgggagatgttgatgtatgtttaatgatcatcgctgggggtttgattggactgaattcatgacggggatcgttttctggatcgccgcttactttgtcatcaagcaaccacaagcagcacttttaagtttagtctttttatttgccatcgccgcaattattagcggggtcaccacaatcggtgggtacacaaaactacgccgtgaaacagggttgcgggcaaattttgcccttgtgtttgcgattattgatattttagtggggttattatttttattccacgcaccgactggggtactggtactcggttacgtctttgccttttggttcttgatcgattcgattgaacggctgaccgtagtctcacatctacgcgtctttggaaccgggtattttgttctatctttaatcttggatattattagtttggcattgggaatcttattagtaatcaatccaatggttgctgtgattagtttcaacgtactggttagtttctactttgcagtttttggcatcaacgcaatcttgattgcttttgctcggcgtaactagcttggcagtattgactcgttagcgatacttggcgctcactattggtggtgtcagggtgttgttaaggggtcttttttttgcgcgttaatgtaatactgtttggaatcaaatggcgggtcgaagtggcacgtcagtagaaatgacacacccggtgtgttatactaccaacaatatggactagagggggccaatacagcatggcagaatcattacaactagtaattatttctgggatgagcggtgccggtaagacggttgcggttcaaagctttgaagacctgggctatttttgcattgacaatatgccaccagcgttattaccgaagttctcagaattagttgaggagtcgggtaaaataaagaaagtagcgttagtgattgatttacgctcgcgggctttttacgacgaaattatggatatgttggctaacttagacaacacggactttgtgtcgacccggattctgtttttagatgcttccaacgaagaattagtgtcacgctataaagagacgcggcgttcccatccattagccatggaaggtcgcgtcatggatggcgtgcgcaaagaacgagaattattggcgccattgaaagatcgggcttcatacgtcattgatacgtcgacgttgacaccacgtgaattacgcgaatcgatttttgataaattcgaaacggatcaggatgagacttttcatattgaaatgctatcattcggttttaaatacggactcccgattgatgcagatatcgttatggatgtgcgcttcttgcctaatccatactacattcctgaattaaagaagctgacgggactagataaacctgtggcggattacgttatgcagcaaccagctacggaagctttctaccagcagttcttgagtatgctggaaagcattatgcccggctatgaagccgagggcaagagtagtttgacgattgcgattggctgtacgggcggtcaacaccggtccgttgccttgacgcaacgtatcggtgaagcgctggctaagcactacaaggtgcacatcagtcatcgtgatattgagaaacgaaaggaaactgttaatcgctcatgagaaaatacacatttaagactcagcggcctaaaattgtggtgattggtggaggaaccggtttgccggttgttctgaacggcttgcgtaagcaggcagtcgatattaccgcagtggtgacggtggctgatgatggtgggtcatccggcattattcgcaattacgttaacgtggttccacctggtgatattcgtaatgtaatggtggcgttgtcgagttggccggatttgtataaagatatttttcagtatcgtttccagggtgatgatcaattttttgcaggtcatgcgattggtaatttaattattgcggcactaacggaaatgaaatccggggtgtttgacgcggtgcaggaattatcaaatatgatgcaagtagatggtcatgtttacccggcagccaacgaggcactcacgctacatggtaagtttagtgacggtactgagttagtaggtgaagccgaaattaccgcggcccataagtcattggaacgcgtttgggtcactgacaagaatggtaaggaaccacaagcagttcaaccagttattgatgcgattatggcggcagatcagattgttttggggcccggtagtttgtttaccagcattctaccgaacctaacgattggaaatattggtcgggccgtctgtgagtctgatgcagaagtggtttatatttgtaatattatgactcaaaaaggtgaaacggataatttctccgatgctaatcatgtgcgggtcttaaaccgccatttggggcagaactttattaatacggtgttagttaacaccgaaaaagtgccagaagattacatggattttcataagtttaacgaagtttcaaagcaagtgagtcatgacttccgagggttacgtgaacaaaactgtcgcgtaatctcatcgaacttcttgaaactccgtgataatggggcctttcatgatggcgaccaagttgtcgctgaattaatgaatctagtcggtcattccgacgttttcagataagggggtcgtggcatgtcatacgccagtgacgttaagaaagaattgactaacctcgctgtccatcgcgagaatgctaaggctgaattaatggctttgattcgaatgaatggggcgatcagcattgctaatcatcacttcattttgaatattcagacggaaaatccggccatcgcgcggcgtatttaccggctactcaaacaattttatgacgtcgatagtgaattgattgttcggcgcaaaatgaaattaaataagaataatttgtacatcgtacgattgaagaccggtacggacatggtactcgctgatttgggtattttaaaggattatcaaatcgttgaagtggcaccaactgaagtgttaacggatgatgctgcggtgcgttcttatttgcgtggcgcctttttagcgggcggttcggttaataatcctgaaacttcccggtatcatttggaaatttactcactgtatgaggaacataatcatatgatctccgagatgatgaatcagtatggcttgaattcacgaacgactgatcggcgtggtggtttcattacgtacatcaaggaagcggaaaaaattgccgatttcttgtcgttggttggtgcgaccaatgccatgcttaagtttgaagatattcgaatcatgcgggacatgcgtaactcggtcaatcggttggttaactgtgagaatgccaacatggataaggttgccaatgcctctagcaaacagattgaaaatattttattgatcgatgctacggtgggattacaacagttaccaccaaaattacaagaagtcgctgttgcccggttggaacatcgtgaagttagcctcaaggaactaggaacccttgttccgggcgggcctatttctaagtctggaatcaatcatcggctgcgtaaaatcaatcaatttgcggaacaattacaaaaagatgcttagttgtcgataaggatggcttaagcatgagttttgttgaaaagcttgctaaccactttagatggtgttagcggcttttttgggttgaaatggattgattgtcgttcgccatactcgaaaagcacttgacaaaagtaagtgcaactatttatactgaacacatcttattgaaatcggagagacgtaattatgcaaaaatcaacaatgcaaatgatgatgtgctgcccatgttgtgaatcaaacaacatggctatttgcgttgaattacaagcgtctctgcatcaaaaataacgggattgagctcaaatcgttaattttgaaacgcctgcttggaatctgacgagattctgaacaggcgttttttgttacaaccgatgggaataagtagatcaacacatcaaaatgggaatgtaaaggggcgagaagtttgaagaagcgatcagtgttagcagtggtaatgagcctagtattagtgacggtgctggctgcgtgtgggaagcacaatagccagtcttctggtaatggcaagtatgcaagtagtcaggttttaaacttgtcgtaccctagttcattggattcaatcgatatttccaatatgtcgggatatggcagtacgggtaatatttttgaaagcttataccggttaggaaagaatggtagcattacaccgggattagctaagtcaactaaggtttcaaaggatggcaagacgtatacctttacgattcgcaatgcaaagtggagcgatggttcgaagataaccgcgcaagactttgtctattcttggaaacggaccgtcaccccagcaactaagtcacagtatgcctacctcttctcaggggtgaagaatgcggatgaaattgtcgctgggaaaaagtcaccaagtacattgggcgtcaaggcgcaaggcgaacatacttttattgtgactcttgataagccaattacttattttaagaagttaatgacctacccgttgtttggaccaattagtgagaaagcggtcaaaaaatggggtagcaaatatgccactaaggctcagtacatgctctacagtggaccgtttaagttgactggctggactggaactaataatagctggcagtttgtaaaaaataatcagtactgggataagaaagctgtccacctacaaaagatcaactacacggtcaatgagagtactacgacaacattgaacttgttccaagaaaagaaacttgatctaacgcaattagcgagtgaacaagttaagaatatgaagagcagttctgactataccacgtacccttattctatcaccgcgtttctggtttataatttccaagacagtaatgcgacaatcaaaaaggcgctcaataacgctaagattcgtcaagcaatttcattgtcgatcaatcgcaagacgttagtaaagaatgtgattggtgacgcatcaacggtctcaaagacgtttgttcctcaggatttagttaaagatgctaaaactgataaggattttgcagatgaatcaacggttaagaattcaacgtcatataacaaagcgctggcacaaaagttatggaaacaaggccttaaggaaacgggaattaagaaattgtccattcagttattagcttctaatgacgaacctaataagccgatttcacaatacttgaaatcagcattagaaaagaatctcgatggtttgacggtcaacttatccaacattccatcaaaggtagcttcaagtcgtgctcaaagtggtgattttgacctttatctcagtggttggggtgctgacttcaacgacccaatctcgcatttgcaaattatgactaataatagtggttataattacggaaaatataacagcagcacgtacaatgcgttggttaacaaggctcaaaaccaggatgccaatgatactagtgctcgttggcaagatatgatcaacgctgagaagacgatcatgaaggaccaaggaattacgccattgtatcagacggtatactcttatttacaaaatccaaaggtaaagggtattattcataatactgctgggacacagtggaattataagtatgcttatattgccaaataattaactgattgagggacgctcatggtaactggtcgtttagctgttaccttagtaggagcgccaggtccatacgtgccttgatcaaaacaaaatagcggtccatttcgacttgtcagagtgtcttgacgaatcgaagtggaccgcttatttatttcgacgaatggttctacagtgcttgagttgtcacgcaagacaactacactgattggtctatgctggtgttacgtcgttaaccacgtacttgattggctgatgttgggccatcgcaatcacattctccgcgacaatggtagccatgccatcgcgagcttcgaccgttgcgttgccaagatgaggtgtcaagatgacgttgttcatcgtggccaaaccaggtgtgacttgcggttcatgttcgtagacgtcgagtgcagcgccagcaatttgatgttgttgcagcgccgtcacaagtgcttgctcgtcgacaattggcccccgtgcggcgttgatgaggagcgccgtggacttcgttttgctaaaagcagcattatcgattagatgcgttgtttgtgtggtaagcggcagatgtaaagtgacgatgtcggcacgctgtaaaagttcatcctgggagacaaaggttgcgccaagttgcgtttcacggctaatcggtaggcggtggtgttggctgtataagatgggcatgtcaaaggcgtgtaatcgtttggcaacagcttgaccaatttggccaaggcctaagatgccgagtgtcttgccttgtaagttgtggccgagaaagaacagtggcgcccaaccgttaaagccgctagttcgcattaagtgatcgccttccacgatacgatgcgctaggctgataatcaaaccgaccgttgattcagcggttgcgaccgccgaaacgttcggcgtgttcgtgactggaatctggcgtttagctgctgccgcgatatcgatgttattagtgccagcaccaaaattagcaatcagtttaaggtgtggggcgtggtctaagacatcttgatctacttgagttgagagtggggtaatcaaaaagtcggcatcagcgactcgacggatgagttccgcgtgactgatcaggttatcgccggtataagtatcaatgactaactgactttgtaaaagtaacgtattagcttgggctggaagctgaccagcaataaagacttttgtcattatagagactcctttttacttttaagttcaaggacaagtaatattgtccgggtagtaatccctgcttatgtgcagtatgggctattgcaaaacgaatgacaagaaaacgagcaaaaaaactgggccaacgtcaagttagcccagtcaaagatattagcttattttaatttgttgttttccataatatcatcgatcaaaccgtagtctttagcctcttgtgcgcttaagtagttatcacgttcagtatcatggttcaacttttcaacggattgtcccgagttgtcagctaaaatctggttgatctttttacgagtcttcaagatttcttccgcaacaatttcaatttccgtttgttgaccttgagcaccaccagatggttggtgaatcaagatttcagagttaggtaaagcaaaacgcttgcccttagtaccagatgaagctaagacgctggccatggaagcagccatccccataacgatggtttgaacatcagatttgatgaagttcatcgtatcgtagattgctaagccggcagtaacgacaccacctggtgagttgatatagagatagatgtccttacctgaatcttgggcatccaagaagagtagttgggcaataatggcgtttgccatgttatcttcaatgggaccggataacataatgatacggtcctttaatagtcgtgaatagatgtcataagcacgttcgccacgtgatgactgttcaataactgtaggaactggatacatgatttgttagcctcctaaggttgcattatttgattagctgattgctaatataaatgtagtttaccgctaaggtcagtgaaggtcaaaagaaaaacctcaaaaacagaattccgtttatgcagttaacgtggtatacttaggtttctatcataatacggcttgagattgggtgaacccaatctcttttttttcgacgattttagttagtaggccttggattaagtgttgcgtctaccttggcttgaaaacgatgttctcttataataatgattcaagattaagcagtaatgaacttgcatattcagcactaatgtggtgatttaaaagtagtcgacccgcataattttattatcgcgatagtaggtgaatcaatttactgatagtgacccacaaagatgagtctaatagaagttggaaattcgcacgtgagccgacatattaaacgacttgaccttgttgctggactcaagttgctcgcaacgaattaatcagtatcggatgcatgaatgaaatttaccatgattaaaacgattctataatataataacaattgtagtaattattatttgaatggtgtaagtttagctgttattaaatctactaaacgactacactggtatatggtttacttgaactgattactttttgattatttttacttggacgagcgggtataggtactattactgaccccgaaaggatattacttgttgtttggtttaaattaagttactatatggagatgtgactggtatagtccagtagttgtcacttaaataaatgcacaaaaaaagctgagaatcatttctcagctactgatgcgcccggagggaatcgaacccccatctcaagaaccggaatcttacgtgctatccattacaccacgggcgcctaaacaacatattatattctagcgaataatggataaaaacacaagggttttacataaaaatttattcagggaggtatttttatggcactgggaccaggatttcgccagcaacagcggcaatcacagaagttagcgatgacccagcgactacaacaatccattcagatgttgcagtttaatgtggaagaactaagagattttctaacgcaaaaagcattagaaaacccattgatcgatgtggatacaaattggaataataatcacgccagtttgaacgcagccaaaaatgtaaccactaaggcggatttcattgagcgtgtgtcgacctctaatcagcattcgttatttgaatacttgttggatcagattcacctaacgatgcgtgatacccatttgcgtcagattgtcctttatttaattgagtacgttgacgtgaatggttatttgcggattgatgagaggcaggttcggcaagaaactaaggcaacgccaattgagttgttggatgcaattaccttattacaacaacttgatccgccgggtgttggggcccggagcttgcaagaagcgctgatgttgcagacagaaaatgatgaccatgcaccgaacttagcctatattgtcttagaagaaagttttgacgagctggttaatcgacaatgggacttgttggctaagaagtatcaggtgacgcttgcggacatttcaagtatttatgattatgtgcgaacactaacacccgtacccggtgcggcaatcgggcaggagacgaccgggtacatctttcccgatttagtggtgacgaatcagggaggccagctggcattgcgaaccgcatccatggctcaaccggtggttaaattccgcagtcggtattatcagcagatggggcagcatgatgatcaggaagttacggaatatttgaaagaaaagaaaagtgagtatgactggattgctaacagtttgcagcaacgcgaggcaaccatttttcgagtgggaacggccattatcgagcgtcaagcagacttcttcttggaaaaaacgacggatttacggccactattgttacgagatgttgcccaacagttaaaagtgcatgaatcaacaatcagtcgaagtattaatggaaagtacattcaaacggacttcggtatgtttgagcttaaacgtttctttaccaaagcggtcagtaaacgtcccactggtggcaaaatcgtttcggccgacagtgttcaacaccgaattgtgaccttgatcgaacaggaaaataaagaaaaaccgctttcagaccaaaaaattgttcagattcttaatgcggaaaatgtcgaactttctcggcggacagtggcgaaatatcgcgaaaatcttaatattccgtcgtcatcaaggcgaaaacaatacttgagaaccgaacgataatttaacgcgccatttggaccagtcggttataagtttaattggggtttcatttgcaaccaccttatgaacctgttataattcatgttgtggtaagagaggtatgcaacattgatttcttagtgaatttgcgttgtgtgctttgttttttgaagtctttgggtcgcttttcgacatagctggaccagacccgtcccactagagagcaggttggatgccatgcattcagatattcaatggattgaggcaattgccccagatatggttgacatgctgagtcgtcgttacttagtattaagaaccattaattggatggccccagttggacgtcggctattagctcagacgttaggtgttagcgaacggacgttacggaccgaaacggatacattgcggaagctagatttgattatgacaaacaaatcgggcatgcaagttacccagcaaggtcaggacgtgttagtaggcctaagtcattttatggatgagctaatgggcattcgccagaaagaacgacagttggcgcaatactttaatattaagcgttgcatcatcgtttctggtgattccgatcgacagttgaaagttattgggaccatgggcgaagaagtgaaccagctattacagcaattattgccggaagggcgtaatattattgctgttatgggtgggcataccatggaacatgtggcaagtcacttaactaataaattaggtgataaacgtgatttgttatttgttccggcgcgtggtggtgttggtgaatcggttgcgattcaagcaaataccatcgcgtcacaaatggcacaacatactggcggtaagttccgctcgttgtttgtaccagaacaggtcagtgaacgaacgtatgaaccactcctcaaagaaccaagtattcaagaggtgctggcgattatcgggcaagctaacgtggtcgtgcatagtatcggtgaagccatttcaatggcccatcgccggaatatgtctgaggatcagatcaaggtgttacgcagtcgtgaagcgattggtgaagcctttggttacttctttgataagaagggtaacgtggtctaccggattccgcggattggattgcaaatcggagaactggcccatcgggagattatactcgccattgcgggtggggcttcaaaagccaccgcaattgccgcgtatatgaagaacattgcacctaaacagacgtgtttgatcacggatgagggtgcggctaacttgattttaaaaaagtaatcttctatagtgaagttgctttttaaaataaaactatttttatttccacaaggaggaaattctagtatgtctgtaaaaattggtattaatggtttcggacgtatcggtcgtttagcattccgtcgtatcttagaacttggtgaaaagtcaagtgatatcgaagttgttgctattaacgatttaacttcacctgcattgttggctcatcttttgaagtatgactcaactcatggtactttgaacgctgacgtttcagcaaccgacgattcaatcgttgttaacggtaagaactaccgtgtttatgctgaaccacaagcacaaaatattccttgggttaagaacgacggtgttgacttcgttctcgaatgtactggtttctacacttcaaaggctaagtcacaagctcacttggacgctggtgcaaagcgtgtcttgatttctgctcctgctggctcagacttgaagaccatcgtttacaacgttaacgatgacatcttgactgcagatgaccgtatcgtttctgctggttcatgtactactaactgccttgcaccattagcattctttgaaaacaaagaattcggtatcaaggttggtactatgactactatccatgcttacacttcaactcaaatgttacttgacggccctgtacgtggtggtaacttccgtgctgcccgtgctgccggtgtaaacactattcctcattcaactggtgctgctaaggctcttggcttagttatcccagaattgaacggtaaattacaaggccatgcacaacgtgttggtgttgttgatggttcattaactgaattagttgctatcttagacaagaaagttactgctgacgaagttaacgccgcaatcaagaagcatactgaaggtaacgaatcatttggttacaacgatgacgaaatcgtttcatctgatgttatcggtactactttcggttcaatcttcgatcctactcaaacagaagttacttctgatggtgacaaccaattagttaagactgttgcttggtacgataacgaatacggcttcacttgccaaatggtacgtactttattgaagttcgccactctctaatatttgattagatagttaagaactttaaaaccgcatatggttttgacggcggggggaggcaaaactcctcttgccgtttttttaatttcagcagtcacgaattctaggaggattttaacattggctaaattaatcgtttcagatttagatgttaaagataaaaaagttttaattcgtgtcgactttaatgttccaattaaagacggcaaaattggtgacgacaaccggatcgtcgctgccttaccaacgatcaaatacgtgattgaacatgatggcaaagccatcttattctcacatttaggtcggattaagagcgaagacgacaagaagggcttaagcttacgtcctgttgcagaacgtctttcaaacttattaaacaagcctgttaccttcgtacctgttactgaaggcgaacaacttgaaactgccatcaacaacatgaacgacggtgacgtcttagttgttgaaaacactcgttttgaagacgttgttaacggcgaacaagttaagcgcgaatctggtaacgatcctgaattaggcaagtactgggcttcacttggtgatgtctacgtcaacgatgctttcgggactgctcaccggagccatgcttctaacgttgggattgcttcaaacatggatcaagttgccgctggtttcttaatggaaaaggaaatcaagttcttaggtgacgcggttgacaatcctaagcacccattcgttgctatcttaggtggtgccaaggtttctgataagatcggtgttatcgatcacttaatcagcaaagctgacaagatcatcatcggtggtgggatgacttatacgttctatgctgctaaaggcatgggcattggtaactcacttgttgaaaaagacaagattgaattggctaagtcaatcatcgaaaaagctggcgacaagttagtcttacctagcgactcaatcgttgctgaaaagtttgataacgatgttcctagcaaggttgttgaaggttcaattcctgatggctacatggccttagatattggtcctaagtcaatcgaagaattcgaagatgttttacgcgacgctaagaccgttgtttggaacggaccaatgggtgtcttcgaaatgagcaactacgccaagggtacgcttgaaattggtaagttcttaggaaccttatcagacgcaacgaccatcgttggtggtggggactcaactgccgctgttaagcaacttggcgttggcgacaagttaacccacatttctactggtggcggtgcttcacttgaataccttgaaggtaaggaattacctggtattgctgctatttctgaaaaataatctgttctccgaaaggaaggtttatcgtgcgtacacctattattgccggtaactggaaaatgaacaaaacagctagcgaagctttagctttcgttaatgctgttaaggatcaattaccagatccatcaaaagttgaatcagtcgttgctgccccagcccttttcttacaggaaatggttgaagctgccaagggttctgatttaaagattgctgctgaaaatgcttattttgaagatgctggggcatttactggtgaaacttcaccagctgccttagctgacttaggcgttgattacgttgttattggtcattcagaacgtcgcggttatttccacgaaactgacgaagacattaacaaaaaggcacacgctatcttcaagaacggcatgaagccaatcatttgctgtggcgaatcattagaacaacgtgaagccggcgaagcagaatcatgggtttcaggccaaatcaaggctgctttgaaagacttatcagctgaccaagtaagttcattggttattgcctacgaaccaatctgggccatcggtactggtaagactgctacgagtgaccaagctgaagaaatttgtgcggttgttcgtaagactgttgctgacctttactcacaagaagttgctgataaagttcggattcaatacggtggtagtgttaaaccagccaacgttaacgaattaatgggcaaagatgatatcgacggtggtttagtcggtggtgcttcattacaacctgattcattcttggaacttgttaattatcaaaataactaataatagttattgcaagttgattgacaaacttctacaataagtgtgaaacaaataacaagccaattttaaggagagaaattaatgtctattattacagatatttatgctcgcgaagtcttagactcacgtggtaacccaactgttgaagttgaactttatactgaaagtggcgcatttggccgcggtatcgttccttcaggtgcctcaactggtgaacatgaagccgttgaattacgtgacggtgacaagagccgtttcatgggcaagggtgttactaaagccgttgacaatgttaacaagttaattgctaaggaaattgttggttacgatgtaactgaccaacgtgccattgaccaagctatgatcaagttagatggtactcctaacaaagctaagttaggcgctaacgctatcttaggtgtttccattgccgctgcacgtgctgctgctgacgaacttgaaatgcctttatacaactaccttggcggattcaacgctcacgttttaccaacaccaatgatgaacgttatcaatggtggggcccacgccaacaacgacgttgacttccaagaattcatgatcatgcctgttggcgcttcttcagttaaagaagctatccggatgggttcagaaactttccacaacttgaaagcgatcttgaacgagcgcggttactcaactgccgttggtgacgaaggtggttttgcgcctgacttgaagaacaacgaagaaccattcgaaatcttagttgaagctatcgaacgtgccggttacaagcctggtaaggatattgccattgcctttgactgtgccgcttcagaattctacaacgaagaaactggcaagtacgacttaaagggtgaaggcgaaaatggtcaatcatttactgccgaagaattcgttgacttacttgacagcattgttgacaagtacccaatcgtttctatcgaagatcctttggatgaaaataactgggaagactggcaaatggcaactgccaagcttggtaagaaagttcaaatcgttggtgacgacttattcgttacgaacacggactaccttgcaaagggtatcaagatgggcgttgctaactcaatcttaatcaaggttaaccaaattggtactttaactgaaactgttgaagctatcgaaatggctaaagaagctggctacactgccatcgtttctcaccgttctggtgaaactgaagacacgaccattgctgacttagttgtcgcaatgaacgctggccaaatcaagactggttcaatgagccgtactgaacggattgctaaatacaatcaattaatgcggatcgaagaccaacttgaaagcacttcagaatataaaggtatccacggtttctacaacttagacgaagctgcacggaacaccattactagcaagtaatttgaagttctaatgaaaacgtcgttccgatgggacggcgtttttattatacataatttaaggaacatctgtttgattttagggtctagggacggacgagtcgtggtagaatagaaacatgcgtattttgagtaaggagcgagcagaatggatgactttcagcaacaaattaatgagtggtctgattggcaaggactgcaactgaatgccggtgcttttgaaccggtgattcaaaaaatttatgccagtgaaaatgagccttataaaacgccagaacccgttgcggataagttggccgcccgctttacggtcggacccacccaaatcgcgatttttccacccagtgaggttatcccccaaactcgggcctattatcaggcggaacgttttggactgacccggatggctcgattgagcttgggtgctccgcgtctattgcatgcgggcttcatttttgataagtaccagttctactacgtgatttatcagccactacaaggtctgacgctaactgaattttgcgcaacggctaagccccttgctaagtcaacgctggggcgccagattgggacgatgttgacgcgacttaatactgaagttcctgcatttgggccaaccgctgcccaatcaaccgagtgggatatactgggccccgactttgttgccgagcgtacggcctggctacaagtacacaccgtaacgcctaatcaatttgttcatggcaatctagtgggcgagaatttaattgtgactagtggtgaattaggtttacagcgattcagtgccgcccatcaagctgcaaaacaaacggaattagtcccgctatttttgcaagcatttaatgatgatactgacttattggctggatttaaggaaacttatcaaactgacgacttagaaaaggatctgttattaggtttgttattacgcctagatggaccacagcagattcaggcattacatcctggagcgcccgtgacgttagcggccgtccagcaagtgattgcacaacgattatcatgattaagagggggaactcatggtggcacagcggccgcacatttcaaaacaacactttgactttacacggttcagctcgattggccgggcactaattgtcggtgtgattgctgggatcgtggttagtatttttcgtttcagcatcgagcagggactgaggttcgttcaatgggtgtacgcacaaattcatacaaattggctactgctctttccatggataggcttgtctgtggctgtggcgttctttgtgggttggttagttaagaatgaaccgaatattaaagggtctggcattccacaagttgagggtcaattagctggcgagcttgattatagttggtggtcagtgctctggcgcaagtttgtcggtggtattctgggcattggttctggactgtttctcggccgcgaaggcccctcgattcaattgggagctacgattggtcagggtgtcgcgtcgaaactcaaacagacgggatcagatcgacgctccttgattgccggtggtgcagcagctggcctttcagcggccttcaacgcaccgattgccagtacgttatttgttctggaagaggtttatcataatttttcaccaatcatttggaccaccgcattagttagtgcgatggccagtaattttatttcgctcaatttttttggccttgtaccagtattacacattccgtacggccataaccttccgttgagtcaatatggcaatctgattgggctcgggatttttctcggtattttcggttatctatatcaaaacgtgacgctgacgatgccaaattggtatgccaagttgcggttgcccagttggttggatggcttggtgccatttttactggtgattccgattggattaatttggccgcagtaacgccagcgttactcgccttgttaggaattttcgtgttacggtttaccttttctaccatttcatatggatctggtttgccgggtggcatcttcttgccaatcttgtcactgggcgccatcttaggtgcaatctatgcccagttcatggttgccgttggttggatgccgacgaacttgattccgaactttattatttttgcaatggctggatactttgccggcattggtaaagcaccgtttaccgcaattttattgattactgaaatggtcgggacactacatcacttgatgccattagcagtcgtttcgatgacggcctacttagtcgtggatctcttaggcggcgctccgatttatgaggctttgctagagaagttaattcagccgcggttaccggaacatagcggtatccaggatcggttagaattgccgatctttgaaggctctaagttagagggccatcaagttcgtgattttaaatggccagcagagtcattattgatcgctattcgccgcggggagcgtcaagtgatcccgcatggcgacaccttgatgcgggctggtgataccttaattatcttgactgaccgggataaccgtgcgtgggtgcgccatcaaatcgcacatttaacggtcgcgacgccctgagcactaaacaaagcaacgaattgttcaggatactggaaaaataaggcaaaatatgttaaattgttatagacatagcggaggctttaggaggcacatttcttgtataatttattgttaacgttaatactggttgtttccgttttgattatcattgcggtgatgatgcaaccatccaaaactaatgatgccatgtcttcattaaccggtggtgctgatgacttgtttgccaagcagaagccccgcggttttgaagcgttcatgcagaaggtaaccgtggtattaggaatcgcattctttatcctggcgttagctctagcatggtactcatcgaagtaattgaccgtcctcctgtgatttcaggaggcttttttttaaggtggtgtaatgatgctgaaacaaccggaaccgtttttctttgaacatggccaacatgccgtcattttattgcacgcctatgcgggaagtgccaatgatgtgcggatgttagcacgagcattagaacgggaagattatacagtttatggcccccaattcagtggacacgcgactgatgatccgcgagatattctcgcacagacgccggcgcaatggtggcaagatacgcaacaagcaatatcatttatgcggcaaaaaggctatactaaaattagtatctttggcttatcattaggtggtatttttgcgacggcggccttggagcgtgatcctcagttgttaggtggtggcacgtttagttcaccactatttgctggtaatcgtagtgacgttgctgaaatgtttatcacgctgagtcaccatcaactggcgcacagtcaattctcaattgccgagcgtgaacagatcttaatggtgttgccagaactggttcagcggcaactgcaggcagtcaatacctttaccacgacggaggttacgagtcacctcagcgctgtgacccaacccttcttcattggtcagggtgggcaagatgaattaattgatgcgacggtggcgcgacaattacgtgatcaattaccacaagtaccagttgattttcattggtatgctgatgctggacacgtgattaccgtcaacagtgcgcatcaccaattggaacaagatgttttaacatatttaaaaactatttataaatgaggtaaataatgtcagaagcaaacttacaagaacaaatcctgacttttttgcaagctcatcccgatcgcacgtatagtgttgaacaactaacggatgaattgcattttacaggcgcaacggcgtttacttttctagtaaaggaacttgcgaatatggaacgtaaaaaattagttagtaccgatgatcatgatcatttcaagctggtccaggaaacgaagactgttgaaggttcatttcatggtaatgacaagggctttggtttcgttcgttacgatcccgatttgcctgatatttacattaatccggacaacacgcagtttgccattaccggtgacgatgttgcggttgaaatcattcaaccagcccgtcccagttccgaccgcggccctgaaggtaaaattgtcagcatcgttaaacggaactatacccagattgtcggtgcgtatacaccaagtacggatgaagacgggattattggttctgtggaaattaaggataagaaattatccaaatatcagttattaatcactgatcagggcttacaccccactgagggggaagtcatcattgctgaagtggctgcttatcctgacgctcagcatccaacgcggatgattgggattgccaagcaggtcattgggagtgttgatgatcctgggatggacgtcttacaagtggtctaccaacacgacgtcccgtcagtgtttccagaagaagtgacggatgaagccaaccggattccggattacgtgactgatgaagaaaaagttggtcgggtcgacattacggaccagccattagtaacgattgatggcgccgaatctaaagacttggatgacgcggttgttgcttggcgcttgccaaatgggaacttccatctaggcgttcacattgcggatgttagccattatgtcaccgagaactctgagttagaccgggaagcattcaaacgtgggacgtcagtttacttaactgaccgtgtgattccaatgttgccacggcggctatcaaacgggatttgttccttaaatcctgatgttgaacgattagccatgagttgtgagatggagattgatcaaacgggggaaatcgttaaccataagattttccaaagtgtgattcggtcacacgcccggatgacttatgacgctgttaatcagattctcgaagcccatgaccccaagactcgtgaaaagtacgcggacttggtcgacatgtttgatacgatgggcgacttacaccgtatcttgtacaagcatcggcggcatcgtggtgcgatcgattttgatgataacgaagctaaaattatcgttgacgaagccggtcatccaattgacattcaattacgggtacgtggcttagctgaacgaatgatcgaaagtttcatgttggcagccaacgaaacggttgcaaaaaactatagtcaacttaaggtaccgtttatctaccgggtacatgaaacgcctgatagtgaccggatgcttagtttctttgaattcgtcactaactttggtgtcagtgtcaaggggagttctaaggatgttaagccgaagatgcttcaagacgttttgaagaaggttgctggtaagcccgaagaagccatggtctcagtcatgatgctgcggagcatgaagcaggcccgatacgctgaccagtcgcttggtcactttgggttggcggcaccgtattatactcactttacgtcaccaattcggcggtatccagatatgatggttcatcgtttgattcgccattatgctgaaaacggcactggtgaagaagcccgggcacgttatcgggataacctaccaaatattgcggaaacgacttctgatcatgaacggcgggggattgatactgaacgcgacgttgattcgatgaagaaggctgaatatatggctgatcacgttggtgagacgtttgaagccgttgttgattccgttatgaaattcggtctgtttgttgaactagaaaataccgttgaaggcttagttcatatcagtacgatggacgacgactactacgaatacgttgaaaaacaattagcgttggttggccgtaagacgaaacggacatttagaatcggccagcccgtcaaagttcaactaatgcgggtcgataaggatcaacgagaagtcgactttaagttattgaatcctgaagaagcgccaaagactgatttattgccaaagcgggaacatcatgataactatcgtggtaataaccggcgtggtggcaataacggtaactaccggcgaaatgggaacaataataaccggaataacgaccatcgtggtggccacaacaataaccatcgtaatggcaatagcaatggtcgccggaacaataataatcataatagcaacaataataatcatagtactaacaacaatcggcggtcatcaactgatcgtcggcgttaatttttaagtaaggggatgtgcggcaatggccaaacaacacggtaagcacccagataccgccctcgctcaaaatcggaaagcacgccatgactacgctgttgaggaaacctatgaagctggcattgcgctgacggggacggaaatcaaatccgttcgcgatcggcgggtcaacttaaaggatggtttcgttcaagttcgcaacggtgaagcctggatgcaaaacgttcacattagtccgtttaaagagggtaaccgttataacgttgacccgttgcggtcccggaaacttttgttgcacaagaaagaaatcagtaagctaggtgcagcaacgatgactaagggtgtgacgattattccacttaagatgtatctcaagcatggatttgcgaaagtcttaattggagtcgctcacgggaaacgggaatacgacaaacggcaagatatcaagaaacgcgaacaacagcgtcaaatcgaccgggttatgaaacattactaggcatcgattacgttagcgttgcatcgctgcaccatacaacgagtatggcagcgtcataaaaaggtcttccaagaattaattcgattcttggaagaccttttttagtatgtgttgttggtggttctgtgccgtggacggacgacggcaagcatatattttatatgtactgatgtagtgctcactgttataaatgttctagatactagcaaaatggttatcaggctataaatattttgcgaaaggtcgggtacaagcacttgcgacttagctggtaattatgttagcatataattgtattgatagttaaacgtgctatttattaattgattcaataaatataattgatactaaactttggagaatgttattattctgatattaatcagatttagtataactcaaattgataataagttaattttgatatgatttattgcatggattcttggggggacatgtatgaatagatttataacgagcaagcagcattataaaatgtataaaaagggacgtttctgggtatttgctggtattaccgtggctacctttactctgaatccactgataagtcgggcagatacggaaacgacgaccgcagccaccgcagctacgaccactgctggggcatcctcatcatccaactcacaggttttaaggactactacgactagtacaacaggggcaacgactcagtctagtgcgacggcgattaatgcggcaacaacaaatactagtgctcaaaaaaaacaggcggttagtggcaccactactgactcaaagactgaacaaccggttacggcagtaggagaaaatgaaaacgaaaccagtaatctcagtacctctgattcggcatcagcaagcagtcaggctaaaactggttctggcgacagtttggaccaaacgtcaaacagctcagtaagtgtcgcatcgagttcacagaaagtcacaacacaaaattctgattatcaaaatgatcaaggaacgggctctgagagtggcattcaatctaatgtgacggacacggtggtggctgatgaatcactacaaactaatcgttcaagtgtcgcatcgccaagtactagcacaatggccagtattggtgactcagactcgaaagattctaatgaaactgaaaaagttgtggattcagaaactagtccgatagctgtaactgccacaactaatacaattacgacgactaacgataaagtccagttaaatcgggcactattagcgcgagccgccatacccgcaactgttgtctcaactgggactctgggaacaagtgcctggcagtacacagatgatggtgtgttgacgattcatgctggtgattggaccggagtgggtgatgtcagcgacgtaccgggggattttggcagtgagttaacgaaagtagtgattgatggtccaattaatgcggggactgatactagttatatgttccggtataatccaaatttggccagtattgatggccttgaaaatctggatacttcgaaagtcactgacttttcaatgatgtttatgggaactaagattgctgacttttcaggattagcgcattggaatgtcagttctggtacgtcctttgactctatgttcgccagtgactcgcgagttcaatcttatgatttaagtcagtggcagttgaatacggttcaaccagtgagcttaaaaagaatgttttcatttaacacggccttgaccagtattgatctaagtacttggaatgtgcggatggtcacggatatagatgggttattcaatggagataagagtttaacaacggcggatttacatggctggaacttgttgaatgttacagcgttgtcatcgatgtttttaaatgataccaatctcactgatcttgatataacgggctggcagacgggcagtacgttaactagtactaagtttatgtttgagggaacccctggattaaaggcaatcaacattgcgagtttggacatgtctaactttgcagcagtcactgaagctgatatgaataaggaacctgcagatcatgatatgtttttgaatcaagatagtagcgggaatccgttgcccatgaacctaaacgcattaacggttgggtcaaaaacatatttagtcggtagttcattgccagacattccaactggaactggctataccggtaaatgggtcaatcaagctgatgccacccagacgtatacgtcgagtgagttaatggctttgtataatggcgtcgataatccagccgatacaatcacttgggtctgggaaactagcccatcctatgctgatttcacgtccaagaatgtaaccggattaattgccgggccgaagacgacgtggcgagttgccgatagtgttgcaacactaaaagatgtgaatgggactgatatttatgcgaccgctgacacagtcgtcaaagtaattagcgtgaacggcgatactgctgtaacgacggtcgacactcaaactgccggtacctatcaagttgacttgcagtatacggatgcgtatggcaaagtatggcagcaaactagtacggttgcggtagcggtaaatcaaggcaaactagttggtaaaccgttggcgatcaaaatgggtgctaagccaacgtatacgattaatgatttaatcgacacggacaactcccgcaatgcggccggcgataagctaagtgctgacgaactcgcgacggctacggttacaggcttggatacgagtaaagctggcgcacaaacggttacgctggcgtatacggatgatgctactggcatggtccacacgacaaccaccacggtgacgatggtcgcaactaaggccgacttaacaatgcgtaatagtactatcattaaaggacccaaaaactcaagttgggactaccgccagtatgtcacgagtgtcactgattttgatgggaacccggttagtttagatggacttaacattgtggttgatcagcaacctgatttaacgcaaattgggtcgcaaactgtcacactcacgtatacggatgcgttgggcaatgtcatcagcgtcccaactcaagtaacagtcgttgcttctcaggcacaagttacaaccaaggcgccgttaacgatttggcccagtgaggttgctcaattaaaagtcgccgatttggtgacaatcacggctgccaacgggaaccccgtcgatactagtaccaacctaacagatgtcacaatgagttcaattgacacgagcaagggtggcgcgcagaccgttactattacttatacggatgaagctggcaatctagtgacagcttatgccaaagtaacggttgaccaatcagatttgaagaccaagctaacgaatccaattgcggggcctaaagctaaatgggactatctagctggtttggaatgggtcaaggatgcaaatgaaaagttgcttgataatctcgcaaccgctgatattaaagtcgttactgaacctgatttaagtgttgcgatggtcggccatgaccaaacggtgacactcagttatacggatgagttgggcaaagaacacttagtcactgcggttgtcaacacggtggcttcgaaggcgaagattacggctgtcagcgaccagatcatcatacctgatgaagccaaaaagctgacggcaaccgacctggtcagcgagttaattgatgcggcgggaaacaaaatcacgaattttgatggtgtgacgatgagtggttttgatgctaaagctatcgggccacaaaccgtgacactgacgtattcggatgcgtatggtaaccaaacaactgattcgacgacagtcaccgtggattccgcaacgctaacgcttcagaatcacactcaagtggcaggacctaaggcgacttggaattatgctgataacatcaaagccatcactgattctaagggccagtcgctaacattaagcgatgccaagattacggtcgtgcaacgtccagatttaagtgtggctggaacttataaaattgtacttgaatatactgatgatttagggcaagcgcacacagagactgccgatgttgaagtgacggcttcaaaagcggccattactgccgtttctaagcaggtgattttggcagaaaaagcgaacatggtaactgcgtcgtcactagtgtcgacactgtacgatgcggatggcgttcaaatttataattttgatgatgtgacgatgagtggctttaatgctaaagctatcggaccacaaacagtaacgttagcgtatacggacgcgtatggcaatcaaacgactgtttcgacgactgtaaccgtggatttcgcaacgctaacgcttcaaaatcacactcaagtggcgggacctaaggcgacttggaactatgctgataacatcaaagccgtcactgattctaagggacaatcgctaacattaagcaatgctaagattacggtcgtttaacatccagatttaagtgtggctggtacgtatccaatcgtgattgaatataccgatgatttaggacaagtacacacaaagactgccaatgtcgaagccacggcttcaaaagcgtccattactgccgtttccaagcaagtaattttagcggaaaacgcgaacatggtaactgcgtcgtcgctagtgtcggcactgtacgatgtggatggcgttcaaattcataattttgatgatgtgacgatgagtggttttgatcctaaagctatcgggccgcaaaccgtgacactgacgtatacggatgcgtatggtaaccaaacgactgattcgacgacagtcaccgtggatttcgccacaatcactggtcaagcgacacacccaattgccggtccaaccgcgacttgggattaccgggacagcgtcactcaagtcatcgataccaacggaaagacaattgatgtcgatactgctgacattacagccacaacgcctgatttaactccggcaaaaactggcaagccacaaacggttacattgacctatactgacagtctgggtaaagttcacacgaccgacgtgattgtaacgacgacgctttcaaaggcgaagattacggctgttgctgaccagattatttggcctgatcaagctaaacaactgacggcaacggacttagttgatcgtttatacgatgctgaaggtcatctgattacaaattacgacaatgtcgaaatgagtgcgctggattccaagttagcggggcagcaacgtttgacgttgacttacacggatgttgcgggtaatcaatccgtcgcttatgccaatgtgacagtcgaccaggcaaagctagtgacaaaaccaagcacggtaattgctggcccgacggcaacgtggagttacgaagccggtattagtcagttgacgaatgcagctgggcaacttattaccgtccaaccggggacaattaaagtgttgaacaggccagatctgaatgttgattcagtcgggcaacaacagctgatcacactgatttatacggatgagctcgggaaatcccagtcggtcacggcaatggtgacagctgaggtctcacaagctacgttaacggccaaggcggcagttatcgtgcaaccggatgccgcggcgaagctaacggctaatgaccttgtaacgagcttaacggacgcctctggacaagcggtgactgattatcaaatcgttcagatgtctaagctagacgcgactcggccaggtgttcaacccgtctcattaacttatacggatgcggctggtaacgaagtaagtaccgttgtaaaagtaacggttgatcaggccaagatggagagtcagaaccggactcaaatctggggaccaagtatgacttgggattatcggcaacaattggcaactgttacggattcgcaagggcatcagttgaatcctgatcaagctaaaattacggtcataaccggcccgcaactgacggctaaaatgatcgataagccgcaaacggtcaccttgatgtacacggatgatctgcaacagacgcatactgtgtcagccattttgaccttaacggcatcacaggcggcactcgtgccacgtccggcacagattgtatgggccaaagatgcggggcaactgacgccagccaactttttgcaaacgattaccggcgcggatggcactcaagtgtcgtctttgactaatgtcaaaatgagtgcagtcaatgctagccagcctggtgcccaaacggtgactctaacgtataccgatgattacggaaacgaggtgacaacaactgcccaagtgacggttgatcaagccgccttaacgacccaaaccgctcgaccggttgccgggccgactgcccattgggattatcagacgaactttaaaaccgtgacgaatgctgccggcgaagtgattaatgtcggtgatgctaatattaaggtgttgacaggcccagatttgagcacaggcatggtggggcggcctcaagtcgttacgttcagttacactgatgaattaggattgacccaaaccaccacggcggaggtcacaacagtcgcctcacgggcgcacatgacgactagtgctgaccaggtgatttggcctgcagctgtcggaaaattaacggttgcggatctagtcactggtttaacggacgcctggggtcagactagtcagaattatcaaaatgttacgatgacgaccatcaatgctcaacaggccggaaaacaacaagtcaccctgacatatactgatgaggtgggcaacgtaaaaactacgacggtgacagtcgaccaagcagcattaacgactcagccacaaatggtcatcgcgggtccgactgccaagtgggattatcatcagggtattggaacgattactgatggtatgggccagccgattgcggtcaataatgccgctattacagtcgtggcgatgccagacttaacggttgcccatattggtcagccacaaactgtgcaactggtttacacggactcgctgggacaacaacaaacggcgttgatccaagtgataaccgttgccacgcaggctaaaatcagtacgcggccagttaccgtgattgccggccctaagacgacctggtcactgaatgatagtgttgactggtcaacgagtttggcagcggatggcacgttgctgacagcggcgcagcgccaacgggtgactgtagatggtaccctgaacttacggcgggccggcaattacccactgacactaagttacatggaccgtgcgggtaatctgattactgtcacgacgagtatcgatgtattggctagtcaggcccagttacaagtgcgtgatagtcagttgaccgtcggaaacacttgggctgctcaggataatttcgaacgtgcaaccgatgcccagggccaagcactgacattagccgatatcgcggtcgatggtacggtcaacacgcaacgcactggccggtacacattgacttaccactatattgatgttgccggtaatcagttaactaaaacggccgtggtgaccgtcgtcttacctgacgatgatcacattaacacgaccgaccctgataacaatgatcatggtggaacgaccgtacctgacaacaatgatcacggcgaaacatctaaccctgacggcaatgatcatgcaggtatcgctgatcctagtgaaacaccgaagccgagtgagcgacctaacgattcggatggtcataccgtcgactggggcgttgatgatcggattacgacaaagcaacaaccggccgcggctactcgtgcacagactaaggtcaagacgaccgctgagccagctctaccggccaacaatgagcatactagcgcagccaaagcagcagcgacacctgtgacacgagtaactgacacgactgctgacacactgccacagacgggcgagcgcgaccgctcagcacaacaaggcgcggtagtactcggattaacgggattattagggttaatgggattaggacgtcggcggcatacgcatgaggattaagcgtacgattggcgtgttaggttcatcgattagctaaaattgatagcgatttcttgcaacggacagattcattttgaattggtccgttttgttaactgctgctgtttggacttaatggctggttgcgcgggttgatgaatctagtgtcaagtattcagttaagcagtgattaatgcttgaacaaaattttaaaacataaaaagggggtactttcatcagaatctttgctagaaatggctatttactttattttattaagtaaacagctgatgatagtgacatcattaaagctaaattaaaaaagtataaaaaattgaattggtcgcgagacatgaattatgttatattttatgacataccgttccggtaaactatttgaggaggtctcgtcgatgagaaagtggcaagttgcagttgtcatgttgttagcagcgttgggaagctggtttgcgattggtacccaggcccaggctaagacgtatacgattgcgacggatacaacctttgcgccgttcgaatttcaggtcaagggtggtaagtataagggaattgatatcgatattttgaaggcaattgccaaaaaagaaaatttcaattataaattaaaagcgcttagttttggtgccgctgttcagcagcttagtgcgaaccaagttgatggggtaattgccggaatgaatattacggctgaacggaagcagacgtttgatttttcagacgcttactatacttccggggtggtcatggctgtggctaaagatagcaaggtcaaaacgtttaaagatttgaaaggtaagaccgtggcccttaaaacggggacagctggtgcaacctatgcgaagtcgattcagagcaagtacggcttcaaaatcaagtatttcaatgactctaataacatgtataacgatgttaaggtcggcaactcggctgcttgttttgaagactatcccgtgatgtcatacggaatcaagaatggcatcgcgttgaagattgtttccaagcaacacgaggccggcgactatggtttcgcggttaaaaaaggtaaaaacgcggaactgttaaagaaatttaacgcgggtctcaaagcgattaaagcggatggtacttacaaaaagatcattaacaagtacttgaagtctagtgaagcatccttaacgggtgaagacgcaagcagtcggacctttattggcttgttcacccaaaacttggatacgattggctcagggttatggatgaccttggaattaacggttatttcaattattttagcgacgatcctcggactgattcttggggtcttaggcgttatgccgggtaaacttggtccggccatctccagtacgattatttatattttccgtgggatgccattgatggtgttggccttctttatttacattgggttcccagacctgattgggcacggctttaagattcccgcgttcgttgctgggatgattacgttgatgcttaacgaaggggcctataccggagcctttgttaaggggggctttgccgcggtcgacgatggtcaaatggaggcggcccgttcacttgggttgccatactggacggccatgcgcaaggttattatgccccaaggaattcgaatcatgattccgtcgttcattaaccaatttattatcacgctgaaggatacgtcaattctatccgttattgggatcgttgaattaacccaaactgggacgttgattattgcccggaacttcgaaggctttaagatttggttaatgattgcgattatttatctgattatcattacgttattaacatggttatctaactgggttcaaaggaggattaactaagcatggcgaaagtaattgtcaaagatttgcataaaagctacggcgataacgaagtcttgaaagggttaaaccttgaagttcaagataacgaagtagtctgcatgattggaccatctggttctggtaagagtacgtttttacgctgcttaaatgacttggaagttccaacacaagggcaagttgtcattagcggttacgatctttctgacaaggggactaacattaatttggtccgtgaaaatattgggatggtgttccaacactttaacttatttccacacctatcagtgttacaaaatattaccttagcaccgactcaactcaaaaaggaaagtcaacaggaagctgagaaaacggcgcgtgacttacttgctacggtcggcttgtccgataaggcggatgccatgcctaagtccttgtctggtgggcaaaagcagcgggtggccatcgctcgagcgctagccatgcatccgaaaatcatgttgtttgatgaaccaacttcagcactggatcccgaaatggtcggggatgtgttggatgttatgaagaaattagccgcagatggtatgacgatgattgtggtcacgcacgaaatgggctttgccaaggaagtggccgaccgggtcgtctttatggcggatgggttgattcaagaaacggggaagcctgaggatgtattcgaacacccacaaagtccccggttacaagatttcttacaaaaagtgatcaacgtttaagtatcggctggtcataataaaataacccgtcaaataggcgcgctaagaattggtttaattcttggcgcgcctattctgtagtaacgtgcttgcatagcagatgaagtggtgttgctctgaggacgattaactagtgaataccgtgatatgggcaacttgatcggcacgtcaactttgatagggtgttaagctggcaaactagttatgccaacttaactaaaaacaacggtcatcccgaaacaggggtggccgttgttttatggctagttctatttagtgttggggcaccttattacggggtgtcaatgtataattactttcaccaaagctaacattgagtccctttttcgcaactggtgtccgcgcgcggttggtcggcttttgccagtgatccaggatcgccgcaatgcaaatacacagtggttctgtggattgatcagtaattgctaattcaaatgcttcaccgttagtggtgacaactggtcgcatcgtcatgattaattcagtaccatgataaacgcggtagttttcggcactcaagcttcccatgataatccagcgaagcttgcgaacatagagcatttcatgccagaagcccagcgttttactaatagaaccgacgttttgacggttatagtataaatcgaattttggcaacaatccgagggttgtttgtcgaatttcggcaagtagcttaccttggatcgcgtataaactgagcgcgtcttggcgccgcccccaccgaccaactaagagatagtgagattggttgtgcgcatcgcgaacaatccgggcaccttgggcgaagctattgcggctgaaatataatttacgcatcttcaacctccgttttccggaaactattgtttggcaagcacttctaagattgctttgccgacaccatcgttgacatttgtatcagtgatatagcgggctaactgtttgacttcgggactggcattacccatagcgtaacttacgccagctaattcgagcatggagacgtcattattattatcaccaatcgccatgacatcgctcattggggtattcagcatattcgcatagcgctcgactgcaatccctttttgcgcattaatattattgatttcgatatttgatgcggatgaagatgtgattttgagggacgaatgttttgccagaatttcatcactaaggggttttagcttagcgggcccttcttcgctgaaagcgataatcttcatgacatgcttagtcggatcatccaataactcgttatagttgtccacgtaattgatgtccataagttctaagcgggctgacgcgagcgataccgcaattttgaacgttgtatctggattcaggttagttaggagatgtgcaatttgttcgattcgcttggctttactgttagagtaaataccatcgttgcctacgacttcaaaatagtaaccttgtgaggttagcgtgtgaaaaacggtgcgggccacgctattggttatgggcaccatgtcgagcattttgccagaagcgtcgtatacttcggcaccgtttaacgtaatcaagggtgccgtgatgccttgagcggccagtagtggctgagcttcagaaaatcggcggccggtggagacgataaagtgcacgccttgctgttgtgcttgacggatggcattagcgttaaaatcggaaacgaccatttcattgttgagtaacgttccgtccatatcagaggcgataatcgaaatcatgttgtcacatccttagttgttttaataattacattttaacatgtttacgtctgaatacagaattattatcattagtggttttggttatgatacaataaaacgagaggtgttaaggatgaaagcgtttattcacacggactggtgggacgtcttaaaaccagagtttgaggagccgtattaccaccaattacacgaatttttgaaaaatgaataccgaacgaaaaatattcacccagatatgtataatatttttcaggcctttgaatggacgccatttgctgacacgaaggtcgttattttaggtcaggatccgtatcatggccctggtcaggcacacggactgagtttttcagtgttaccgggcgtggcagtgcccccatcactagtcaatatctataaagaattgcaagatgatgttgggtgtacgcccgtcaaccacggttacttggaaagttgggccaagcagggagtcttgttattgaactccgtgctgactgttcaaaatggtgtggccttttcacacgctggtaagggctgggaacgacttacggacgttgccattcagcgtttatcggaacgatcgacgccggttgtctttatcttgtggggtaaggcggctcggtccaagattaagctgattgatacccagacgaatgtcgtgctacaagcacctcatccgagtccgctttcagcttatcgcggattctttgggtccaaaccattttcaaaaacgaacattgcgttaacatccttcggcgaacagccaatcaattggcagttaccagagcacgtcaatcttgagcattaattaatttattggagggttatcacatggatttatttgagtcattagcacaaaaaattactggtaaagatcaaacaattgttttccctgaaggaactgaaccccgaattgtcggtgcggcagcgcgattagctgcagacggcttggttaagccgattgttttaggtgcaacggacaaagttcaggctgtggctaacgatttgaatgcggatttaacaggcgttcaagtccttgatcctgcgacatacccggctgaagataagcaagcaatgcttgatgccctcgttgaacggcggaaaggtaagaatacgccagaacaagcggctaaaatgctggaagatgaaaactactttggcacgatgctcgtttatatgggcaaagcggatgggatggtttcaggtgcaatccatccaactggtgatacggtacggccagcgttacaaattattaagaccaagcccggttcacaccgaatctcgggtgcatttatcatgcaaaagggtgaggaacgctacgtctttgctgactgtgccatcaatattgatcccgatgccgatacgttagcggaaattgccactcagagtgcggctactgctaaggtcttcgatattgacccgaaagttgcgatgctcagcttctcaactaagggttcggctaagggtgaaatggtcactaaagtgcaagaagcaacggccaaggcgcaagctgctgaaccggaattggctatcgatggtgaacttcaatttgacgcggccttcgttgaaaaagttggtttgcaaaaggctcctggttccaaagtagctggtcatgccaatgtctttgtatttccagagcttcagtctggtaatattggctataagattgcgcaacgatttggtcattttgaagcggtgggtcctgtcttgcaaggcctgaacaagccggtctccgacttgtcacgtggatgcagtgaagaagacgtttataaggttgcgattattacagcagcccaaggattagcttaaacggtcacttagtttgttaaacgagggaaacttcagagcttgtactttgaagtttccttcgttttttctataataagaacagttaatttggatgaggagttggaagaatatggaatcaatcacggtaacgtcgccggaagcaaccatggcaatcggggccaaacttggccaattagtgcaacctggtgatttaatcttactagatggtgatttaggtgctggtaagacaacttttacaaaggggttagcaaaaagcctgggcattcctaataacgttaagagtccgacttttacgctcatccgggaatatcgtcagtggcgactaccgctctatcatatggatgtttaccgcttggaagatggcggtgcggaagatttaggcttagatgaatactttgatggtgatggcgttagtgttgtggaatggtcacagtttattgccgacctcttaccgacgacttacttgcgaattgcaattagccgggacactgatgccgatgaccagcgggtaataaccttcaagcccattggtgaacactatcaacgactggttgatcaattgaaggagtgacaaccatggcagaagaagttgttgatgtacggcctgctgaagtcgcggatgcagcacaattattagcgctactcgctcagctcggacgtgaaagtaatactttcactgttgatgagggcattgaggatttgagcgaaacggatgaacaggcgcaaattgagcgtatcaatggcacaacgaccaacattattttcgttgcgacattagattcacggttgattggtgtgagcaccgtgcaagctagtacggattttagtgcggcgcaaggtgaagttggcgtagcggtacttaaagaattttggggcatgggtctggggactgctttgattgaggaagtcttagattgggctcgtaactatagctcattggaacgcctcgtgttgacggtccagttacgaaatgtgcgtgccgttaagctgtaccagcatcttgggttcgaaaattgtacggcaacgagctatgatgtcgttgacccaaccggcaaacgggttccagctattgatatgggaatctgggtttgaaatccgggattcgctgaactgacggcaaacaggttctgatagtagatgggccggaatttaagcgttgacgaaccaggcctaaccggcgacggcttgtgaatgattggctcatctcccagtcggttgggggaattgataagctgtctacgagtattgataatcggtagtgatgcgtaaacaaaaaagtccagcatcttattgctggacttgcataaatttaattttaaccctgaacgcgaacgaaagggttgagttgctcagttccaaaagcttgcgcttcggtgagtaaaatgttggcgcaagctaggctgtcatctagtgcattatgatgatgctgcaggtcgatatccagtgcttgacagactgtatccagcttgtgattaggcaattctggatagaaccgttgactggtcttgacggtatccatggataggtactccggcgcgctgatgccgtagtgggcaagcgtattgcgtaacacaccaatatcaaaaggcgcgttgtgcgcaattacgaggcggtcgcgttggaagaatggtgcaatgtgttgccaaacgtctggaaacttgggcgcgtctgcgacatctgcttcatgaatcccatgaatttggacgttccgccagaaaaaatcgctctctggtttgatgagtgtgtaaaattcatcgctgatttggttattacggacaaccgttagcgccagtgaacaagcactgtcgcgtttcgcgttcgccgtttcaaagtccattgcgacaaagttcaaagttgccaccaccgtttctaaagaataggattatcgtacaaagaatctcgttaattttcaagttaatggttcggaaggataatatcgagttccactggacagtgatcagaaccaaaaatttcattatgaatgcgggcgtttaggagctgactgtctaattgctgtgacgtaataaagtagtcaattcgccaaccagaattgttgtcacgtgcatgcccacgataactccaccatgagtaaatgtcggtttggtcaggatagaaatgccggaatgtgtcggtatagcccgctgcaaggaggcggtcaaacttggtccgttcttcgtcagtgaagccggcactatggtgattgctacgccagttcttcaagtcgatgttttcgtgggccacgttaagatcaccacaaaagatcaacggcttgttggcactcaaactgttaatatatgtgagaaaagcatcttcccactgttgccgatagtcgagacgttttaattcaccgcctgaattaggagtgtaacacgtcaagacgtagtagtccgcatattcaagggtgatgacgcgaccttcgtcatcgaattctggtacaccgataccataagttacattgagcggctcgtgtttggtaaaaatcgccgtacccgaataacccttgcgctcggcatagttccaatattgataataacctgggaagtccagttcaatttggcccgcctgtaatttcgtttcttgtacacagaaaaagtcggcatcgagttcattaaaagttgtgacaaagccgtgtttgacagcagcacgcagtccattaacgttccaagagataagtttcacgtgagtttcagacctttcaagtaatttactcatattgtaacacggcagccactggttattttaatgacaattgaatcagtgcgccgtgattaaagccagacacggcggatagatgtgcgatagggtgacaaagcatgctggtgtctttggttggcctagtttcagcgcgtccgagcgggtatctttggctttcagtgatggcacgtttttccagctaacaatcactggcatgaattggacgctgaatgatttaaatcagtgtgccacggagcaatcagtagtagctaaaagaagattgatgataaaattggaggaatatcgatgttaaaaattggggtcattggtttaggtaacattgctcaaaaggcgtatttacccgtcatggcggcgatgcaagaccagtatgaatttcatctaacgacgcgtaatccggaaaaacgagcacaactagcgacgatgtatgggtttcaacacacccatgcgacccttgaggaattaatggcagttaaaccggcggccgtatttgtgcatactcccacggacacgcatgcagcaatcatcaagcagttgttattagctgggattcacgtttatgtcgataagccagtcgcgactgatcttcaggtggtccaaagtttgtatgatttggctgcggcgcggcacctgttattgacttgtgggtttaatcggcgttttgctccttttaatcagcaattgaaggcattgcctgacaaacggatgttagtggctgaaaaagttcgcgaagtgggtagtcaagatcctgaaacggcggttttcgacctgatgatccacatggtcgatacggggctattcttgttagatgaaccacttgaacacactagtggtcggttgacgacgacggcaactggcgcgttggcgcaaggctatttgacggtgcagacggctcatgagcaattagaagttatcacgaatatgtacggtggggtcaatctggaacaagtgacagtccaaacgacggggcaacgtgcgtctgtgactgatttaagtactaaaaccgtgatgacgacggcaacaactaccacgacggcttttccggattggacaccgacattggaaaagcgaggatttgcaccgctgatccgtgcttttctgacggcggtaacaacgcacggacctaatccagtcgacccaactggcgcaattaccagtcacgcggtgtgccgtcatttattaagtgattaaaaagtgctaaaattaactgataggcttacaaatttcaacctgattatatcgtttcaatagcgtttcaatgctgcggtgcttgatacgtcggcctaaattaaaaacgctatgcggttaaagtgattattaacgtaagtgaattaaatcgaaacacgaaaggaacttttcaccatgaccaaagatgtcttggccacttttccagccatcgaaattaaaaaaaatgaatcactaagtcattatacgaatactaaaacaggcggtcccgccgattacgttgcgtttccaaagtcaatcagcgagacgaaagctctgattacgtttgccaatgagcaaaatttaccactaaccgtgattggtaatgccagtaatttgattgtcaaagatggtggtatccgtggattaacgatcattctcacccgcatgaagcaaattcatgcgagtggcaccaaagttgttgctgaagctggtgccgcaattattgcgacgactaaggttgcttgtggcgctagcttgactggtctcgaattcgcagctgggattcccggtagtgtcgggggtgcgattttcatgaatgctggtgcgtacggcggcgaaatgagtgaagttgttgaaacggtgacggttttgacgccagcgggtcagcttaaaaccctggatcatgacgaattagattttggctatcggcacagtacgatccaggactatgatgatattgtcgtatcggtgacgtttggtctcaagccaggtaatcagaccaagattcaagcgcggatggacgaattgaatacgttgcgagcagccaaacaaccgttggaatggccatcatgcgggagtgtttttaagcgaccaactgggtattttactggtaaactgattcatgatgctggcttacagggccatcgaatcggtggtgctgaagtttctaagaaacacgcgggttttattatcaatgtcgatcacgctacagcgaccgattatatggatatgattcactacgtccagaaagttgtatttgaacggtttggcgtccatcttcagacggaagtccgaatcattggtgaagacgtcgttcaaggttagttatgtcaatttaacaaagggggcaaccactagatgccgattatcgaattagtgattttactggcatgtttagtgctgctgtcgaatgtattgagccactatctagtcgcaatcccggtcagtttaattcaagtcgggctgggtctaggagtggctttattattaaatgtacaggtaaaattgcaaacggattggtttatgctcgtctttattgcgcccatgctgtacaacgatggcagagaatttccaaaacaggaattatgggaactacgcggggcaatttttgcgaatgcaatcgtcctcgtctttattaccaccattctcggtggctttttgattcacgtattgatcccaacgattccgctcgctgttggaatcgcgttggcggccattttatcgccaactgatccgattgccgtgcagtcgatctcggaaggggtcaagttacctaaagaaattttgcacttggtcagtggcgaaagcctgattaatgatgcgagtgggttaattgggttcaaatatgcgttagcagcagcggttaccggtacgtttgtactcggtgaagctgttggggatttcttctatattagtctggtcggtttggccgttgggctggcgctgatcacgatcattcaactcattcgggacgtgttacgacgagagggtatcaacgatatcgtgttcaacgtggtgttacagattctcacgccgtttgcaatttatttcattgctgaagaatggttccacgcgtccggtgttgtcgccgttgttgcggccggggtattatcgcacttgcaaaattcacatgaaagtgaagatgcgccggaattacgattagtgacggaacgggtctggaacgtggttgtttacttattgaatgggatcgtcttcctgattcttggtattgaattgccggcagcaacgcaagcaaccattaaaggcgcgcatacaaatacgtttcatgcggtctttgacgttttaatcgtctgggggattttgttactgattcgggttgcttggacatacgcttacatgttgttcaactggttacgacatcacaagaaggctaaacctagtctcagaattgcagcattgtccggtttatcaggtgtgcggggggccattacgatggctggggtcttcacgattccaaccgtggtggcctcgggcaaagcctttccggaacgtgcgctcgtactgttcattgcggctggagtcatcattgtaagtttagttgctgcggcggctattttgccattgatggcggccaaatcactcccctttgttactcggggatccagtccggatgaagacgacgcggtcttggcagagggaacggatgacggtgatgatagcagtgggcaattgccacagttaacatacaagcaagcccgcatttatatcttacagttagcgattcaaaacattgaagaacatcggcggccagctaaccaacgtgcggcctatgatttgatcttggaccagcagtttcagattcggcgtctagaagtggcgtcgcagactgcggatgagttggcgccaatgctgacagatgaattggaacttcgcttagtggcactgaatggtgaacgggcagcagttagagaaatgattgccaataaacaaactagtaagttagctggacaggtctacttgcggcgtgtcgatcggcgcgaacaacgtttcttacaggcgacacatcgacaggggcttccgacactgcgctcattacggttgttgttgacgcgtgcaatgcaagggattcgactatggttagcacctggcgatagcgaagaattacgagtggcgttgttggatattcagcgtgaggcttctaaagctgctattaaagcgttgtcgcggtatctcaaacaggccaacgttgatgagcaacagtttgatcgccaggctctgtatcacttgatcgttcattaccggaatcgcatcgagaatgcgaaaaatgatcacacgttatcacgtgatgattatgaacaacagctgcatggactacgcatcaagagtcttggtgccgaacgtgcgggtgtacagcatttgttagagagtggacaaattagtttacgcaccgcggcaaagttacggcagttcattaattactcggagaacttattgatgctcaatgatattgaggccgatgaagattagttaactttttagattgtaaatcagtagttctaggttataatgatgttagagtagtattgacggtgaatggttaggtttgcaaattaatcattacttaagcggacgaataagggcagccttacagggggaaacatcattatgacagaatcagaaattcatgaacgcttcgtggacacttatatgcatattttaaaatatgtcggggacttcgtttcagtgccgacccggccgtataagataacgtttgaggcctacacggttatgcggatgattgcaacaagtgaggagccgctgacgttggtcaagattgcgaaagagcagcgggtttcacggagtgcgattgcacgtcaaatcaacgtgttattagatttgaagtacattgaacagaccacgaatacgcatgatcgccgaatcaagtacttatcgttaacacctgctggccataaagtggaacaggaaatcaccacggcttccgaggaacgttttcatcaatgggtccaagtctatggtgaaaaacgggcaagcgatacgttgcgttatatcaacgatgcggaacaaaaggctaccgaactgggtttcagtggcttcagtgggttgcatgataagcgggggcggcataccgaatatagtgatcctaagacgaagaattagctaatatttagttaataataagaaacaccgtttgaaccgattatcaaatcagttcaaacggtgtttttgattacgctaggacttatccggtgtttgataaggaaccgttggcatcgtgaatcgccaagccgcgtagatgaggagttgaagtagccacatcatcaagacaaaagcgagcatctttagtgaccacatttcaactaattgtttcacaatgtactgtggcgtaattagtaagtagatggagtgcagtcggaggaatcggccaacgtagacaccgacactagcaaataggaagagtgcggcacagatgataccacgactagcagggagtcgctggaagtgtaaacgttgggtcagttgctgggcaattcggtcaacgccccaggtaccaatgattgtagacaccatcattggcccaaccaagtaagcgaaatcccgccacatcggtaagtcgaagcgcaagagaccgttgatgccatacggcttcaataggctgaggtggaataaatcagtcattaagtacggtgcattcggatagaaaagcaaccaaatgaccgcaatcagccaaaataatagcgggctacgtcggggtgtcagccaaaaactcagctcgatcgggacataagccaaaattgaattaagtaatagaaaatggaacgcgccgtgcaagtcgactgctgcgaagatgaaaaatccccagaatgcgagtcgcacaaaccactgttgtaacctagtcattcagtcacttcccttctagtgttaattttaacagaaatattaatcaagctatattaaataacatcaagcttaatatttattcaaaatctagctaaaaagcgcagaccctgctgaaatcgcaccgcgagaaccgggttgccgtgctataatgtgaaagtaaatgattttcatgaggaggaggactatgactttcaattggagcggtttgttgaccttacaaaactttgtccggctccttgacattcttgcggtatggtttgtcatttatgagctgattgtgttgctgagaggcactaaagccgtacaactgtttcgcgggatcgttgtcattgcgattattaaagctgtgagtgttttgattggtctggacacggtttcgtggattatggaccaaattattaactgggcagtcattgcaatggttattatattccagcccgaaattcggcgagggctagagcatttagggcgtggttccatgtttgcacgtggtaagcgtcagaatgaagatgaagagcggatgattgccgaactagataaagccatccaatatatggccaaacgacgtattggggctttaatgtcaattaagctgggcacgggtctcgaggattatatcgagaccgggattgccttagatgctgatatcaccggcgaattattaattaatatctttattccaaatacgccgttacatgatggcgccgttatcattcaagataatcaaatcaaggttgcagcggcgtacttgccgttatctgaaagtaatctgattcccaaggagttaggaacccggcaccgtgccgcggtcggaatcagtgaagtaacggatgctctcaccattgtcatttcggaagaaaccggtgaagtgtcgattactaaggacaatgagctgatgcgggggatgacgcgtgaaaactacttgcggtatttccgccaagtcctattaacgcctgaggattcaaccaagcaaaacgcgcttcaaaattggtttggacgagttttcggaggaggtccccgaaaatgaaaaaatttatgaatagcaattggtcaatgcggctactagcactgctgtgtgcgctggtgctcttcgcctacgttaattcgttaaagacaacgcataacgccagtattttgacgaatagttcatcgaaaacgacattgacatctaaccgtaaagtgaccattagcgcgcccttggagctgaacgtgaatagcacgaagtactttgtaacgggttatcccgaaaatattaaagttacgattgaagggccgtctgctttagtaacaactacagctaacacgcagaattttaaagtttatgctaatttatctaagttggcagttgggcggcacagtgtcaaagtcgaagtcgatggcttgaataaagaattgagttatggacttagtcaaaagtacattcatgttaatattcagccacgacgaacggctacttataaggtcagcgcagacttcaataaagccaacgtagcagatggttatgaagttggatcggcacggctcggaacatcatctgtcaaagttacgggcgccgtcagcgaagttagcaaagtcgcgaaagtcgttgcggtcgttaataccaacaagaatttagagaaatccgtgaaccagcaggctatcattgaagcattagatgccaacggtcaaaatttgaacgttgtcttgacgccttcgaccacgtcggtgtatattcccattacgcaggcgacaacgacgaaagatgtgccaatcgatttgaaagccagtggcaagaccgcggcggacaccagttattcattctcatctgacacgaagtcagtgacggttactggcacgaaggcggcattggcgaagttgaagtctttgccagtcaatgttgatgtgacgaatgttgattcaaccacgactaagacggtcgatgtttcgactagcgatgaggatgggatctcgtcagttagcccaacgtcggtcaaagtaaaaattacagttaaaaatgattaatcatgacacttttgaaatgaggtaaattataatgaaatattttggtactgatggtgttcggggaattgcaaattcaggcttaacacctgaaatggcttttcgtttaggtcgtgctggtggctacgtattgacggaacatgcggaaaacaagagtacgcaaccacgcgttttagttgcacgcgatacccggatttcgggccaaatgctggaagaagccttgattgccggcttgctttcagccggaattgaagttttacgtctcggtgtaattacgacgccaggagtggcctacttagtacggatccaagatgctgacgcgggtgtcatgatctcggcttctcacaatccagttgaagataacgggatcaagttcttcggtggcgacggcttcaagttgtctgatgccaaggaagaagaaatcgaagaattactggatcaaccgaaagacactttaccacggccagcagcagaaggtctggggacagttgctgattttccagagggtaatcttaaatattcacaattcttggaacaaacgattccagatgacttaagtggcattcatttggctgtcgatggtgccaatggttctacaagtaacttagtttcccggatctttgcggatttgaacgtggaatttgatacgatggctacggcaccagatggcttgaacatcaacaaaggggtcggttcaacacatcccgaagcattatctaaattcgtcgttgaaaaaggcgctcaagttggtttagcctttgatggggacggtgatcgttgtatcgcagtcgatgaacttggaaacattattgacggtgacaagattatgtacatctgtggaaaattcctcagtgaacgaggcaagttgaagcaagatacggtcgtcacaacggtcatgagtaacctgggcttatacaaggccttagaagcagctggtttgcacagcaagcagacccaagttggtgaccgctacgttgtcgaagagatgttgaaggacggctataaccttggtggtgaacaatctggtcacgtggtcttcttagactttaatacgacgggtgatggcatgttgactggaattcagttattgcacgtcatgaaggaaacgggtaagaagctttctgaattagccgccgaggtgacgacttacccacaaaagttagtgaatgttaaggttcaagacaagaaagccgctttgaacaatgataagatcaaggcagttatcaaggacgttgaagatgaaatggccggtgatggtcgcgtcttggtacggccttctggaacccaagatttattgcgggtcatggcagaagcgaagaccgacgaactggttagcgcttatgtagatcggatcgtcgatgtggtcaaagctgaagttggcgttgaataattaagtgatcagaccgatcatcaaaaaagtcgttactcctagagtcgcgactttttttgttgccatgaaacgaacggttattgctaaatgcggttaactggcgactgtcaggggacccagtgcctcccaaaccaatttgaccgcaaaaaagttacaaaaaattcgaaaattcgtgatgcccttgatttatcagcgtttgagattggtatacacgctaactaacacgtataccaatataatatattgttgacttttattagatgtaacggtaaagttaacttgtttctaggagatataccaattggaggttagactagaccaattgttaattggttaaagcggaatagcgccaggactttagaatctaaagttgacgaggatgacgtttatcgataatcgacgggtgacgtcagggactgcactctacaggtcaattacaaaaaccgactgtgaggttggtgacagatatattgaccacgcagctagaaacaattcaaacagtaaaggaagattaatttatgtgtggaattgttggtgtaacgggtaaagatagtgcagtatcaatcttattgaacggattggaaaagttggaataccggggctatgattcagctggtatctatgtcaatgatcaagatggtcatgactatttagttaaggaaaagggtcggatcgatgacttacgtaaagaagtaggtgaagctgttcatggttcgaccgggattgggcatactcgctgggcgactcacggtgaaccgagtgttgccaatgcgcatcctcaagtttctgcggatggccgcttctacttagttcacaatggtgtaatcgaaaactttgaagacttaaaacagacttatttaagtgacgtgacttttaagtctcaaacagatacggaagtcattgttcaattagtcgatcggtttgtcaccaaggaaggcttgagtacgttggccgctttccgtaagacgttaggtctgctcggccattcttcatatggattcttactgatggataaggaagatcctgacaccttatacgtcgcaaagaataagagtccattattaattggggtcggcgaaggctttaacgtggtctgctcagatagtttagcgatgttagaccaaacgaaagatttcttggaattacatgatggcgaaatcgtggtcgttaaacctgatgaaattaaaatcacgaaccaggccggtgaaccagttgaacggaagccattccatgtcgacattgacgcagctcaagctgacaagggaacttatccattctacatgttaaaagaaatcgatgaacaaccgaatgtgatgcggaagctatcccaagtttatcttaatgatgcgggtgatccaatcatcaatgatgacttgttaacagctcttaaagcagccgatcgactatacattgtggctgctgggactagttatcatgctggtctggttggtgcaaagttatttgaatcgttggctaacgtgccaactgaagtgcacgtttcgtcagaatttgcatacaaccaaccattattatcagcacatccattcttcatcttcttgacccagtctggtgaaactgctgatagtcgtgaagtgttattgaatgtgaacgatcaacatttcccaagcttgaccatcacgaacgtgccaaactcaacgttatcacgcgaagcaacgtacacgttgttattgcatgccggcccagaaattgcggttgcttcaaccaaagcctataccgcacagattgccttacaagccatcttggctaaagcgttaggtgtggccgttgaccaaccagctgcaacagctttcgacgtgaaacagcagttggcgttagtcgctaatgggatgcaaagcttagttgatgaaaaggctacttttgaaaagattgctaagagtgccttattgaatacgccaaacgcattttatattggtcggggactggattacgccgtctcattagaaacggccttgaaactcaaggaaatctcttacgttcaagctgaaggtttcgcatctggtgaattaaagcacggtacgattgctttgattgaaaaggataccccagtgattgggattattacgcaaaagaataccgctgggttgacccgctccaacttacaagaagttgctgcacggggagctaagacagttactatcgtcaccgatagtttagctaaagatggtgacacggttatcttgccaacggttgatgaacgattaacggctttgcttagtgttgttcctggtcagttattggcctactacacgagcttaaacaagggcttagatgtggacaaaccacggaaccttgccaagagtgtgaccgttgaataatttaaagtaagtgtgtgggcaccaagaaacgtcaccgttcgattacggtggcgttttttgattgcccacaaagcttttgcataatttttaactactaatattcataagactattgtgaaagttgacaatcttttggtatgataaagtaagcggttgcgataacacaactaaataattagactattggggatgaatggtcatgctgaaatataaatattttgcacagccaattaataaccttggaaccaaccgaacaatcttgtatgagttattattacgacagtgggatgagaggcaacaaacttggcgaataccagcgacctttgaaatagcgccaacagaattgattcaattgctggattgcgctattcaggaattaaataaccatcatgtttccatcaatttaacggcgcgtcagtttgctaatcctgactttcaagctgcaattagtcactatgtgcagacgcatttgttaccacgagaactaactgttgagctagttgcgacacctgagctaagtgagttacagcaattaagtgttgggtaccgggcagctggtatattacttgcttttgatgatgttggttctgataacctattccaacagatcaaaatgatgttgccatatgtgaatacggttaaattcgcgttacaaaatatgcgaccgctggggaccccaactacggatgcaattgtttcgacgctcaaattttggtttgataaggcggaggaacagcaaatgctatttacctttgaaggcattgaatcagcggctgatgttcaactggctaatcatctaggcattacgcgagggcaaggatattattttgccaaaccgcaactacccgcgacatttatggcatgacaataatggtatgctacaatagtattcgtagcaatgtaactgagtgccatgttgatgtttaatcggctgaatcacatgacgagacgaggccgattttgttagtaaatgataaaagatggggtggctacttgtggcaatcaatttaattgcaactgacttgaatggaacattattgcatcaagatcagcgttttgacaaagaacggtttaaacgggttttggcgcagttacgggcgataaatgtttccctagtactttcgtccggtaaccaatatgcccatcttagacagttatttaaagatgttatggcggataatcttatcgttgttgctgaaaatggggcgtcgatttatgcccaggaccgcttgatctttgatggtagtctttcagcagaccagcaacgaaagtttgtgactgttgatcgttaccagccactattcaaagacgcatacgtaatcttagttggtagccatgggtcgtatactgagttaggagcacctgataagttagtagcgatggcccgtcagttttatgatcatttacacttggttgcggatctggccactgttgatgataccgttaaaaaaatcagtatctcaacgtcaccggaccaggctgctgatctggtggcacgagctaatgattattttgatggcgagttacgtgcgcatgatagtgggtatggcgtcgtagatttggttgatcagcgggtcggaaaattaccagcaattcaattcttggcgactaaacttgggttaactgcagctaatgtgatggccttcggtgatggggcgaatgatgtcccattattgcgatatgcagcgcacagttatgcgatgtgcaacgcaccggcggacattcaagccgcagcaaaacacttgacggtcctggataatgaacatgatggggtattagcaaccattgaacaagagttgttaaataattaaaagcctataactagtcagtaaaaagctgagctatcgaatgaacatcgttattcgatagctcagctttttgggtcctattaaagtgattgattagggtagaagaattgatgaatgccataagtgttgagcgaaactaaacgctgctttagttcagccaaagatagtcctaaatcaccattaaaatagagccggaaaaaggttaaattgttgtggatcaaaaagcttgaacagaccttagcatcgattgcagataaatgatagtttgtttgaatcgtcgttgtaagccctgctaccacggcagcgtggattttccgagacaaaaaactgtaatcatcattcaacaaaatgactcggtgaaaagcttcagattggcgaaaataggtcactaagcgatcaaagattaagccgggttggctaatatttttcttgaaatcttgcgggtcaatgagtgctagaatcttatcagcaccttcttgaacgaacgtttccgctaaatcgtcaatggaatcgaaatgtaaatagaaagttttgcggttgatattagcgacacttgtgagctccttaacagtaatatcacgatagcgcggatactttaaagcaagcgtccgaaaagcctctttcagcgcagtctgggtgcgctgaacacgtaagtcagtagctggcataatctgatcctccttattaattacatttgatggggtggtcattattaaaccgccgctaaatgtactagtcgttaagccacatgtgggtattattatcataatagcacttattttgatagttaactcgtcctgagtcatgacagattaactcgcgcaacgtgcataatagcatatgcgcctagtaggtaaatggtaatgaagccatgtccgtcgactaaaatgggttaggagattttcgttcagtcaatggtatggtgtaacgcattattagtgagtcaaaaaagctcccagtagtttgcattctgggagatcaatttgaatcattcttgagtggttagacgtcgtaaatattagaaaaacgataggccgtttggtaggttacaggaatattaggttcgataatgatactgccaaattccttgtggtgaatagcatccggtaatttttgtgcttgcagggaaagaccaagttgagaacgcatcggtttaccgccattgagtcgataacgatcatcacggtaattagttgcactggaaaccacgactgccggagcgttcgttcgcatcgtgactttgcgtccactgatgcgatctagtaattctacttgtggatatggggtgtcgtttaagacgaagccgtgatggagcccgcccttgatgttagcaatctggggcccaacctcgactgggtcacgaaaatcaaatggggtgtcggtgacccatggcaacttaccagttggaataccgtgtttgtttaacgcggcgtactcgtctgcattgattttaagaacatggtggtcaatgaggcgttccgcatccccacttagattgaagtaggtatggttgctggggttgaataaggttgttttatcacttttaccagtgtagctaatagtaaatttaccgtcgttatctaatacgaaattagccgtgatcgtcattgtcccgggatagccgttctcaccgtccaaggtaatatattgcatgacgagtccaacttgatcactagtgtgcagtttacgttctaaaaaccatggttcaaatgaaatttgaggcatattaccaccgtttagatgattttcgcccgcattttgagttaagtcatactgccgccaccgggcatttttgatgatccccgcaacccgagcgatggttgcaccgaaaaaagattgataggtgatgtagtcggcgccgtcgtcaaatcccaagacaatatttgcaaaattaccatctttatcatgggttttgatcgcggtgactgtggcgccccagtccataatagtgacgctcatatgatgattgttcactaatgtataataattaatcccgttcccctgatgctcgattattttcataatgccctcacacccatagctgcctgacatgttaccgcctacttttagtatatttcattcttaaagggaatgcgaataataacccagcaagtgttaatgcgagagtgacagggttagttgctagtgaggtcaatttaaataaccagtgtaaataattataattgattgttgataataattaaaattatctaggttgagaagtttattttaaatcttggtaattgtgaatggtaccaatctattaaataaggtgaattaattaactttgtgcaagtaaagacggcaatttagtggcgaacatggctggctgagggtgttagaaaaagattaatgagtaaatagaaataatttatctatttattttggctaactgttgacaacgcttacaatatcgcttattcttagtttgtaaggtatttaattaccttctaatcaattctctttctctcttatgccgaccactatctgcttggatagtggtttttttgagtgaaattagcgaatttatggcggaatagatgaagataaggctctcttgtaatttttgaagattgatgtttactcagaaaaaggagtgctcggctgatggtagcattttggggctgactgagttagtttagtgttcatcaagtacaggtgattaggcataccaagcctgatcacctggcaattactggtcagttttgacacgactgccaaccccgcttatactaaaatgtgaagtgagggattgcagttgaaaaaccatgaagtattagacttaattcaagaaataacacgtaatgatgggacctcatacatggagatcggaaacatgttgatgaatggccgcgctgagttagcagctgaacgtggttttattaagcaagtgcggatattacaactaaacattccgcattccacgcatgttgccaagtatgagcaatatattaatgaaacatttacgattcccgatgaaacgatggatcattgggaagaatggacaaaaacacctgacatgcaagctgaggtcgatctgattttgaaagaaaatcatattggctaaaagctgttagccaaagtctagcgcaggagtgtgagtttatcaaacggcggttgttttttagtaggcgttggctcaaaagttgaactttcagaatgtcaattctctaagctcagcttttttgtttggatcatgtaattgactgattgtggtgatttaattgcgggtgcgtggtgggggaaaataacttacaaacgctagtatcagtgttattatcaataagcatgtttaaggaggctcgttattaaatgaagaatggggcattgctacaatttattcaaagtcatttccagacccgttttcgttttcgtaacgcgtttgagacccaattgactgttcagattttaagtcgattaattggcgaacatccggaaagtttgttattgactcggcgagatgttgaagcgttggcaggctgctcattggacgcgccggcactacagcgagaatattttccgcagcgtgcgatgacactgttagaaacggcgttagatgagctggttacgttaagtgttatcatacaccaggatcagggcaggacccgttatcccttatttcggagcgtacagcttgatcaagtgtgtcaacgaattgtgtttaacttgaacctggacgtgttgccacaattaacggactggtcacgggaattacaacaagaacaggagcgattttaagtgacaaagagtgtgattgaaaccttacaggaccatcgaacgcggcgacaatttaccactgaaccaattagtgatgcgcaattcgcgcaaatcatcacaacggcacaacaaatgccgactagccaatatttacaggcatacagtttgattgagatcactcagcctgcactacggcaacaattggccacgattacgacgatgccaacggttggtgaaaacggccgtttattagttgtggttgcggaccaacaccgcaacgtcaagctagcaccgggcgcaacgacgcgtcgggcactgagtgaatttgaccgctttgctggtagtattgaagatgccacgctgattacagcggcgatggggatggtcgctgaaagcatgggtcttggtagcgttgtacttggatcaattaacaacgacacgcaggcggtgattgacgcactgcacttgccggacttgacgttacccgtctttgggttgcagttagggcacccagcggatgttcctgaaaagaaacctcgattagggttgcccgctgtgttgtttcaagatacctatgctgagcctgcgagttatcaggcggagttggaccggtttgatggcgttttgaatcagtattatcaacatcggagtagtcacgcccgtacggaacacttagcgcacatgacgcaggaagcgacccactcagcggccaaacggcgagagtttttgacaatcgctaggcagcagggctttttgccggaattagaccaataatcgttaccataacactaataattagaatggctgagcgaaaaataaccgttaatgtaacgctcccatgtcgctattagctgacatgggagattttttggtacctgggaggacgaatcttaacattaaaataagattaaatattgttatttttactaattataatataattaattctgagacgatgtttactaagcaggcccgggctgcgttgcagattcgagtgaaagctgagtcgatccttattctgatgtgtgatagtaacattgttgcaaggcttgaaaggggcggataatgtgatcaatgccaacttcagaaaactcgtcttagggcgagcagtgggtaacgctggtgacagcatctacatgattgccatgaactggttcattctccaattgaccaacagtgcgttgtggatcggcatcatgaatgtggctattgttttaccgggcgtgttgttgtttctgtttggtgacagtatcgaccgacattctaaacgccgattattagtcgcggttgaattttcacagttagtgatcgtggtcatgctaattggattagttgcgttacatattaagttgccaggtatctatgtcgggctggtattcgtcgcggccctttttggatcactagcttatccgattcaagatacattagtaccgctgctcgttgagccagaccagctagttcaagcacaagcggacatgtcaattgcctacaagggaacggattacgtgttcaacgcgctgtcaggatttttgatcagcctctgctcagtgctcggtgttttaatcatggatgcagccacgtttgtcgttaccgttgccacttttaggcggatcaaactcgctgaaccccgtcagcaacacacgcgggaaaagtccttgtatctcaaccagattttggttggtttcaaaattatcagcactgatccgctgctgcgtttattgacgtttgcgagcgtcgtcatgaatttcttctttggcggtttgaatacgtacgtcgttttatttgggcggcatttcggtggctcgatctactacggtattttggagtcgatgtcagccgttggaatattattagggatgacggtagtctaccgacagttaaaaaagttgaccgttcggcagtcttacctcatcggcaactttgggcgcgcgttattcatgatcttgacagtagtgtcgtacaaccagttctggctgtttgccatcatttacttactgagctttgtctttcaaggactgacgcaagtatttgagacaccgatgattcaagcgacggtcggttcagaccaactcgggaaggtaatgacctgcttttatacgctggtttccgtgaccttaccgctgggttcgctagcgttttctttcctagctgaccgctttgatttacggctattcttattactatttgccctcttttatgccggcatattcctgctatttctagccagtcacgccttcaaaaaagtagacgaactacaattatcataaaccccacgcgatattcattaatctgtcatcaatcatgattaaaacgtgccgattaggtggatttctgttcgtcagcaatgatcgtcctattccgacctccggggctgggtgacaattgctggaacgtaagccgacatcgatttgagctaacgcccaactcgcgccatctcaaatacgagtcttattctaagccggaaggaaatcacttccgactaagaataatttggctactgagcattgtcacccagcccctccagtctcaagagtgtgcggggccacgagttgaagccgagcattgcctagccaacggattaatgcggttttggcattagtccgttggcgtagcaagcacaggctttagtggcaccgaacacgtttcgggaagccgctcgaatggctgatgaacgaccacttaactcggcacaattggtcgttgactattttgatacaggaactttaaacgagacgttagggttaccctaaccactttgttgaaacgttcgattactactatggtgattccaaaatagtaagctatcacaatgtcattttctgcctgacagttgctcgacaaaattactgtttatgaagaacaatgatgagtccaataaaagttgggtacatctccgtctgccattcgaacactgtcccgactggaaggcgtttctgacaatgcccagtggtgaaatttcacttagcaagcgtcttgtgcttggttagtgaaaggccagtatttaagacgtgggcttcggcttaaatctgttcccaccacgttccggcaattgacagaaatgcctggaagtcggcataggacacactaactaagcaagtttacgctaacctgaactttttccagcgggtctaagctggttgcttttgaacttaaaaacttggcacgttttaatcatgaaaagcaacaaacacagtgcggattatcggatagatgagaatggcagtgatggactcaaggaaaatagtgctgaactaaaaacgtcgtgactgacttcagtcgcgacgtttttgattagaaatttagtttagttggtacttgattgggcgtcgattgggatgtgcttgaatagttgggctgctttgacggcggcttgccagccttggtaaaggttcgcacgttggggcgcggccattcggggttggaagacattgccggtttggtggattgatttgagttcgtccaaatcttgccagtatcccacggctaggccggctaagaatgcagcaccgagtgcggtcgtttcgaggtcagcggcccggatgatcttgacgtttgagatgtcggcttgaaattgcatcagccagttgttgcgggctgccccgccgtcgaccatgagtgtgggcatggtgatgttggcatcgtttttcatcgtatcaatgacgtcgcgggactggtaggccagtgactgtagcgtggctttaacaaaatcagcccgggtggtcccgcgggttaagccaaagacggctccacgggtctcggaatcccagtaaggtgcgcccaatccggtaaaggcgggaactacgtaaacttcgttgtgattatgggactgttgagcaagactttcggattctggtgctgattcgatcagttgcatgccatcgcgtaaccattgcagggccgaacccgctacgaagatggagccttcaagcgcgtaattgatgttgccatcaagcccgtaagcgatggtcgttaaaaggttgtggtcggataattgcggttgctcgcccagattcatgacggtaaaggcaccggttccataagtatttttgaccatgccaggttcaaaggccatctgaccaaatagtgcggcttgttggtcgccggccatcccgctgattggaatttggctaccataaagcaagtagtccttagtcgtgccatagatctcagagttggaccgtacttctgggagcatcgcagcaggaatgttcagtaggttcagaatcgtttggtcccattgtaagtcgtgaatgttgaataacatggtgcgactggcgttggtgtagtcggtgacgtgggtctcgccaccagtcaatttccagacgagccaagtatcaatagtcccgaaaagaagttcgccgcgttccgcgcgcttttgggcaccatcaacgtggtctaagatccagcgaattttcgttgctgagaagtaggcgtcggtcactaggccggtgtgccggtgaatcagatcgcccatacaatcagcgatgagttgctcagctaacggtgcagtttgccgggactgccaaacaatggcgttataaatgggtagaccggtttgcttgtcccagacaacggtagtctcacgttgattggtgatcccgatggcttcgatttgattaggtttaatattagcgtcaattaagacgttagcgatcgttgaggaaactgcgttccagatttcagtagcgtcgtgttcgacccaccccggttgcggaaagtattgtggaaactccttttgggcgtcggcaactttttgaccggcgtgattaaaaataatggtgcgggtactcgtggtcccctcgtcaatggccatgatatatttggctgacataacttgttcctccgaagattgtaatcaataacatcatctttgatgctagcatggatgagtggatttgtgaataaatatcaaaaacttaatatataaactggcgtcccacgaagtatctagaattaatcatcacacccataccaatccgctggaatgaagaaagggttaccatgcttgttttgataatattacttttgtacaacggttagtaacggtgttgaactaagattaatgaatatttgaaatgtagaccaatcagcatataatggggactcaaatcggtgtgaaatggaggattcctagtatgcaaaaacgacgcttttttcttaaaggctctgctgccgaggttgcttggctcaatcggcaggcggcgcggggctatcaattgacggcgattcacggtctgagttatcagtttaaagaagtctcacaagcacgtcagttgattgccgaatacatgccacagccgacgttacaagctatgacgacggtcttccaaccacttactagttatacgtttcatgatgatatgacggtggtttattcaactgtggcccctaaacaacgagtggtcaacaatgatcaacaataccgcttagcagtgtatcgacatgctcgcgatgtcgccttgaactggctcaatggctgggtgttggtagtctggctcatgatgagtgcgacgattgtgattagctcgcaattacaagcaacgccactattaacccggttgttattacttgggttggcacttggtgctggggtgatggtggcaggtattatcgttggtgttcggacagcgattcgttgtcaccgggaagtgtgtcgcttgatccgtatcacaggagacgatcacgagacgtggaagccgacttttcacgtgtttgtttaagcatcaacaggccgctcccgatacgacttgctgggatgatttaggcaactggcaactggcactgcataatcagcgtggggattactactatgagttaaaaacaacattgagtgaattagaaatcactaatacactggcacaacgcttttcaaaacaggacttttccgtggtatcgtggttaggtttgtacgttgtttgaggcggatatcatattaattatgtgaatttagtgtgactttttttaaaaaggacttgttttttatcataaaagcgtgtataaatacagacataatcattgcccggtagttcagcggtagaataattgactgttaatcaagaggtcgctggttcgatcccagcccgggcagttggtcatgtttagttaagtagcggtatctcgtgaggtaccgcttttgtcggcacaagtacagaatagcgctggcatttgatgggtaattggctggcagaactttagaaataattaactaaaaaagttctgacaaaccttgactattcttgactaaaaccgtatacttactatattaaagtaagtggtgtaaagtcacttgctgaaacttaggaggaattcatcgtgacagtaaacttatattattcaacgtccagcaagtctagtcgtagtgcacgagcatggttagttgagaataacattccatttaatgaacgcgacattattgctaatcctctggatcgcgatgaattgaaacaaatcctccggctcactgaaaatggcttcgaggacatcgtttcaacgcgttctaaggctttcaaagcattacacattgatttgtcggacttaggcttcaatcagctattggacctattagttgaaaaaccacaattactcaagcggccaatcatttatgatggtcggcggttacaaatcggttataacgaagaggacattcgggcatttttgccacgttcggtacgtaagtctgaattacgtgaaattcaacaaaaactttatgacgatgatcaacaagcagttggttaatcggatttagcgtttgagacgaaagcggcccatcaagaattgtgttgatattcttgatggggcgtttttttgtcgaaagaacaataccagccagccaccagggcgcgttaggttgcgtgtcttcttaacagcgtatcgcgttgtagggcgttattttacttgccgattaccgcccgttacctttgctgagtaagcagattccttggtataatcagttggtttgtgtacaatgtaaaaaggcttaaaggaaacggagattttaacataatgagtgaacaagaccaggctgcctgggcgatccaggcactcgccgctttgaagacggctgataatcaagttgttgtggagagtatcattaaggtcatcgatgaccaacaggctgagattgagagtctacggggttcaatggaaggccaattatggagtccaactagctggcatcaagatcagcaagcgcaacgtgccgcgcatgaggacaagtccacaactaaccattaaaattgagaagacgccacaaaagacggttgttagactattattggtctaacaaccgtctttttgtcactgcgtttgtgaatttaagttgagcgccatgctgtgatttacggcgcagtcgagcattaagctgccagcaagggggtgcaagcttcaggatacagttgtgatcagtaatccgtgacgcttgtcttgcggtgctgggccacaaattggaaggtagctgccacgagtccgccaatcaggatacccgttgcgttggcaatgacgtcgttgatatcgctactgcgattgatcagccaatgttgtgacatgaaatattgcagactttcaatgctggcacccactaacaagcccgttaatccgaggcccaatagtgggtagtgatgaaagtggcgtttaattccccagcctaagggaatcgtcagaatgatattttcgataaagcccagcccgtgaagatacaaccgtgataggttcacttggccgacaccagctggcatcacgtagatggcagttccgtcgaatgacagcggggtaaacaaaatcacactaaggccaaataagtaacctaagccgagtagctgccgcgtccgggcttgtggctggcgaacgtgggcaagaatcaccaaacaacttagtgttgcaactattaaaataattctgaacggttcccaacgcatgcacaccactcctcggtttggattaactgtatcttaccgtaaactcagtggtcagaagtaaagaagacgtgaagcttaatgaagcctttaacggcttaaccaaatcccaagtaaatcagtggttagatgaccgtgattgatgttggtcgtcagccatattcgcaattggtttcgtagtcagcgctaaagcagctacaatcataatgataattagactgaaccagagtgcgatctgggtgccgagggtggtttgcatcgtactcgaagcactcggtgccatgcgggtgcccaatgtaatcaagacggccataatggcggtaccgagcgaaccagaatactgttgtagggtgttgaaaagcgcgttgccatcgcccattagttggggcggcaattgttgtaaaccatacgtcagggcattgttaaataagcaactgaacccaatttgaaagccaacaaataagccaacaaataagccaatgatcaagccgaccgagagatgctgggctaaccctgcgagacttagtgttgccaacagtaaaaagccactaccaatttggaatggtcgccgaatgccgcgacggtccatcaatttaccagccaaaggtgatagtattgctgaacataagcttcctgctaataacattaagcccgacactaacgcatttttacccaaagcgagttgtgcaaaattagggagcagaaaggtcagtccaatctgaatgaattgaatgaagaagtaaatgagaagcgctcgggtaaagttaccctgttggaagacggccaggttgattagtgggtgcgtggttcgggttgccgaacgggtaaaagtcagtacggcgagtaccgctaataacagtggtaaccagacgaatactaagcttaagccatgtgtactaaggttattgacgctaaaaatcagcaggatgagtgccgcgacgactagcccgaattggcataaggggaacggacgtgaccgtggtgcctgcgtttggcgaatagttttggccgttatcagccaagcaatcagaccaaacggtagggtaatgccgaaaattaagcgccaggataatagttgtgtcactaagccgccatatgttggtccgagtgaaggggccaatgcgatcaacattccagcggtccccgtaaaacgaccctgagcagtgaaaggaacctgggtcatgatttgcgcaaatactaatggtaatgccaatccagttccgatggcttgaatgattcgaccgaatagtagtaaccagagctgtggcgcgactgtacataataaaccgccaagaacgaaaccagccccgccaacgttaataattgtccgccaacggaagcgttgttgaataaacgccgtaataaccatggtagcggctacggcgagtaaataggcagtggtgacccattgaaccgttgctagagtggtgtggaattggtgcatcaaggtcggaaaggtaacgttcattgatgtttcaactaaaataccgcaaaaagccagactggcggtgccaaaaattgcaaccttcgtttgggttgggatgacaggtgttgttgtagacaaaataaaacctccattgatcaaggccagctcgtttcgtatgtgaaacgacgcttttcttgaccaacggagattccgttgtaaagatatacaagcatcaaagacgaccttgatgaatttattaatgatttaatcctagcatactactgataaaaatgtcagtccgctttttttattcgctgactttagcgctttgttcagctaaagcagtcaggtgctcgaataggatgccttcacgcagtccattttgagagaaaatcatccggtcagaatctaaaaagcgcatcagactaatggcaggaatcatcccaccaacaataatatcagcccggtcctttgctaatccaggaatagccgcgcgaccagctgcatcctggctaatgacagtattgaatgtgtcatagatggcgttgtcacgtagccgataaccgtgaatatcttcaaagttgaggatattgcatttgcgccggttaattttggctaacgttcggttgctaccacccaaacagacgagtggtaagttgagaccgtttcgcaaccaccagacgctattaaaaattttatcaacgaaagtcatcgttttaaataattgactagcggtaacttggtcgttgaggccgaacttttcggataaactgaccgcgccgattggcagactgattaggtccttggcttggccgtttacgataaggacgagttcgcagctaccgccaccagtatcgaccatgacgcagttagtcgttggaagcgtattgactacccctaagtaatcgtaataggcctcggttgttccaggaatcacttcgatatctaggccaacatcatttttaacgcgtttgagaaatttcttttggttgctggcctttcgcgttgcggcggtcgccacggccttgatagttaagttaggtaagtctttgtagacggcagcaaacgactttagcgctgcaatcgtgcggtcaatggcctcggcttgaagggtcggcgtatccgtggcgttttcattctcggataaacgcaccatttccttgagtcggtgagtgactgcataactaccgtcttcctgaatctgtgtaattgtcattcgacatgaattggaacctaagtcaatgaccgcaaagttttccatcgctaatcatcctctctatcaagatctgaagcatccggctcattcttgggactcatcattggaatgaactggtgcgcgttgctagtgggcgtagtatcgccgtgatcagccttgactgcttgctcggcttcgcgaatgaattcggcctgggagtccaaaacctctaagccgcgcccatccacacgggcgtacgtattatctggttgcaaaatgcgcgttttgaccgtgtcagcccacatcgtttcaaaaattgtcatcgcacggtgactgatttcaggttggagcagtgggaacaataattcgacccggcgatttaggttacgggtcatcatatccgcactggataagtaaatttgtggttcaccgtcgttgctaaagtagtatatacgactgtgctccagaaggcgaccaatgatcgagtggacctcgatgttatccgagatgcctttgatgcctgttcgtaaacaacaaattccccgaatgatcagttggatcttaacaccggcgtgagaagcttcgtagagtttgctaataatctgcggatcggataatgagttcatcttcattttgacaactgcgggctgaccagctttggcaatggcaatctcatcgtctagcttttcgttgataaagtcgcggatgccatctggtgagatgtgcaatttgtggaaatacggtggttcagaatagccagataacatgttaaagatgttggaagcatcgattcccatgtctgtatcagcggtgaagagccccatgtccgtgtagaaatgggcggtgacatcgttataattcccagttcccatgtgcatgtagcgcttgataccttcattttctcgccgaacaacgagggcaagcttacagtgtgtcttaagcccgatcaggccgtagatcacgtgacaacccatttcttcaagttttttcgcccagtgaacgttattttcttcatcaaaacgggccttaacttcaacgagaacggttacttgtttgccgttttgggcagcctgcccgagatacttgataatcggtgaatcagctgatacgcgatacagcgtcatcttaatggctaacacgtcctcatcttccgcagcttcatggataaagtccacaacgggtttgaaatcatcgtacggatattgcattaaaatgtcgtgatccttgataagatcaaagatggatcgttcgcggtacttcgcgggatagtaggcgtggtattttggataattcaagtcttcgtggccctgcacagcttttaccagcttggataagaaggtcaagttgaggggaccgttgatgacgtataacgcactttcgttaatcccaagggctttagcgagtcgcgtgcgttgatgcttgctcatactcttttcgacttctaagcgcatgaccttaccgcgttcacgcatctttaattgtttttgaacttcctttaataagtccgaggtatcctcttcggtgacatctaagtccaaatcccgcatgacgcggtaacagctcgtttccttgaccgtgtagttgataaatagtgagccgacaaaggctttgataatttcctcaatcagaataaactggttcggtgtgcctggcaaaacgaccacgcgaggaaagacgtccggcacttgaacggtggcaaacttgcggtctttcttatccccatttttataaatccgtaaggcgatgttgagtgtattattcccaatgaacgggaatgggcgtgaagagtcgtctgccatcggtgttaaagccgggtacagctcatcgtcaaagtagttcttaacaaaggcgtgttgttcctcgtttagatcagccatcgacaagagatgaatcgcgtgctgttccagcaatggcaaaagcgagcggtttaatgtattgtattgacgcttgaccatctcgtgggctttatcactgattgcactgacttgatcagcagcggtcagtcccgcgggatccggtttagtgtaattgactgacatcaatttacgtaatgatgcgacccggaccgtgaagaattcgtcaagattactctgtgtgatcccgagaaaacggacacgttctagcaaggggttatccttatcacgtgcttcatcaaggacacgatagttaaaatcaagccagctgagttcgcggtttgtataataactttctttataataattcatttaacgtaccccccgtagtttaatcactggtgttaaaccaaagacttctttaaagaattccgctttttgtgcgaatacccaattttctaagaagaggtcatcatgagcaaagcaagtaatgatgacccgtggattgcgaattgaaacggaaattttatcaattttttgtttgcgaccgtcatccaaagcgtccgcaattctcaagatggcggatagtttggagactaataagcgttgttcgacttgtaagtgtccaaaatggcgaatgtcttttgatggtgtttgcgcgctatggtagcgtgaaatcagggcgaccattcgtttttcggtatcggttaatcccatgagttcagtggcctgcaagatatagtccgaatgtaagtaatgttggtgcgggtcaatgtagctcccaacgtcgtgcacgatggcggcgacttgtaagagtaagcgctcgcgtttgcctaagtggtgtagcggtttaagctggtcgaacaggtgcagtgagaatttggtgaccaagtcgcgatgcttaggttcaacgttgtacctgtccgcaatgttcttagctgctgttacgatttgatcattaaagttatatttcttatagcccaacttaatggcttcttgaataattaacccatccagcacggtcacgttgccaagccagattttctcagcattagtgagttgtagtaactcgttaataagtagtaattcgggcacgattagccgcacgtcttcttcatcaacttcgtatttatccattaaatactggtcagaagcgttcaacacgtcctcatataaagcttgaaaatctgctttgctgagttcctccacgccagcttttgattgttgttggcgaaagagggtggcaaacggcgcgacgccgagcatgacgacgttactaggctgatctcttcgcccaggcaagaggcgaccaaagtcaacgatttgactcgaaatataatcatccaaaacttcaacatagttaggcacgctcgattgcaaatcttcaagaacttccgcgattcgaactggtcctaaacggaggctacgggagaagacaaagttactctgatcgtagtgcgaaataccgacactaccagagttgattcctaataagtaggtcggcttcgtgatcatttgcttgaatcgtggaaagtgtaccgcaactgcgactgaacgcaggtaggtttcctgactactagataaccagtcgatcttgagcccagtccggacaagtaattggtcttgaatatagtcggcattgttagcggatgacaaggaccacgacccccataaatggtagtccttaacgccgtaatcattcatgatctgaacaaaaccactcagtgcctgcgcggcttgttccactgaatcataatcgatcgtatgctgatcataaatatcctcaccaagtgaaacgtcggaacgaactcgttctacttggcgtaatgtgcgtaaattgacaatcgacaattcaatactctgaacgttaatcatcataattccaaataattttgctgccatggcgatcccccatttttatgatttcctgacccccaataaggttaaagtcatgtatttaatttaagtttaacacaggttggggttagttaaattagtattttagtagtgaaacagttagcgattacttttagtttttatacgaaagttaagcgtaattaaggccatcattaactttgtatgaatcttactagttaggtggttgatgtggtgcttaccccggtttcagcggtagcgaacgctaacctaacttggcacgtttgatccaagataccaaaaaggcgtggttcagccgtaacgagtatgcctgaaccacgctagttgatattataagatttcgtgattatcgataattagtttgttcagatgtttttcaactcgtttatcagctggtggcagctgcatgtaatcaccatacatccgggtcaaaatggtgtcatacgcactgggaatcttaacttggatatcttcgaatggaacggtcgttagctcggtcaattcctgataggtcataatttccttttcgtaatcgtattgagacgccagatttttgtaagttcgggagtctgactgctcgtataggcgcatgtattcctcacgttccagcttatagcgattgacttcagctaattgctgaggtgtgtgtttcgtaatcaagttgcgcagtggtgttttgacaaagcggtaattcaatttgagcaggatcgcagcgtctgctaatttgtaatgtaacatctgtgaacgacgtaaggcttcgtcatctggaatcttatcaaacggaaagatgtcaacgaacacgcctttaaacgcattattgacgttgttgcgttcttcaatgtaagtatttacgtctaatagcttcatataactgagtgcatagtccggatctgaggcaccggtttgtaggaaaaacttgtttggatcaagatagtggttggcgacggcgataaagcgctggtagtcatgacggcgcattccaatgtcgatgtcatcgtcccacggaataaatccgtgatgacgaatagcaccgagtaaagaaccaccgatcaaaaagtaatcgatattttcagcctcacagattgcgatgacggtacgcatcaagcgcaattcaacttggtgtaagggtgtcaggggcatggtctcgtctcctttttacgtaagcgtttcaactactttcatcatacactttgttgcacaaaattgttagggaggatgcttaacgttggaatttacgggtaatttcatgcaaaacagttaaaggcgtgttatatttggtcaaaagttaatgaagtgatggtgatcgcgatgaacagtgacgaattaagcaaacttctcaatgattattttgaagcatatcaaaatacaaccaaaattatgatggacttagtggcttggcttttaagtcaaaataaactgtcatttgaacaatttttaatattgcggcgcattgccacgactgatgaagtgacactcaatgatattgcaattcagcgacaagtaacgcgaagcgcgatttcacggcaagtcaaatcattgttaatgcaacactatgtttttcaggtgccagatccgcgtgatcggcggcggctctacttacatttaacagaacggggacaacaagtcgaacggattgtcgaccaagccattacccagcactttgatcactgggtcaaccagttgggcgcaccacagattgatcaagtgctcaagatgatggggacctttagccagcaggtcacggacctcggtgagccacagtcacaccccgttctacactaggatgtacatgggactaactactaaattagtattgatgagcaactattttggtcgctagtcaaaaacagacttcttaggaattgtcacaattcttaagaagtctgttttgttacgaatacccattgaataaaaacacttgtactaaagtagggtcgtttcatagaaagtaagcactcaaatgggcgtacttgcttcactgtgatacgtgtagcgctcaatgcttgaagaagttatggtaaaccccttcgcaagcttcaagaaacatcccaatagccattaagtacatggctaacatgttctgcattgtgaagaccaagtagagtaggacagtgtagaggattaaaaagaagattgccgtaattttggaaccagccatttaaatcacacctttgtatggagaatcgtgacgcgttatttgcctgagggtcgtgaggaccaagagcggttttaaggcaatgaacacgctttatcaatttcattctaccgcaggctcattaaaattgaaaatcgcaattaaacagattcaaaattatttagcgttcggttattgcttttaaataaacaaaatgatacgattaaatacgttaaaagaacgctaaaacacgaacgtttacaattgtgcaattataatttagacgaatatttggagggaatcatgaataaaattgcggcatattttaatttttcagaattgaaaacgtcaatgcgaaccgaagtgctggctggcttgaccacgtttgtttcgatggcatacatcctatttgttaatccgagcgtcctcggggcttcggggatggataagggcgccgtcttcaccgcgacggccttagcgtcagcgttaggctgtttattgatggggttagttgctaagtacccgatagcaattgcaccaggattaggcgttaacgcgttctttacttattccgtagttatcggaatgggcattaaatggcaaactgctctggctggggtgttcgttgcagccgtgatttttatcttgattacgatttttaagctccgggaaatgattattgatgcgattccgcgggatatgaagttagcaatttcggcggggatcgggttcttcattgcttttattggtcttcatggtggtggcttaattgttgccaacaaatcaacggttgttggtctgggatcattgacagttggaacgacctggttaactatttttggattgatcgtcacgttgattttgatgagtcgcaaagttcccggtgggatttttatcgggatggttttaacctctattttagggctagcaactggcttgattaagatgccatccacaattgtttcggcagcaccttcgttgaaaccaacgtttggtgtggcgcttggtcatattggtgatattaattcgttacaattgattattgttgttttgacgttcttattagtgacattcttcgatacggccggaacgctagttggattggcagaacaggctggattcatgaaaaataataaaatgccgcgggttggtaaagcgttgatggccgattcaacttcgatgttagttgggtcagtgttgggaacctcaccaacctcagcttatgttgaatcttcggccggaattgcggtcggtggtcgctctgggatgagtgcggttgttactggtgcgctattcattcttggattatttttctcaccgttattaaacgtcgtgacggatcaagttactgcacctgcactgattattgtgggtgtgttgatggcagaatctttaaaacagatcagttgggaacggtttgaaattgccgtacccgcatttctaactgttatcgggatgccgttgacttatagtatttctgatgggattgccttaggcttcattgcatacgtcattacgatggtcgcaactaagcatgccaaggaagttcatccattaatgtacgtgctgttcttcatcttcattatcttcttgtggatattaaatgtctgacagttaaaggtggtcagctcgacgttattggctagttacagataatttaaatgacttaattctaaacggactactgacgcacatgacgttggtagtcttttttgacgtgaaataggctaaaacttgatgagcgtcaagttggtttgctctggaggtgactatactagagtcattcaagtgatagaagggggaggcgaaataatcagaaagttaggataaacattgaaatgtaagcgtcatcatcaagatctatttcgaaactagctcgtgagcagtcaattggccgagatttgctaagcggggcaagcgtgacgagtggggatgtacccgtaccaattcgatttaataagacaaatacacaattagtacggtggttaaggtggtataccggtgtcgaaaataatacaaaatataaaaatacaaaaaaatacgttttttttaaaaaaattaaaaacgctccaaagcccgtcgttaacgcttgtaaaccatagaaagtttcgcaaaatttctaatgatagataaaatctattgataaaagcgtttacattttaaaaaatcgtgattacaataaagtcgtaaagttgataattaaaatatatcagaggaggacattactaatggctaaaattagtggttcagatgccgtattaaaagtaattcagaagtggggcgtaaaacatatttatggtttgcccggtgggtcgttcgattcaacgatgaacgccatctataatcaacgggaaacgttgaagtacatccaagtacgtcacgaagaagctggtgcgattgccgcttccgctgattataagctaactggaaagatcggcgtctgctttggttccgctggccctggtgctgtccacttactgaacggattgtacgatgctaaggaagatggtattccaatgttagcaatcgttgcacaagttcctactaagcggatgaacatggacttcttccaagcaatgaatgaagaaccgatttttgacgatgtggctgtttggaatcggactgcgatgactgctgagagtttaccgatgatgactgatgaagccattcgtcaagcgtatgcccacaatggtgtagctgtcttaacgatccctaaggactttggttgggctgaaattgaagacaactttgaaacgaacgctagcgtgcacactgttaactatcctgcaccaaccgctgaatcagttgctgatgcggttaaattaatcaaagctgctaagtcaccaatgatttactttggcgttggcgctaaggacgcggctgaagaattaaaagctgcttctgaaaagtttaagatgccacttgtctcttcagtattagcgaaggggatcattgaagacgattatcccgcttacttaggttccacgggacgagtcgcacctaagccgggtgccgagattggctttagtacggatctaatcctctgggtcggtaacaatgtcccatttagtatcttcttatttaataagaaggctaaggtcattcaaatcgatattgatagtgaaaaatttggtaagcgccaccatacaaacgttgctattcaggcggatgcgaagaaagccttagcggcgattaatgcagctggtgaagcgcgcgatgattcagccttttatgacgctgcggttgctgataaaaagaactgggacaaatggcaagccagcttcaacgatagcactgaatcaccagttcgccccgaaccaatctttgatgtcttgaaccaagaagctagtgacaaagctgtttgggccatcgatgtcggcaatgttaatattaactttgaacgcttgatccggatgcacgataaccagaaatgggcaacttctgggatttatgcaacaatgggctttggggttcctgccgcgctggctgctaaagtcaactacccagatcgggacgtctacagtttgagtggtgacggcgctttcgcaatgctgtcagaagaaatcttggcacaagttaagtataacttgcacatcatcaacattgtcttcagtaatgagaccttaggctttattgaagctgaacagactgatgatagccatcaaccactctctggtgtcgatttgccagatactgattgggccaaggttggcgaaggctatggtgccgttggttataccgttcggaccaaggctgaattcaagcaagcccttgaagacgctaagaagacggataagccagttgtcattgatgtgaagttaacgcatgcaatgccatttacaacggaacatatgtatctcgatgacgcatggcaagataaagacaagattgctgaatttgtcaagaagtatgatgctcaagcgttgaagccgttcagctacttcttaaaacaagctcaaacaaactaatttggatagataattaacgaaagaggacgcgattatcgcggctcttttggtacatagtattaagtgtcgcttgccattgtggcggtgacaacataccaagctgtagagaacactacgtgaacgttcgggaggtcgcacagatgcaagtaatcaatttagatgcccatcgattaaagatgctggcaccacaaccgccactggtattagctttaggtttctttgatggtgtgcatcagggccaccaacgcgtgattcaaacagcgaaacgaattgcgaagcagcgtgatttaccactcgctgtgatgacgttcaatcgacacgcgtcacaactgtttaagtcccagaccacttttcggtatctgaataccgtcgcgcaaaaaagccaacatatggcggcgctacaggtggaccgactatatattacggattttaaccaccaatttgctggcttgacaccgactgcgtttattaaggattaccttgtcgggttgaatgcgcaagtcgttgtggcggggtttgactatacgttcgggcagggtggcgcaaatgggatgcgcgaactcgcggaattgggcgccccgtactttgaaacggtcacggtggatcgcttggctaatcagcagcttaaagtcagttctactcggatccgggggctgattgctcgggggcagattgaacaagctaatgatttattggggtacacttacgcgacacaggcgacattcgatccgttgactagaacgatccaacttgcaaatcggcaacagcagttaccagcggccggtgattatcgttgttggttagttagcgctaattatcgacaggcagtcattctgcgagtcaccacgacattaaaaattatttcgccataccagttgccaccggaaaccacggtattagatgtggatgttcagtggcagcagcgtgctttgcaagtggtcagttctgtctcagcccagcatcaacaatcacaatatagtaaagcttaatgtagaccaccctgatctgtttgatggggtggtttttgattgtcgtcacgtcggtaagttgttcgtgctagatcgttagcgatatttgataaaactgagtatcgggtgtgtgcttgatcctatttttctagtccatagatagtttcacatgaaataatcggataaacacaaaattggcgctgaatggtgccccgttttgtgtacttgtaatttcacttacgaaaagtaagcatattaattgcatttataattgaaagcgatttataatacgtttgttaaatgaattgaaccaagcagacaaattggttctaagtcgaagggatgaatagtgatgacaaagatgattgcaggacaagctttagttaaggttttagaggcgtggggtgtggaccacatctacgggattcccggcggttcaatcaatcataccgttgaaggtttgtaccttgaaaaggccgatattgattatattcaagtacggcatgaagaagtgggggccttagcagcctcggcagatgccaagtttacaggcaaaatcggtgtttcatttggttctgcgggtcctggtgcaacgcacttattcaacggtttgtatgatgccaagatggatcacgttcctgtattagcacttgtcggacaggtgccacaagcgacgatgaacacgaattacttccaagaaatggatgagactccaatgtttagtgacgtggcggtgtataaccgcactgtcacgacggccggacaattaccatatgtcattaaccaagcgattcgtgaagcataccggcaaaagggaccggcagtcgttatcattcctgaaaatctctcagcggaagaaatcgattatcagccggtatcgacgcctaacaccgtttcagatacgtttgaacaacgggtcgatcctcaggccattacggcaacgttaaagatgctaaaagcagctaagcatccattagtttacgctggtcggggtcttcttggtgctaaggcagacctggtcaagtttagtgaacaatttaatatcccagtcatgaacaccgtcccagcgacgggggttattccaacgaaccacccgaatgcaattggtacgtttggccggttgggttccaaatcggggttcgaagcactccaacacgctgatttgattttgttccttggatctgaatttccatttgctagtttttggcctaaggggattaagattattcaggtcaacaataacagttttgatatcggcaagatggtcccaatcgattacgccgtcatcagtgacgcccaagcttatttgcaagcgatgattgcaactggcgaaacgttacctgaaacagcgtggttaacgactaaccggcaaaataaacgtaattgggataagtggctccaacaattggctgctgacgaccatgatggactagcgccggaagcggtcatgcacaaagttgctagtatggtcggccctcgtgatacctacggggtcgacaccggtaacgtctccgaatgggctgtccgggggctcccaatggatcaggagcaacgctttgccttatctggcctcttcgcaaccatgggatttggactacctgctgggatggctggtgccttaagtgttccagacagccaagcgtggagtttctcaggcgatggtggctttgcgatggtagcgccagatattatcacggaagcacgttacggcttgcctgttattaacgtgattttcagtaatcaacggtttggtttcatctatcgtgagcaagttgatacgaagcaacacttgtatggtgttgatctaacggatgccgactgggccaaagttgcagatggccttggtgggattggttttactgttcaaaataatcaagaggtcgaaaccgtctttgaccaaatcaaggcgctccaagcgaagggcaacaagcggccaatcgttgtgaacgcggtcatcaagaatgatgatccaattggcacagcttacatgccactagatcctgaattatatggtcaagcagaagttgacgcttatgccaaagccaaccacattgatattaaggaacagccatcattaggcgccttactacgagcacagggtgatcagctatagttaaagcctgaagggctagttagaccactgggcaaagattcagttaacctaatattattaaaaagccgccagtatcgggtatgacctgatactggcggcttattagttgttcagttaggatttatttttgattaaagctgccatcttccacgtcacgaatgaattgtttcaaatggtcaaagtagacgggggcgttgtcgatcatgtggtgatgaccaccatttggcgtcgttactaagcgtgagttaggaatatcacgagccatgcggcgggccgaagctaatggcattgtttcgtgttcaccgaaagttaacagggtcggcactttaatgttgtgaatctgatcgcgaatatcccattcctttaacttcccagtgataacgaattcattatcaccttgaaaggcgttgtatacaggagtggcagtggtgttgatcaaatggcgaattgaagtgggttgtttgcggtcaacatagccagcgttcagaacgtccacgtacttctgatactggggatcattccagttgccttccgcttccttttgcttcatataagcaacagcgtcagccggtagggcttcttcacgacacttgttaacgttgacaacgtattcctcaatgttatcgaccatacttgaaataatggcgccttttaagtgttgaccatacttgagcgcgtacatcattgtgagggcgccgccccaagactgaccaatcaagtagaagttatcgagtcctagtttttgtcggacttcttcaacttcatctaagaagtagtcgtaggtgagatatttcttagcaatttcaggatctgagtagtcgggttgatccgaataccaggatcctaattggtcgtacattgaaacttggacgcctaaatctgccagttcctcaccaaagttttcccagtattcgtgattgtcaccagggccaccgtgtagacataataattgaatgtcgcctttgccctgagtattcgtccataaatggtagccattatccagcgtgatgattgtcgttccttgtttcaaatgatcacctaatttcttcatattttaattgttatcttaccactgttaactaagcagggtcaaagagactaggcaatcataaagaattgcattaagtagataattggtaaggtcgtgttcgctaattaactgaatcagtacgttaacgtcatagtagctgagtatgggaggggacttcggtcgaaacgatataaaaataataattagaacgggccgtttagtctgaatttggtttatactagttattatgctggtcggtacgactgatagaccaagtttcagtcgtattgtgaccgattgtacacaattgatttgacaagcggttacatttttagcgataataagtaaactgctcagcacagaaagatgtaatattacattctttaaattcaattgcggttagttaaccaatatgaaataatgggttaactaattagagatgggtgagattgatatggcaaatcaagtcgcagttttacgcttgttaatccaagcggcgcccgcgtactgttcgggtgactggttggcacaacgacttgcaatcagtcgaacggctatttggaaattagtgcaaggattgcaagcggcgggccatactattgagagccggcatgggcgaggttatcggtatgtggccaataataaattgagtgcgccggtgattgaatacgcgcttacagcgttaccaccgtttgatttgaccgtgctaccaacggttgattcaacgaatgcctatttacggcggttagtcatgcagacgcctttagcacttccgaaaatcgtggttgcggatacgcaaactgctggttacggtcggtcggggcgggcattttattcgccagcacagactggaatttacatgagcattgggttaccactcagtgaccagaaggcgttagacgctggtttgttgacaacgagtactgcggtagtcgttgcccagacgctgcaacagctgtttgcggttgacgtttcattaaagtgggtcaatgatgtgttagtcaatcatcacaaggtggttggtatcttatcagaaggcatcactagtcttgaaacggggcaaatttcagcagtcattattggaattggcattaacttaacaacgacagcttttccagcgctactagcgcacaaagcgggcgcagtcgttgccaatccaaatggtgtgacgcgcaatcaagtgatttgtgagctactgcggcgctttttcaatagctatgggacttatcgtagtgggactttcatggacgcttatcggaaactctccatggtgatcgatcaacaggtcgagttgaagagcggaacgcaaaagtatcgtggagtcgtcacggatattgatgcacacggggcgttagtcgtcaaattagagactggtcagagtcgtcattttagttctggtgagattactaaggtgaacctcttgtccggtggttatcatggctagcaagtttgtaaaatcaatttatcaagttaccgaacgaatcgcgtcaatcttttaaaatgatttctgattcaatgttttactggttcatactgttgtatagtagaagttagtcacaagtagtgctaatcaatttcaatttgattaattgagctgtttggtacgtcgaatcaaccttaaattgttgataacataggaatgataacggatggattaatagactcacgtttgatttatttatattgtaattaagttcggggttatatgtgtttaatcagcataatgaataaagtggttaataaaaataattaatgaagtttaaataatgctggtcaatgcggtcatttacatattatagtaaaggtaccgaagcactggtgggttagttaatatttgtagagacaattcaaggggtaataggaatatgaatgaaaatttgcggagcgtaaatatgagccgaacaatgagtcggatgaatcgacaccggatgaatccaagacgttatatcaccggatttgatggtatccggacattggcggtgctgggtgtcatcatctatcacttgatgccggcctcactacaaggaggttacttgggagttccgatcttcttcgtcgtttcaggttatttgattacggatattttattacaagatattttgagtcgggggcatgtccggatatggcggtttctcggacaccggatgcggcggctatatccagcattcgtgacgatgttgttagggacaacagcctacattacgctgtttcaacggtcattattgacgaacattcgggctaccgtattaacgaatttagtctacgtctataattggtttgaaatcaatcacggtcaaagttattttgaccgtttcaatggtgaatcaccgttcactcatttgtggtcgctctcaattgaaggacaatattacttattctggccattagtgattggtatcttgatggtcatcttcaagaagcgttcacgggtcttctggtttatgatgattgctgcgggtatttcagcgataaccatggcaatgttgtatgatccagcgaatacgaatcgggtgtactacggaactgatacgcggatgtttgcaatcttgttaggttctggccttgcgtttatctggccatcacgggaattatcggcggacattgctaatgttaatcgagtgacactggatatcttaggcggtgcttcgctaattgcaattatttggatgtttttccagatgtccggtcaatctgatttcacttatcgtggcggtatgttactattcacagtcctatcaacagtgttagttgcaacggtggcccacccggctagtcatctcaatcgcgtcttgacgaatccgttgtttaagtacgttgggcaacgtagttatgggatctatctctaccagttcccagtgatgattttctacgaaactaaagttaaaaacattggtgatcatttactcctcaatagtttgattgaagttgccttaattttgatcgtgacggaattgagttatcggtttattgaaaatccaatgcggcactatgattacagtcggttattggtcgacttcaaagatttcctccgcaaaccgaagtttaaccgcgtgaccactgcgattgtcgctttgaccacggtcttattcgttattacggcggttggtttcgttcaacagccaagtaaagcggaagctaacaagaagactgaattacaaaagacgattgcagctaactctaaagcggctgataagaagaatgcggcggcgctcaaacggcaaaaagctgcccaggcagcggctgcttcaagcaagaaggttgcgactgaaaagatgcagaccaagcaggctgaagcgaagttgaactcgaagcagaagcaggtggaaaaggaatacgatttgaagccacaagttgttctagcgatggccaatacggatctgacagccattggggattcggtgttactggatgtttcttccgatcttcaagatgttatcccgggtacggtggttcaaggtcgcgttggtcgtcaagtgacggaagttcctggaatcattaattcgctgaagtcgcaagggcaattagcccataacgtcctattgaacattgggactaacgggacaattacggatgatcaagctgaacaagtcgttaagctgattggtaaggatcgtcagattttctgggtaacggcccacgtcccaacacagagttggcaaaatcaggtcaatgctcaaattgccaagactgctaagaagcatgcgaacgtgcatgttatcgattggcatggtcgtgcgcagaatcaaagtggttggtttgcagatgacaatgttcatccaagtacgactggtaatcgccagttaacgaatttgattgcgaaccgcattgccgaagttaataacaattaaagatgagttccagcttacgttgatggtaagctggaactttttttggctagttccggacgggtgggggtgtccgacctggtcatgataagtggctatttaagttgaaggtacacaaaaggcccaccagttaacggttgtgtggttagctggtaggccataattagttagtccgttatttttttcattgggacgtgtaagcgaatatcgttcaagttaagtgagtactgtaggtcttgattgccgcgaatcgtcatcttcatatcagttgcgtaaatgactagtccgagttgatgccccttcagtaagtggtggaacagcggttggagatccacagaaaagtcataaaagacatttggctgaatcgcttctgcgtgccatgggtggtgacggttctgcaagttaagatgccccttagtaatcatcttgaacggcgtctcacccgctaacttgaagtccttcaaatcatcttcgcgccagtggtaacctagatcaagcgcttttgcagctagcatttgtgggctgacagtcaaacggcgcgcggccccgaagtcaatcagcataaagctcaacatgccgaaattcttattaacggcgacagagcccgcaacgtgcggaatacccactaataattgatcctcaggcgactgccaagacttgaacaagaggcggtgatcatagagcggatttaacttatcctcttgcaagaggtcgcgctgccaactatccaaatgatgcttatagtggtcgaataatttgtcaggcaatttatcagtaaaatgagcggcgcgttggtcaactgtatggtcagcaggaactaattctttgtactgaaccttaaaatctaaagcgtcggttgtgtcttgccaccaattgtcatagccgtgccaagtttgggcttgcgtgttgtcttgtaccaagacgttaggcaagagtgtctccgcatgattatctaaaccatataatttatggcttagccacaagttcatcatgtcggtgaaatcgagcgattgtaagttattgatataaatatgttgtccctggtgcaaaatgagctttttagtaacgggaactgcctgtaatttatcccataaattagctacgttgcggggcttaacgttccagtcattgagcccgtgaaccatgatgatgtccgccttaattttgtcaacgttcttgagataattgcgttcatcccagaaacggttatagttaccgcttgctcggtcttggtcggcagtcagttctgccagtttctgatcaaacgcgggttggatttggtgagcgtcaccggcttttaagcttcgtgagaagacctcagcggcgagaacatcggtgtcttcgccttggaacgtatcgggagcgacgaccaggccattatctcgataatagtcgtaccagcttgagatggcggcctcggaaataatcgtcttaaggccagccacgcccgtcgtagcagcggcagttgcgagggtaccgaggtaagaccggccagtcatagcaacggcgccgttgcaccaccaagctttgatagcgatattgccatcacgattggtgaaggcttggcgtttgccagtcaaccattcaataattgcaactgttgaggtcgtttcatcaacgtcaccggtaggggctagcccatccgagtcgattgaaccaattccagctgcatagacgacagcaaaaccgcgcgctagaaagtaatcattgagcgtgtaggacttttctcggctgaaagtctcctctgctgtatcggtcgtcgtggtcgcggttcgagcggctggtagttgcgccgttgttggctggaactcaacatccgcataggtattttcgtccggttcctttgcagtcaggggaacgtctacgttgtgcatttgagcatcaccagcttggtcgttgatgccctgattataaggactagcggtatagagaacgggaacttttaagccggtttcggtctcagttggccgaaggatttcaactttgagcaggtcccgttggccgtcgtggtcagtatctaaaggcgcttcaacgtagacgacgtcacgaatgagcgcgttggtatcaaagacggcttgggccttaccattgaagaagagtggcttttggtcgttaggtaattggtaaaatggtacaaagtaaccccgggtcgtgagtgattcaatcaaggtttgtccattattcccacgtgtatttaataataggtaccaagcataatagagggattcacgatcaaaggcgctatcaccgactattggcaagtgaatatcgcgcatcgccagcaatggatcggccaattcaaaatcttgaccaggtagaaaacccagtagctgaagtcccacgttataaaagacttgattgtttacgatagttgcatcggcgagccattctgataaagtgtgctggctggttgccatgatgttattaaacttgtgggtcaagccgcttgccgtgtgaacttctggtaagcttttagccagcaatgcctggtagacggctggaacagtcgtcagggcgtccatatcaggcgtaataaaatgaatttttgtaagttcggcaatcgcggtttccgaatcagtcgggacgattgcaaattgattatttttcataagtaaattccccattaagtattattagaaatattataccgctaattagtcgagaaccaatgcttcttactgacaagtttataatgttgtggtaggttaattgcaaagtgaactatcgaatggaggaactaagattgagtgattttccaattttatatacgacccaagcagttaatgaagacggcatcgaaggacacgcctatattcccaatggtcttgaggtggccgtatctagtccacttaaggcggtgccgggctcgaatccggaacaattaatcggattggcgctcagtacatgccttaacgcgacgctggaggcaatcgaaaaggagcacggccagacacatcagagcaaagtcgtgactacggtgaagatgtcgcgtgaccgttttgggtaccaatttttcctagatgctcgggtcacgattccggaagtggatgctgaaacggcagcacggtggctcgcgattgtggaaacgcgttgtcccgttgccaagctcgttgggccatcagccaacgtgacgattcaattggcttaaccgttgtgatatggccgcagtaatcattaatcgtagtttgtaaaaatgtcaggggattgattaaaacgtggttcgagttggcagcgattaaaactgccaattcgaaccacgttggtgttaatgatgactgcgaatttgcttgaaaagttggcgtaaacttgggtgctgacagtgatgactagtaactgctgactgaactttatcgacctgttgtagggcaagttgcttcgttttttcgcgttcgattttgagctgcttgcttagtgctcgcgatttccaaaagccgttgatgccgacgacaactggaataatgtgtaataaggttgtggcgggaatgagccagggatgcttactgaatagttgaacgacctgggtatgatgctcatgaaggtcgtcatggatcgttttaggtgttaacatgattaaaccacgctccttaattaagtatcattatcataccttaaaatgtaatcgttgtcatcgttagctggctgacaatagttaaagcgcccatctcaagttgattgatcacttgagatgggcgcttttagttagtacaaatctagattgttactcatcagctttattcatgcgactatgccgaatgccatagccaaagtaaatgatgagaccaaggaggaaccagactagggatgccagccaagtttccatggatagctgggtcatcatgaacaggcacagcaagccagaaataattgggagaaccgggtaaagtggcacgcggaagcccttgatcgcgttgagcttgggattacgccgtagtagcaaaattccaaaagaaacgaaggcgaaggcaattaatgtcccgatattaaccaagtttgccaattggtctaacggaatgagaccagcaagaattgaaatcacgattgtaaccgtcaacatggcgtttttaggggcgtggtgcttatcgattttacctaagaaacgtgggagtaagccgtcacggccgattgaatataatagccgtgagctactgtagatcatcgtaaccatcattgtgaacatgccggcgagggcaccaatcgagataataccggcaacgaagttttgatggacgagttgtaaagcgaacgccactgcatcgtcaacgttcaactgtttgtacgaaaccatcccggtcagcactcctgaaacgagaatgtagaagatggtacagatgactagggtcccaatgattccaattggcatgttgcgcttggcatttttaacttcggctgccgacgaagacacagcatcaaaccctaagtaagcgaagaagacgaccgcggcgcccttgagaattcccgtcccaccaaatggggcaaagggtgtccagttacttggtttaacataaaatgaaccgactaataagaacaatacaatgattgctaattttacgaccacaataatattgtttaatcgaatcgacgtttttaggccggtatcgataatccaagcaatcagacagacaatcagaattgcgaccacgttgatataggtcccgtgggcggggtcaaacgaaccggtgatggctttcggtaacttgaggccaaaaccagcaatgaatgaattaaagtacgcggcccacccaacggcaacggtcgcaacggctaggacgtattcgagtaccagagcccaaccaatgatccaaccaatcatttcgccatagacaatgtttccgtatgaatacgcggaaccggcgattgggagcaccgaagcaaactcggcgtaacacattgcggcgacggcacacacaatggcagccaaaacgaaagataaaataatcccgggtcccgcttttgttgcggcaaccgttccgggtaggatgaaaatcccggtcccaatgacggcaccaatcccaagtgcaatcagatcgactgcggagagggttcgttcaaaatgactatctttttgtaaatagcgctccaaatcttctttttggaaaatgcgctggaaaatccccataacatggaccacctttttggttatttgtaacagttagttgtcattatcgacaaatcgtcatgtcaatatgataccgtggttgattattaaaagtcaattagaatcagccttttattattaataactcaatgggatacggagcaagatagctggttaatcatcatagaagctggtgacattgcgactgtcgaggcaatgttcgtgctgacaatagatttgatgacgataacgcgtaaccagtcatggtggggatttaaaaagcgttgtgatggccgaattactagtcatcacttaagccggcggtaacggtgctaagctgaagagaaacgggtctgaatatgcggttgggtagctgttactattgttatttataagttgatactttgttataacgaacggtagtcaaagaatacacacggataatacattaaactgttaattggattcgccaaagcttataatattgttatcaatagaaatttaattttagaatggtgggattaggatgggagcggcgattgatattaccggtcagcacttcggacgcttaatagctgttcaccgagcgggccgggccaagaatggtaatgcgctctggttttgtcagtgtcagtgtggccggacgtgcgtggtggattcctacgttttgcggcacggcaagacgcgtagttgtggctgtctagccgtggaacagagtcggcaaaatatttttaataatccgcaagcagtttcgcatatgggggacccgcgtaatttgaagattcgtgatcaccatacagatgtaagttcaatcaagaagtcgaagcgtaacacgagtggggtcgtgggcgtgagctatgacaaacagtcaggttcctgggttgcgcacttctactacaaaggaacgtacatattaaacaaacattttgcgcattttgaagatgcggttcgggcccggcacgctatggaacagcaatatttaacgtcatctgataactgaaactgtcggatgcccacgttaggattcactagcaaattgtaggctagctaatattgtggataatatttgaaggaactgaagtcggttaagtgtcgaagggcttcgacgtaatgtgtgcttagtctgatgaggatggatgataaattttaatgagttgaacaacgggactggcaatccgctgctcaactttttgagtcggcactaatcaagcttaatgatgacaataccgttgcggtttgcagtgatgagtaatcaatgcccatttgagtggttgatttaacctttcttttgaagcgaagaggttacagtcagtcggagttctgatagaataagcattacacgagataagagggggtagcaagattgtcaacaatgttagtggcggaagatttatccgcagtcggtggaatctcacttagttcagcgttgcccgtattaacggcgatgcagtatgacgtggcagcactgccgaccagcttattatcgacacatactagcgggtacgggacaccagccgttgtcgacttatcgacgtggctgccgcaggtctttgcgcattggacccgtgcacaactgcattttgatcaagccctgatcggctacgttggttcggtcgcactgtgccaacaaataactacttacttagaacaacaaacgctgtcgctattagttgttgacccagtactcggcgatctcggtcaactctatcagggctttgatcaggactatgtcgcggcaatgtgtcagcttattcaacaggcggatgtgattttgccaaacacgacggaggccgcattgctaacgggagcgccctatcaagtgacgccagatttagaagttattttgccagcactgcaagcacagttgaaaactggtgcccacgcagtcattacggatgtccaacgtgctgatcagattggctgtgcctggttggatgaagctgggcacgtgcaatactgtggtgcgcgacgtttgccggggcattataatggtaccggtgatactttagctgctgtaatcgcgggactgttgggccggggttacgcgttagcaccaacgctggcgcgcgctaatcagtggttgaatatggcggtagcagaaacgattgcacaaaatcgaacggatgaccggcaaggggtcgcactgggggacttgctccaggcaattttagccctcaattgatgatggaacatgttatactagagcataattcataattaggaaggtgcgacttcatgagtacagaagtagctagtggtgcggtcgtctatcaacaaaaagatggtcatcccgcttatttattattacagagtgcgaccagtgatttttggggctttccgaaggggcacgttgaaggcaatgaaacgttagctgaggcggcgcgacgtgaaatccgtgaggaaactcaaattgaagcgacactcgataccaattttaaggcgtataccgaatatgacttaccgaatggtaatttgaagcaagtcacactgtttgtcagtgaagtcccaagtggtgtcgtagtgacgcggcagcaagctgaaatcagtgcaattggctggtttgattatgctgctgcccgtgaacgattgacttacgataatttaaagcaaatgttagatcaggctaacacctacattgagcagcatctacaataatactgactgtaaaaaaattactggtgccgtcgcataaacggtaccagtaatttttaaacaatatttttagattggcttaggcctgggtttgtaagtttgcaactgcatcttcgattgttacgccttcagcgaacaattctggatgaagtttgtcagttgcgacaaacatttggcgttgcgtatctaagacaatgctgaaccagctatttgttttttgaaattgcatatgacaaaactcccttctgaaaattgttggtttgctacgagatgcgtgaatcatctatttgaaccttataggtacgttactatactcggtttaccgagctaacgcaaatgaaaagctttacatgaattaaaaaatggaggtttatcaactttgacaacgaaacggatctttgtaatcacgggaccaacggggagtggtaagaccactgtcagtcattacttgcggtcacaataccaaattcctcaggtgattactcatacgactcgggctccccgggaaggtgaggtcagtgggcgcgactattattttgaaactccgacgagttttgccacgaaacattatttagaacacgtgacctatagtggtaatcaatacggttcttcacgagaaggactagcggcagcctgggaacggtcaccactgattagtatcgtcttagatacggcgggggctattacctatgcgcgggagttgggcgaacaagcggtggtgatttatctcgaggttgctgatcaagaggcgctaattcagcgtttgaccaagcgaggagatcttcctagccggataaaaaagcgagttgctagtgatgagtatttgcgggaccaggctttgccagtaggattagtggggcatgcacatgttatcgtgaatgatgattggcaggcgacgcggcgccaactagatgagctggtcactgaatattgtcagcatgatgttgtgacgaaagattagcgctgacgtatggacggtcaacgtaattcacttttacacttgagtatgctaaactaaatagtaatgattatgatttagtgaagtcctggtcagtaggaggcagcaacattatggaaacaccaattgaacaagccgtcgcaattttacgtcgcaatcagtttaaaattacgaagcaacggcaggcattattagattatctggtgacctatcaggaccactatgtggcaatttcggccgttgatgagcacatgcggaccttatttgcaggaatgagtcacaataccatttatcgcaatattaaagagtttgaaacgttaggattattggaattgaaggcccaggctaatcaaaccctggttaaatatcaatgtgatttcaagcatcaacaccatcaccattttgtttgttcaaactgtggtaaggtgacggaactgcaagcgtgtccgttagacgagtatgaagcacaattaccgggttgtacgattacgggtcaccgcatcgagatttacggtctatgtgccaattgcacgaaaaagcaggcaattaatagctgacggggagtcggcttttttgttggccttgtttgagtaaagagtttcttaatttgtgatagaattagtgcattccgaacacgagcatggtttaattatagattagaaagaataacggcaaagcctcagaagggaatgacatcgatggcttatcgaacaccaccatttatttcaccatttgcaattgtttcaattgtccttgcactgggggcaactaacgtggtcgttaataagacaacccatactgtcaatggcgccaaggccactagcagtgtggtcaaaagttcatcagctagttccgcaagtctgaaaaagaaagcggctgatgatagtagcgatgagaataaatccaaagacaaatccagttcagatacatctaatgatgaacagaatagtagttccagtagtagtactgacgagaatgatacggacagcagcagtgctaataagaccagtagttcatcaagttcagctgatgatacgagttctagtgccactaatagtagtacgactgataacaatagttcaacgactgatacgagtgacgatgatgaaagctctgctgctgagtcatcaagtacgaccgcgtcaagctcgacaacgacaacgtcacagtcgacaacggataccactactagcgacgggggcgaataacgaatgtttagtattttagatatgatcaaccacgccttgggttacgttaatgtcaatgtgaagattaagaaccaaatctatatcggcattggaattgcgggtaatttatacctcggttatgtggcaattcgcttgatgcagaatggcgcgtggttacggggcatcttatatatgctcgttttcttggcgctgatttatttcattacgttaaacgtcatttattattttactaataaaactgcgaagtatgacttatcaccacgtattgaaaaattgttgggtggtaagcctaaagaagcgttagcagctgaaaaacaagcacaacaaagtcagcaacaaccatacattcctgcgaacggtatttttgatgggcaggaattgttgcccgccacggtgaagacttcacgtgctgaacaggagaatgtgcatcaaattgttgatcaactacaagcggcgaacattgtccgattagattacggtggcttaactgatgatgccatcattcagcaggcgcaggcaacgggtgaacccgtttatgcgattgggcaaggcattcaaattcctttctcacagttaaagttggagaatcaccggctagttatttacgccggaattaatcagatggaccaatccccggttgggcatattactaaggtcggcttgaccgatgttcatgatgcgcatgaggattataagttgtatttggcctccacggtaatcacagggggtatgagcaagattgcgggccgaacgtcagctatcgagcaaccgggcgattaccaggtaaccgcgcaggttgcgtatgagggaagagaagattaagagtgcttccaagggcggttagtttgtgagcatcaccgttttattgttaagcggagcaaactgcctttggaagcacgtttcggtagccaaattgaatctaaacacaaaacaaccgttttgagcagtggctcgaaacggttgttttgtcggtatggctatttaaaaagcgctaaaatgtctaatggtttttggaagcggtgggccactttttgatggtcggcgttagggtccattccccagactgccagtccaaaatcaacgttagcggcctgggcagtttgttcgtcactgacggaatccccgatgaagagtgcgttttgtggcgcaacgttgactttttcgagggctgtgagtagggggaggggatctggtttgcgcttaggcgtatcgtccgcactgattgtgacagccatccgcatcatgaatggatacgagcgcatcccactttctaattcgtttcgtcgttgggaagtcacgattccaagtcttagttcagacggcaactgttcaaagaggctggtaatgcctggataaagttcaatctgatcataatggctggccatgacatcttcgtattgggcctgaaagtggtcaaactcactggctgcaatccccaattcagtcattgcttgttcagcggccatgggaaaagtcttctgcgcttgggcaggactaaatggtttgccataagtagcaagtacctcacgcataaccgtcgtgtaagctggttggctattagtcagcgtgccgtcaatatcaaacattaatgcttggtaagtcatataatcgttccttccaaagtagatttaactccagtatagcaaattcgtccttgacagtggttaggacaaccattatagttagattaacaattgatgaggagctaatgatatgtcattaccgttaaattcattaaaatctagaactagcttttacttttggtattttcgctagtgtttgtgccggctgcagaggtgcaaacacgaatccgatgtttgcatcgatgcggttgccaagagtattttgtgatttgacggcgcccatggatgtttgaaaattccaagggtggctaataagtttgtttctgcgtggtggcgcaccctttggaatttcaaggggtgcgcttttttgaccctagtccagtccgcttccaccaacaagatcagccaaacttgggaggaatctttatgtcaattaattcagaaacacttgttaaccatatgaatcatgaaattgcggcgattcagccgtctgatattttggcgttcaacgctgaaatcgcaaatattccgggtatcgtgcgtttgaccctcggtgaaccggattttaatacacctgagcacgtgaaacaagctgcaatcgaaagcattgaagcggatgaaagccactatgcaccctcgaacggaacgttggccttgcggacggctgccgctgaattcttggccgctaagtatgatgtccattatgatcctgctagcgaagtgattatcacagctggtgcgaccgggggcatttatacagcgttgacttcaatccttaatcctggggatgaggtcctgattccaaccccaatttttccactgtacatcgcaatcgttaaattatctggggcaacaccagtcttcatggatacctcggacaatggcttcgtgttatcgcctgaccagttacaaacgacgttagcagcccaccccaagacgaaagcggtggtccttaactttccttcaaatccaaccggtgtgacttaccggcatgatgatctgaaagccctggccgcagtgttagctgatcaaccaatttttgttttgtctgatgaaatttatagcgaattgacgtatggtgagcctcatgaatcgattgcaaattacttaccaacacaaactattttgcttaacggcgtctcaaagtcgcacgcgatgacgggctggcgaatcggcatcatgtgtgcgccgaaagctatcacagcacaactgggtaagattcaccaattcacagtgacttcaacgacgaccaatgctcaagcagctgcgacggaagcattgaaaaatgggttagatgatgcccaagtaatgaaacgtgagtaccaagaacggcgcgattatttgtatgatgcacttaatgaccttgggttccaatcagctaagccagaaggggccttctatctcttcagtaagattccagccgggttgccacaaaatagtatggctttttgccgtgaactagcccatgaagcacgtgtcgctctgattccaggtagctcattcggcccgggtggtgaaggctatgttcgaattagttatgccgcttcaatggccgatcttaagacggcggtcacgcggctcaggacgtacgttgccagcaagaagcagggggcttaaagatgaaaattttaatgtatagtgttcgcgatgatgaacaggatgcgattcaagcgtgggctgcggctcatcaaattcaagtagatacgaatgatctggaattccatccagaaactgccgacctggtcaagggttatgacggcttggtcattcagcaacgcagtccaattggtggtgatgctagcttataccaatcattagctgcggccgggttaaaacaactaacgagtcgtacggctggtgtggatacaatcgatattccggcagccaaggcggctggtcttgtggtcacgaacgtcccagcctattcgcctaattcagttgctgagatgtcggtggcacaaaccatgcgcttgattcgcaacttggaaatgtttgatcaacgaatcagccaacagaattttcagtgggcgggactgcaagcacgagaaattcgatcattaaccgttggtattattggtgcgggtcgtattggtggcacggccgctcgacttttccacgggttaggtgccaaggtgattgcctatgacgtggtacgccatcctgaactcgaagacgttttaacctacgttgacactaaggaagacctattgcggcaggcggatgtcgttgatttacacgtggatttgaatgagacctctgcggggttgatcgatgcggcagccttgaagttaatgaagacggatgcctaccttatcaacgcctcacgcggaccagtgattgtcaccgatgatcttgtggcagcgctaaaggccggtgaaatcgccggttgtgcactcgatacggttgagggtgaaaatgcgttatttaaccaaaatcatcagggtgaggtgcttcaagataccaacgtggcacaattaatgcagatgcccaacgtcattatcacgccacacgtgggtttctatacgaatttagcggtcaaaaacatggtcgatattagcctggatgacgtcttagcaattctaaatggtgaaacgacggcccacgccttttaatgatggcgtcagccgctactaccagtatggctgtaggagacggtggctggtcaaagtgccccaccggttaacttgttcggcgactcgctgttcgataactagcttatagcgggactaatttggtggtgcgtccgcgactgggcttcaggtgtactggcaatgaaataagccttccaagcatattgcttggagggcttatttgtctcttgagtcggctgactggtcgtgactaactagctagtagattcggctaaccagccattatctaataactggtgatagtgcttaccgattggcacccacagtttagcttgcagaatgctacggagctcatcccagaagagtggatcgcgttgttcattggtggataaattcaattttaagtaggcccccgtctcagtcttggcaatcacaaagggataaaagactttgataatctgggccgctataatgttagtcatgttagctgcttggtcaagtaacatattatcgtctcccgttacaatgcagatgattaatttcttaatagttctaggttagcagtgattattaaagaaatgattgcggaagcgttaacaatttttaaagttcagttagttaaaaccactaattgtgaaaattatgcgccggacgcttcggtggctttcagtagtggtatgattaaaagcgggttaagtttagttgttagaataatataaattttattgaaatcattgtctaaaaattattcggccgtggcagttccaaaaagaaaagcgaattattattggcttttcacgaataatgttcaatattggagctgttattcagctattttaactgaaaacagtgtagctgtttctcactattttatggatatcgaacaatatttagctactttttgacaaaattactaattatgtattaaactatttaaatagcattaacgaagaataaggatttcttaactctaattattaatgcaataattctagaccgtcagtcaacaggctgatagagaaagcgaaggtgactgcaatgtcaatgatcgaatttcacgacgtcgaaaagtattatggtgattttcacgccctcaaaaatattaatttaacgattaatgaaggtgaaaaagttgttttgatcggaccatctggctcaggtaagagtaccttgattcgaaccgttaacggtttggaacgtgtccagtcaggtcaattgttagtcaatgggtttgatttagccgaccgcaaaacggatatgaataaaattcgcaaaaacgttgggatggtgttccaacactttaatttgtacgctaacaagacggtgcttgaaaatatcatgattgctccccggttagtcttgaaacggccggaagatgagaataaaaaattagcgatggacttattagatagtgtcggtctggctgacaaggccaatagcttaccgagccaattatctggtgggcaatcacaacgaatcgcgattgcacgttctttagctatgaagccgaagtgtctcttgtttgatgaacccacctcagcactagatcccgaaatgatcgatgatgtgttgaacgtgatgaagagtgttgccgaagactccagtatgaccatgttagttgtgacccacgaaatgggctttgctcgtgaagtggccgatcgggttattttcatggctgatggggaaatcttagaagatgatgctaaagaaaagttctttgatggtcagccgtctaatgaacgggcccgtcaattcttgagtaaaattattacacactaatttgtaggggaggaccacgaatgaagaagctgaaacgactaattggcgcactcggcatgcttgccatgctagtggtggtcttaactgcttgcggttcacggcaatcattagcaaaacaggatgttttgaccaatgataaagctagtaagacgattacgtggggtgttaaagctgatacgaaattatttgggttgatggacgttaaagataatcaaatcaaggggtttgacgccgacattgcgacggcattaacaaagcgggtgctcggtaagaatgctaccgccaagtttgtccaagtaacgagtcaaacgcggattccattgttgaagaatgggaacattgatgccattatcgccacgatgactatcacgccggaacgtgaaaaacaggttgattttacgaattcatactttgatgcggggcaatcactgttggttaaaaagggcagtgccattaaatcagttaaggatttgaataagtcgggcaccaaggtccttggtgtgaccggtgcaaactccgttgagaacattaagaaagcagcgcctaaggctaaggtgttggaattatccgactatgctcaggcaatgacggcgttgaaatctggtcagggggtcgcgttgactactgataatgggattctttacgggatggcgtcgcaaaacccagggtacgaagtggttgggggtaccttcacgaaagaaccatacgggatcgctgttaataagggtcaggaaccgttaaaaaaggctctgaataaagcgctcaaagaaattgaagcggacgggacgtacaaccgcatcttgaagaagtggtttggtaacgtggccggcttcgactataaggaggcgtcacgctaatgggatacattctaacgcactattggtcagagctgattcaaggactcggatatacgttgttatccagtgtgattgctttggtattcagtacgatcatcggaacaatgtttgctatctttgaagttttgccaagtcgtacgatgcgcatcattggtcgagtttatattgaaattttccggaacattccattgttagttattgcgatgttcttctacgtgatcattccaatgtatgttgccaagattgatggttttaccgcggggacaattgggctaacaatctatacctcgtcattcattgcggaaacggttcgggccggaattcaatctgttgatcctggacaaatggaaggcgcccgtgctaatgggatgacgtactggcaggcaatgagtaaaattgtcttaccacaggcatttaaaatcatcattccaccgttgggcaaccagtttattaatctggtgaagaactcttctgtcctagctttcgtggctgggttcgacttgatgtaccaagcaaattcaattgcgtcactatcgcttgatacgatcaatagctacgtggtcgtaggggtcttttacttaatcattacgttgccactgagttattacatgcggcacttagagaaaaaattagcaaactagaagggggcgacgattcatgcaaaactttattcaagcgtattcgtggataaatatccggttcttgctcgaaggactctgggtaacggtggaagtgtccgtcgtttccatcattgccagttttattatcggttcagtcctaggggtgcttcggtacgtcaagattaaatatttatcggcagtggttgggtttgttgttgacattattcgaaacttgccattgatcttaattatcttctttacttactttggcttgccacacttgggattcaagcctgggatcattttcgcagccatcctcgctatgacgatttttgaatcggccatgttagccgaaatcattcgttcagggattttggcggttgattacggtcagatggaaggcgcccgggctaacgggatgagctatgtacaagcgttatggcacattgtctttccacaagcaatcaagaagacgatcccaacgattgtgagtcaatttatctcactgattaaggatacgtcgctggcaaccattattgttttacctgaattattaaaccatgcgcaaattatttatggtcagaactcagcgtatattttaccgatgttcttaatgatcgcagtcatgtacttcattatttgttacgccttgtcaattctgtcacgtgtgttggataagaagttagcgtaattaaactggtgggatgatggctgaaatttcttaatgaaaagaccaaacaagcaataatgctttgtttggccttttttataaaaaatatttaaatgtcttgcaaaaaatagaaggcgtgataatatagttattgaaaacgttttctataaaactgaaattaaggattgtaactcatactctttgaggcattaccttttacttgttgaaatatacgggtgaagtgggtgcctcaaggagtttttttgtattgaaggaggttcagtgatgtttggaattaaaagaaagaaagttgatgtcttcgaggtggttacaccaattgaaggtatttgtataccgatcacggccgttatggatgaagtgtttgcaaagaaaatgatgggtgatggatttgctattaggccgagtgaggacactaatcaagttgtggcaccgattagtgggaaaatcgttgcattacctgaaagtaaacacgctattggcatcatggatgagactaggggcgtgtctgtattggttcacattggcctagatacagttggcttaaatggtagaggctttacggcacacgttaaattaaatcaagaagttaaagcaggggccctattagtgacgcttgatcgccaaacgatggcgatcgcgggattagatatgaccaccatagtcgtctttacagaaggttatacgggcgaagtgccacttggcagtaagtttcatcaacaattagcagccggaacaccagttttaaagcaagcataaactatgtaaaggagtgcgaattaaaatgcgggtggtgaagaaaattaataacaacgtggtcgtttgtcttgatcaacatggtgaagaattggtcgcctttggtaagggattaggatttcaaaaagtcccgtatgagcttactgatatgactaaagtgacgatgacattttataaattaaactatcaatattatcaattactaaaagaaatacctactgaaatctttgatttgagtgcagcaattgttgagcgagcgcaggcactaattccaagaattttgaatccaaatatgatttttagcttagctgatcatattaactttgcaataacgcgactaacccattataaaagcgcccagttaccattttcatatgatgtggagcaattatacccacaagaaacggatgttgggtattgcgccgtcaggttaattaatcgacggctaaatattcaattaccagtttccgaggtcacagcaattgccatgcattttgtcaattctcagactaatgatttagcgaccaattcaagtgtaaatagcgacgatgaaatgataaaaatcatcacaaaaattattgaacaagaatatgagcttagaatcaatcaaaccgaattcacatacaaccggtttgtcatgcatttacggtattacattaaacggatgaagaaacatgagcaaatttctgaaaatgataattctaaattattcaatacgatgaggcatgatgagcctgaaatttacttggtagcaaagcgaattgcagactgcgttgatagtcaacttgatactaatagtaatgatgatgaacttttctacctaatgatatatgttaaaagaatcgttaataaaataaatactcaagcgtaaccgttaattaatggaggtgtatgcgacatgaaaaataaggataaacagtatgaaaaagtggcgaatggtgtactggaagcagttggtggtagtgcgaatatttcttcggtgacacattgtatgacccgattacgttttaatttgaaggatgaaagtattcctaatgatggtgaggtacagaatattccaggtgtgattggtgtcaatcgcgctggtggccagtatcaaatcattattggacaagcagttagcaaagtttatgatgcgttacttacggtggggaatttaactagaaacgcgccaattccaattaatgaagatttagataatcgacctaaagaaaagttaacgtttaagtctgcgggaaatatgattctaaataaattggctggatgtttaacaccattgattccgatgttgattgctgcatcaatgtttaaaatgtttgcggccattttaggaccaagtatgttcaatattcttggtactaaaacatcgttgtatcagttatttacgttggttggtgatgctggattctacttttttccaatcatcttaggatatacagctgctaagcaatttaatacgtcacggattatttcaatgtttttaggtgcaattttgattgatcctaatttaattaaaattgtgactgctggaaaggcatttaatatcttcggtatcgcaatgccattagttaattattcaagtacggtcattccaattattttgtcggtttgggtaatgtcgtatattgaacggttctttaagcgttatgtaccagagtcaattagtacgattgttatcccaacgttgacgattgcaatcatgttgccgatttcgttatgtattttaggcccagcgggaaactttatcggcaattacatttgtacaggaatattagcttttgggaaattaggtggcttgccaacgatgatcgcggttggagtggttggtgccttatgggaaatcttggttatgaccgggatgcatctcttaatgcttacgacgatgatgatgatttttgcgcaatcgggccatgaaaactttgtcacacttggcgcagttgctgctagtatgtcggtcgcgggcatgtgtttaggtgcggccttacgaattaaggaccaagatcaaaagacccttgcttggggttatttaatcgctagtattatcgggggtgtgactgaaccgggattatatggactagcaattcgttataagcgaccatttattggcatgatgattggcggattttgcggtggcttatatgctggcctgacaacagttacagcttatgtcatggtacctgttgcaaactttttatctttaactgcgtatgttggcgggcaaacatctaatgtgattaacggtgtggttagtggcgtgattgcgtttgtagcagctgctattgcaacttatgcgattggtgttgaagccaatacaaacaaacaggggactaaagaatttaaactagtggaggcttaaaagctaatggaaagaaaagtaatcgttcgagctgatgatttaggttattccgatgcagttaatgttgggattgcacgaacagttcacaacgggttaattaataatgtgggtgttatggtcaatatgccaacgacgatgtcaggattagccatgattaaagatgcaggggtttgcttaggtttgcatactgttatatctgctggccggccattaacaaatccaaaattgattccgagcatcactaatccagatggtacctttcgtcattcctcggattatcgggcggctatggcggctattcatgattttgtcgatcttaatgaagttgttttggaaatcgaagcgcaatatcaaaaatttgtagcgttagttggtcgccagcctgattattttgagggtcatgcggtagttagtgataactttgttaagggattggaaattgtgggtgaacgtcatcacttaaatattttacgctttgcagcaggcccagatagtccgagtgtgctatttaagggaaaggtattacatgtttttatggaaagtatgggcaaaaactataacccttatgaaacgttgaaacgtgcggcactagcccaatataatgacggctatgctatgatggtttgtcatcctggctatttggatgactacttattacaacattcaagcctgacagttccccggacgcaagaagtcgcaattttaacagatcctcaaatgcaggaatggttagaacgacagcagatcaaattaatcaaatatagtgaggtttaattactaagcgttaaggtaatcggtaagcagattaaattacttattcaatgcgcgttgcaaagcataaaaagagcgttgctactgaaaatatcttcagtaacaacgctcttttacaagttatcaagaatttaaattaagcattttgattttgctgctgcttccaataatagattgggaacccaacggccacgataaccaaggaaatcagtacaccagataagtctgagccaatttcactgataatcacgaacagtgcgcccagaatcgcaatcagcggtgtgatcggaaatccgggtgtcgagaatggtcgctcagaagctgggcgtcgttttcttaaaataaagacaccaacgaaggttgccacgtagaagcagtagaccgtgaagatacagaggtccgataagcgatctggattaaagaacaggatcataatactagcataaacgagaatggcaatggttgcggcgatcggctcgtgtgattttttgtgcaagtaactgagttgtttagcgaatggcagctgattctgagcagccatggcgtacacgatgcgggggaaggtcataatcttgccgtttaaacagcccaccatcgagatgataatcccaatgttcagtaggcgcccgccaattgtgccaaacgccgcttgggcaaagtacagcgtcgtttgttgcccgagtttgtggatcgttgccgcgggtacgaagtggagaatcccatagctgactaaggtatacgcaatcaagaccattgaaatccctaaaataatggcttgtggtaataacttctgcgggttcttgatttcgccacccaagttagcgactaagatccagccatcataggcaaaaagtgttgcgaggacggcaaccccgaaactacccgttgattgggtaattgtatgtaaagactgtcccagcgcattctgattaccatagaagagtccaaaaataataatagccgcaatcggtaataatttgcccaacgtggtcgcaatttgaaatgcggcgccccaacggttttcgaacatgttgaggattccaatcaggacgatgacgccaatcgagagtggcgcctgccaacccgcctgcaggttgaagaaaccaactagtaatataccaaggtaagcgctaattgaagcgatgatagcgggaccgtagacggcgatttgcatccaaccagagagaaagccccacaatttaccatagatttgttccatgtagacatagagcccgcccgtatgcggcatttgggcaccgacctcggcgattgttaagcccgcggtcaacgtaatcagtccacctagtaaccaggcgagtaacgcagcgctcggtgagcccgcactatcaaggactgatgattgcttgaagaagattcctgacccaataaccgtaccaacgacgagtgaaagtgctgaccaaaaaccgagtgaacggttcagggtcgttgcttgctttgtttcctgcattaacctgaaatcctcccttgaaacaaccaaattctaaatgattgcacttagcataccagagattaatggtgatgacaatcaaatatcgttggttgtggccggtttttcgcctaaaatccgaactaataacgatattttaataataaagttcgacaagactcaaaataatcagtgttattcggttggtgattcgagtttcgacaaaataggattgggcggcgtggtggctttaaattaatttatttatcttcctaatattagcagggttatttaacgggtcaggttagtcattaacttagtcattaattgagttagttgtgcccactcggattgattgagaccacccttagcagtcaataaatccggcaaatcatttaaagcaattcgtgttgcggttccctgaggtgtcagagtgagcaagatgctccgttcatcttggggattccgatgacgtgtaattaaaccagcttgggtcatccgctgtagcacgggcgtcagcgttcccgtacttaaatttagctgggtgctcaacgttttgaccgtgacagcgtgcggcggtgtcgcatagagtgcgactagaaccaagtattgtggataagtgagtcggtgtgctgtcaaagttggttggtagaggtgttgaatggcatggactgttgtgtaggttgaaaaacagacgtggtcttcaagggggcgaattgtggttgtcttcatgataattaccgcctttcatgcgatgagtattaagtgcggagacgttctaataatgattgtgcacaatcgattgattggattatagcacattctgacaatctgtgggcctagttgccctagtgccggtgggatcttatggtctggtggtcacgttcagtatgcaaactgatgattgtgggtaccacttgcagtgacgtcatggtaataatttttggttccttcctaaaaatacagtataatgctacgagtaggtaagagagtggggttagattgatggtaattgcaattgtggtgttgttgatgctgctcagcatcggcttatttgggttgctgttagccggtgccagacggcaagcagcgccattttttgaccacagttttggtttcggcatggttatcggggccgtgacggattttcttgacacacttggtatcggaagtttcgtcgtgtccacggcaatttttcaagcgagccattatttaaaggatgaacgtaagctacctggaactttgaacacgatgcatgcgattccgaccgcgtttgaggcgtttttctttgttacagcagttgcggtcgagccagtgacactgattagtttagttttagcagcaacgctcggcgcattactgggtagtgaagtcatgacgaagcttaatcagcggtggattcagttaatcatggccggtgcgttagtcatcactgctttactgatggcagcgaagttattaggttggatcagtttgctgggagttgctaatcaggcgacggggctatccggttggaaattattggtcggcattggtggcaactttatcctagggttactgatgtcagccggagtcggactgtacgcaccgtgtatggtaatggtgtattttctgggattgaccccgattgccgccttcccaattatgatgctgtcgtgcgcattgttgatgccgatttcggcagtgaattttattcgccatgaccgcgtcgattatcgcggcttattcggcattattttaggcggtattattggcgtggtggtggcagcgaccttagttaagtcactgtccttaacagccctgagttggttgatcgtcttagtgagctgttggacggccttttcgttatggcgtgccgcgcaacgccggaaaaatgtgttatagtcaacggtatgagtggttaggctaaccaagcctagccacttttttgtcgttgtttaaaatgatcgtcaggctgctagaaaaaataacggtcgctggttgacaatttatacagctggctgtataaatgaaagggcaggtgattaagatgaatcatgatgaaatggtggcgcggcaagttctgattttagctcgtcaaatcaagcggcgtcgcaaccaacatttgcggacggtggggttaacgactcagcaagcggatgcactgaccttttttacggatcagccaggtcgcacggtaaccgcgtttaagacgtatcaggaaattacccatcagacggccaggatgatcgtgcaacgcttgcagacgcgcggatatgtacaattagtggtcagtccaacggatgcgcgtgccaagcaagtggtagtgaccccgagtgggcgtgctaaacgcgagcagctccgtcaacatggctggcagacgagtgcgcaaatgtttgcccatttggatgccgaacaacaacaggtatttttagatttgttacggcaagttaatcagaatttagaaagtgatgagaattgatgaagacgcgtttatatacgccggatgtaaagttagtgttaatggctagtttcttctttttaatgagtccaatgttaatcaatcccgtgattgcaggatttgcgcacggtattggcgctagtagtgtgcttgccggtacgattgccgggttaacgaatttgacatcgctagtgctccggccacttgctgggaatttaaccgaccgggtctctaagtaccgtttgaccttcgtggggggctgtttgttgctactagctagtttaggttatagtttgacaaccaacgtgacgttaatcatgttattgcgaattttgaatgggttgggatataccttgtgttcagtttgcatggcaacctggatggctagtttattgccacccgatcgaattggctctggaatgggcatttatgggctagcgaatgcgcttggaatggcgtgcgggccggcaatcagtgtcttcttgtatcaacattacagttaccagagtgttttttggttagcagcgggctgtagtttactgctcatcatcatgattcaattcgtcggtgatcatggtgaaccaattgtgacgcctcaaacggctacgactaagcaccatattcgcatcgtacaaccacgagtaatccccgtggccttgattttgcttttattttcattaccatattttgccacccaaacctatattgtcagctacgtcgctgcacggcattttcatgtggcagcgggggtatttttcccggtgtacgcgggtattttattagtattgcgaattattctccgcgattggttcgaccgggtgccatttaaacggttcatctggttatgcttaatttttaatctattaggattgattggcttaactgacatgaacaattgggcgatgctactgctgggtgcagcaggactggccgccggatacggtttgatgttttcaatttgccaagctaaagcattgatgctcgtgccgaaagctgatcatgggctagccaatagtacgttttatattggtgttgatctcgggatgtcacttggccccatcattggcgggctgattagcagtcaattaccaatggcgtggttttatcccgtgatgatggtgacgctgccattgattatcgttgtttacctagtcagtcgtcggcagttagcttagccaccaacatgctggagaaggttgttcttggtatacacatgattatgaattttttcagtaggggatatcaaaaagtcacttcaagtttacgactgcctgaagtgactttttatctgcctttatataaacattttgatgccaaaataaataataataagaccaagaaatggcgttaatacgcggttgaccttatctaaatttaaatggcgaatcacgagtggtgtaatgattgcgccgataattgcgccaatcatgaggaccaatcctgattgccaagcaaaagtactagtaaagagatggccgattaaactgattgtggacataacagttaacacataggtggcagtaccagcggcttcaacggccgttagcccaagaattgctaacccggcagccgtggtcgcaccaccgcttaagccgccaatgccgaccatcaatccacttaaaaggccaaagaaggcagcttgccaaggttggtgaccggctgtagtttgtttagaatggtgaacatacttgattagtaccatcgcacccataatcaaaaaaattgtcccgacaatccagttatacagttgttggggaataaattgtgcgctgaatgtcccgacgatgataccgggaacggccgcaatgatcatttgattgccaatcttgaaattgacatttttgattttcaactgtgttagaaaaccaaagaataaggctggtaaggcgacgattagggaggttggtacggctaccgcggttgcaaggcctacttgactggttaagacacctaggtatagggcagcacctccgccaccaatcagactaacgaagatgccgattagtaatccggataaaaagacaaacgtagtgaattcccccttaaattgtataattataccttaaacggagtacactccgtttgtcaagtgatgcgtaaaagtgtatggtgaacttaagtaaataggagggtgtgtcgaatgcgaaaggatgcacaaattaaccaacagaaaattttgactgctgcgcgacaactctttgccgcgcgttcaatcgaaaccgttagtatgaaagatattgcgacggccgctggtatcggtcccggaacgttgtatcgtcactatgcccataaaagtacactatgtttggcattggtaacggaccgagtcgcaacttttattaaaaccaatcaagtctacttgaccacgacctcggtaggtgcagcggcacgttttgatcatgttattggggaatatttagcgattcgtgagcacaacatggcgttattaatgaatgtcgaggccggtgaacctggtcgccgtcaattttatcagagcgaactttatcaacaattatgtgacctattaacgcaactggttcgtgatttgaagccaacgctttcgaaaccggcatgtgagtttcaagctgatatgttaattgccatgctgaaggggactagttatgcttttcaacgtcaatggcgaggacggtcgcagtccgaactattggcgcaattgcacgcgttaatggtgactgaatgatgttcactattggcactagtggtttggcgattaacagagtgggttgattgttaaatcaaaaaagatggttctaggcggttaatcctagagccatctttttgaatgagtcgtttaagcaggtgtcaccacgtatttttcataacgttgggcatcgacagtgttgagttcgactgttaattgggtgccatcagctaagtaatccgttttgagaatgttggcgtggtcattcaagtaagccactacttcaccatcattgaacgggattaataacgttgttgtcacgtaattcttaaagactttggctttgatcatactggtcaaagcttgtagtgaggcctcatcacgcgccgtatagatgagttgatcatcttgctggttcgggtagtcggcttcggttaaatcagctttattgaaggcataaatcataggaacatcgtgcacaccgatttctttgagcgtcttttcagtggtcgccatcatttccttgtaatggggatcggcgtagtcgatgacttgaatgagtaagtcagcattggcagcttcggctagcgttgaacggaaggcgttgatcaagttatgcggcaagtcgctgacaaacccgactgtatcactgagcagtaactgcttattgtcagggaaggttaactgacgaatacttgtatctaacgttgcgaaaagcatgtctttttcgaagacttgcttatcttcacccttaccgaacagtttcactaaaccattcatagtcgttgatttaccagcgttggtataaccgactaaagcgacgttggggagcccagctttatcgcgttgtgaacgtcgcactacttcgtctttattgagttccttaagttcgtgcttcgcgtgactgatccggtcttgaattgtccggcgatttaattccagttgcgtttcaccagcaccacggttggtaaagcccccgccaccaccagcagcggccccagcctgttggtcaaggcgattggagatactcgttcgtaatcggggaagttggtattgtaattgggcaatcttaacttgcaatttggcttccttgctccgcgcacggttaccaaaaatttctaagatcagaccagtacggtcgatgatctgaatgtccgtttgttcctctaagttacgcacctgactaggggtcagatccgcgttgatgaccataatgtgcaaatcgttggcggctgcgacttctttgatttcgacaactttacctttgccgaagaaggtggccgggttgggtttttccaatccttggtcaattcgcagggccgcgtgcatattattggctgcaacgagcgcttctagctcggacatggcgtagtcgtaattggcgaccgttttagacatgccggcaatgatgacttcttgtactttttgagcgttggtttcagacatacactcactcctaacgtgttatgattgcattaagtataacatgtctaatcaaaatattacgacttcgggtattagggaggaatcaaaaatgggttacgtgcttgatttgcggcggcgagttggtcaccaaccgctagtagtggccggtgcggctttaatggcccaaaattcgattggcaaaattgtcttgatttatcgaaccgataaccactgttggggcttgccagctggatcgactgaaccgggagagacggtccagcaaacggcgcgacgggaattgaaagaagagactgggctgacggtgggtgagttaacgctgatcgatgtctatagtgggcccaagatgcactatcagtatcctaacggggacattattgacagtgtcaccacgttatatcgcgccaatacaacgggtggtgaattgattcaagccaccgatgagacgagtactgcggctttctttgctttagatgctttgccgacaccgttgaccccactgacaaagtggatgctttgcggtgagtaagcttgaccatgccgatgaggtttgctatagtggactgaaatattaagatgaattgtcaccggacaacgttaacccaacttccttaggtcattgtggaagttgggtggacgttgtcctttttattttgaggaggaattgataatgacgtggatttatttaattattgctggattatttgaagtggtatgggctacgatgatgaaattaagtaatgggttcagtcactttggctatgctgcggccacagtagttggcatggtcttgagttttggcttcttagcattagcaaccaaacacttaccgttgagtattgcatatccaatttggaccggtatcggtgcggtcggtgcgataattgttggcctggttttcttcaaagatacaattgcacccatcacgtgaatcttcattgcaatgctggtcattggcattattggtatcaaagtcacgagttaggattgggggggtgttagtgggtttgtgattcatcagtgaagccccaacagcttttcaatatttttataaaagaatgaccacaagcatgaaagcggtgttataataactttagaagttaaatgaatatttgggttattcttagacttcttccgacctgagatagacgcactgttgccaagactttacaaaattttcttgttacacccggtcaacgcactacctctcggaggggtttcttaatttcgtcagtaattctgtgtatagtcttggttgagtacaacaaatagtgaaagaagtgacgtctgatgatgatgtatccgtatctgaatttaggccccagagatggcgtcttgataattgcagctgctattatgttagctttaacggtagtttttaattggtcagtctgggaacttttgtttgctgttgtggcagtcgtaattgcgttcttagcaggaagcatgaaaccgtctaagaagaacgtgcttgcttttttgaaaaaatagtttgaattggggtagcatacctgaattcttcaaacacgtctttaaccagcaaagtttaaggacatcattgataagatagccgagttggttctctgtcaattgatgttgcgaatagtgctacgggtgcttagtcaaacaatggcgagcacctttttcaattcgaattgttcaatagcccatgattaaaatacaaataaagatatctgtcgccagtaatcacgtatttagttaattaccaacaacagttatttcagagccaatataaaaacactcgcgaccagtcagtggttgcgagcgttttgtttgatgagcaaaattataagtgttgattgactttcacgtcagctaagtcttgcgcataatcgacgacgcgaatttgatcgccattgatgtcgatgcgagtgacgctcccgtttttggggccgttcgtgatgtcgatttcaggagcaaaatgtgcgaccatactgcggattgtcgtgccgtgggtaaccacgaggactttttgatggtgatcgtggtgagctttcaagtagtcaaagccctggttgatccgttcccagtacatcgagttgtcttcagcttcatgccaagggtcgatttcacgcatcaggtcgcgagtctgatcgataggcacgtgttcaagaagttcgtgcatgctggtgaccccgtattggcggccaactagtgaccaggtccgacttgaatcgtcaccttcgaaataaccatagaaaacttcacgaaagttcatcagtgttttaaagggctgggcggtggcacccgccgcttgtcgaatgagctgagcggtgtcgattgcccgcttagaatcactgctgtagtagtagtcaaaagccgtgttcgctagtgcttgaccgaccttggttgcggtggcttgtccgtattcagttaacggcgagtcagaccagccttgcatgcgattatataagttgaaaaaagtctgtccgtgtcgaacaaagtaaattgaaaattgagccatgtgtttctccttatttagtcgagatggtctttgcggccaaagtagtctaacgtcacatcgttgtcgctaattgtgaatttcgtgacgctcccattttggggccgtgctggtgaggtcagtgcggcaaaacgagcagcaatactgtaaatcgtattgccgtggctgacgaccaaaactttgtccccgtcgtgatggtgagcacgtaacgtatcgagaccgccattgacccgttgccagaattcggcgttattttcggcgcgatggaacgggtcagcttctttacagaaatctttggctttttcgatgccgtattgttcaataattgcggacaaactaggtgcttgatggggcgcaccaaccatgaaccaggtctgcgacgtatcatcaccttcaaaatagccataaaaggcttcacggaaggcagccattggttgaaccgtcaaatcggtattgccactggcaggaagaattaattctgcggtgcgcattgcccgcgtcatgtcactggcgtaaacggcatcgaaatcaataccgttgagcattttacctgcattgcgagcgtcctgttcgccgacagctgtgaggggggaatcacaccagccctgcattcggcggtacttgttaaagtaagtttgaccatgacgaatcatgtaaacggaaaaagttgccattatttactcctctacttggtgttcaaaactaagccataatgtgtttagtttaccataaaatgcactgcgattaattagcagttgctaaggcttgtcgaatctgagcggccgtttgcttattcccggtaaagattaagcggtcaccgtacataatcgtcgtatttccattgggcgcgatcagtttccgattacggatgacttgactaatggtaatatcctgagcaaactgtaagttcttaatttgaacatcagtatagagatggttgaggacccggacttcgtagatgctgttttcagtatcattgagcaatagcaaggttgacggtgattcaattaaggcgcgcagtaaagtaatgttggcctctggtgtattgtagacttcgacgcctagctctcggagttcatcttcatgttcgttgagcacattgcggtcttcaaaccgaacgatgatccgccgtacaccgtatgctttggcggctttagcaagctcgtagttacgttcggcatcaatatggccgagtaccaaaatatccgtgtcaaagacgccgtgatcctgtaagtcctgggctgtgaagttttccattaaggtcactggcacttgcgcgtggtaggtttgataattctcaggatgattcgtgtacattgacacgtcgtaccagccttttcgtagctgttgtgcaacgggtacggtgcttaagttagcgccgataaagtggaccgctgttttgaccaggtcttctttttcagctgaataaaacttgttaaaaatcaggggtgagatgacacaagtgagtagcgctgcgagtaagaaagcgccggactggtcactagtaattgtcttcattgacttggcaactcgaagaacggctaataccattgtcattgtcgttgcagtcagcgcggtaccggctaaagcattggcttgcttgaaccgtaactttaggacccagtagccgccaatcttggcaaccatgtatgctaagaaaaatagtggaattaatagtaaggttttgccacttgttaataaggtccgtaagttcaaatcgacgccagtcgtaatgaagaaaatcgggatgaagaagccgtaaccaatagcatccaagcgttcgcgggtcgtttcactagggttcaagagtttcaagacgattccggccacaaaagcgcccaggatattttcagcaccgacggattcggccaccgtgaccatcgttacaatcaagaagaaggctaaccgaatatctagttgtgtcgtcgatttgttaatattttgatagaagcggaagaatggtttgaaccgtaagagtaatagtgcggcaacggctaaaatgagtaatagtaaccagagactttgtgagttactgccgtagacggatgcatagagcgtcagtcccatcatcggtacaagttcaccaaagaccgagatgagcagaatcgtttgtccgaaagccttactaagcaattcctgttcttttaaagctgcaattacaataccaagtgaaatcgtgccaaataaaatcgcggcaagccagaaatcactgaagaggccgctgactttaaaagcagcggcgagtaacagcgatagaacaataattgtgctgtaggcgtacaccgaaagtcgaactggcgaatatttcggtgtgttgaccgcgtttttttgttctaaaggtgttaacgccgtgcgccgcttcttaaataggctaaagtcaatttcaagtccacttaagaacagcaggacgatgacgccaatcgttgagagttgtgagataaggtcagaggtgttcacaaagttaaacacgctggggccaattacgataccgacaatgatttccatgacggccgttggcaaactgttgattttgaatttagccatgataagcggaattaataatgcggctaataaaataatgactaaggaaacttgatccatgaataaatacctcgattcgttttagtacacacggagctgatcatcatcaaagccccagaaagcttcgctagcatgtgcatcggtgaaaactttcaggatttggtcgacaccaggggctaatttgtcaggcgtcagttggctcaatggttgccaactaatggccccctcgtatgagccggctagcaaatcaccgtgatagtgactagtggtgtataaggtaccaagcgacacgtcgccgtccgcattttcgacccacgttacggtgccaactaattttaattgatcgacgtgcaagccggtttcttctaatacttcacgcttcatcgcggttacttgtgattcaccgcgatcaacatggccgccaggaaaagttaaccccgaccactgtgcgtcaatcttattttcaaccaggacatcgccggtcgctggattggtgataaggcacatgttgacgagttctgcacggacggtccggtcgtggtgttcatgctgatccttagtggctaaccagtcttgggccttgtcattgatgcttgccatgaatgctgctttcatttgtaggtaggctgcgagatcggcttgtccattgcgcacacctttttcgcgaatggcagtatacttgcggccgtctgtccggtgcgcattgagataatcccggaaagtgagcaattgctgataatgctgttcatcagttgtaatgatcacgtggatgtcgttagcagctaattgcgtcgcgtaagtatgcgtcgttccagcgaccggtcgtgcgtgtaacgtagctacggcagccgcctgatctttaacaagcaacgccaagtcaattgttggacgcgctaataattggggcatggccgtactacccacgtgactactttttaatagattcgcctgtaattgctggcgtaacaaggtttgatactcggttgcttgcttttgccagtcagattgataggcagttaattgaattggttgcatagaatccctccactcgaataagtcattgaaaggatacactttttgagtggttttgaaaaggaaagacatgcctttcaaagcgagaagcaataaaaaaacacgattgcagatcaaccgtgttgtgtgtggcgcttatttgagattgagtgttgtccgttgtcgccaggtcttaatcagcgcaaccactgtggctggaatgagcgcggcggccataattcctagaaaacaaagcgagaggtggttttgtacgaagctgatcgagccaaagaagtaaccgagtgaacagccgacactgacccagataccaacgccaactaagttccagatagcgaaggtcggttgcggcattttagcggccccggcactcagcgggacaaaggtccgcacgagtggaacaaagcggccaaacatgacagctttcgcgccatacttagcaaaaaattgttgtgcgcgttgttgcttggattgggggaggtggcattgcaaccacggtaagcgaatcagatggcggccaatttcgaaattgacagtgtcgccaattacagcagccacaaagaatactggcaccagaatctgaatactgagggcgtcgctgtgagttgcagccatcgtgctggtgagaaagatcaatgattcgccgggaagaaatgggaaaacaaccatgcccgtttcaagaaagataacggcgaataataagatgtaagaccaactaccaagcgtagttaatagtgggacgatactttgttctaaatgggttaaaatggctattaaattgaccaacggcgccacctccaatttaagttgcatttattataagcgtctgcgggttgaaaaacatatgtaaccgattacatttcttccagtttaacacaatcgtaactttgatagaccaatgttcaaacaaatttacataaaaaatcaaaaactggcggctgccatgggttattaattgagtcgggccgccgatagtgataaaattattgttcgatatttaggaatggagggcgttcaatggctaagtcaattaaagctgcagaacaggaacacttagatcatgtggttgcgaaaattaaggtggctgaagagcaacaaagccaaaccattacgcgctcggaaaaagatcaggccgatattaaacgtgacttgctgaataacatcaatataaaaacggatagttacgaaggcatgatggagaccggattatccgtgcggcagcaacaacagatgatggatgagcggcagaatagttggaagcacgcgactaagcaattatcgacgttaaaaaagttggaaaagaatgcttattttgcgcggatcgattttcatgagactggtgagcctaagcctgagacgatttatatcggactcagttcattttctgacacgccgaatcactttttgatctacgactggcgagcgcctatttccagtatttattatgacggtgggttagggcacgtgacgtaccagactccggatggtgaacagaccgttaatgtgaagttgaagcggcagttgatggttgagaatggccagatcgtgacagtctacgatactgatgaagccgttggtgactcgatgttactagaagtgttggatgaaaagtccgatgtgaagatgaagagtatcgtgacgacgattcaaaaggaacaaaataccattattcgggatacgagttctgacctcctgtttgtgcagggggcggccggttccgggaagacctcgtccgttttacaacgggtcgcatacttgttgtatcgttaccggggtaatttgacggccggacaagtcatcttgttctcaccaaatcaactctttaatgattatattaaccaagtattgcccgaactgggtgaacaaaacatggttcagatgacttatttccaatacgcatcgtaccggttaccacacatgcaagttgaaactttacagcagcggtttgaaactgaaaatacaccgcagatggcaaagattacgaagttggaaggtagcctcgcatttttcaacgcggttacaacgtatggccgacatttggaacaagcggacatgcgtttccgtaacattacgttgaacgatgaagtgattatttcccgggaaaagattaaatcgatttactactctttcaacgaaaactaccacttagcgaaccggttatcagcaactaaggaagaattaatcaagattttgaatcgcaaggttgaatcggagatgcgttccaagtgggtcgaagaagcggttcaagacttatcacgcgaagagatcaatcaattatatggcaatcagccgcgggaatttaagaatggcgataaagagtttaaattcttagcacgtaaaattgtgatgcaacgcttaggaaaagcccggacgcaaatcgtgcgtaaccgtttcttgagcatcaacatgcagtacgcgcatttcttacgcgaagtaccgaagatcatcaagttggctgatcacggtatctcagctgctgactgggatgctacggttgaacggaaactagccgagattaaggaacgtcatatctcgttaacaacggtctcagcttacatgtacctgcatgacttaatgaccggaaagcacgggcagcgtgacatccggtttgtcttcttggatgagattcaagattacaacgcctttcagctagcgttcctgaagtttagcttccctcaagcccgcttcacaatgctcggtgacttgaaccaggcgatttttaccaaggaaaacagccattcgctgatcaatgaattggccacattatttgaccctgaaaagacgcgggtcgtgcaattgactaaatcgtaccggtcaacgcaacagattactgatttcaccaaggaaattttagtcaatggtgaagccgtcacggcttttgatcgtcagggcgacttgccaaatgtcgttgtgacgcctaactttgaagcaggggttgatcaagtcgttgatcagctagcgatgaacgattctgaacgtgatacgacggcaattatcgggaaatccttagcagaatgcgaggcgctcacgaaggccctgaaagctcgtggtgagcaggtcacgttgattcaaactgaaaatcaacgcttggctcctggtgtcattgtagtcccgtctttcttagcaaaagggttggagtttgacgcggtcatcgtgtggaacgctaatcaggaaaattaccaacgtgaagatgaacggcaactattatatacaatctgttcacgggccatgcacgagctaacgctagtcgcggtgggtagcttgtcaccgttactagcgcgggtgaaccacgccttgtatacattaaatgaagcaaaagtttaagtcagtttaagacagtgagtaccgctccattcacctggagtggtactttttttagttttacttgtgaaggaaatcttaaggtgcgtcaggatgatcagtagtggaacagttgggacttgtgtcggaataactaagaaaacgctatcataacgatggaataagcgttaaaattaactcatcaagtgcagtagtcggtgagagacaatgaccttaatactgactaggcacataatatcgtgaaaatactaacaactagttagaacggttgttagtgacctgaggaggaaacgacgatgtcaatcactgaaatgttaggtattcaatatcccattttttctggtgccatgatgcgaattgcgacccatgaattagtcggggcggtttcggaagctgggggactcggtgttttaggttcagcggggttatctgccgaacagttgcgagcagagatccaagcgacccgcaagctgacggataagccgtttggtgtcaatttaatgttacagatgaagaactgtccagaactggcccaagtcatcattgatgagggggtcaaggtcgtgacgactggtgcgggtaacccgacttcatatattccgccgctacacgcggccggtattaaagtgattccagtgattgcttcggttcaccatgcccataagatggtggcggccggtgcggatgcggtggttgctgaaggtcaagaatcaggcggacatatcggtcaaacgtcaacgatggcattattacctcaagtcgtggacgctgttgatattccggtgattggtgctggcggtgtcggtgatggccgctcgattgcggcgatgtttgcgctggccgcccagggtgtgcagtgcggtacgatctttctgacagctgaggagtgcccagttccagctagttataagcaacgggtattggctgccagtgacacggatacaatcgtgactggccgcagccagcgcgatccggtacgggcgctagttaacccgatgttggcacaatacttgcgattggagcaaactaacgcgccggtagcggaattacacgcgttagcggacggttcatttgcgaaagccgttgaagatggcgatatggaacatggtacgcctatggccggtgaagtggcagggatgatgacgacaattcggccagtcaaggaaattattacgacgttgtttggtcaggctcgtgaggtcgcggcacaactgaaaatcgaataagatacagtagcatagctcggtactaggtcagcgttaactagtatcgagctattaatggttattggctaccaattaggaatccggttaatttgaattttaatcagcgtttgataagggtttcatgttataatcaacccattaatttagtaatggtggcagacagaaatcatggaagatcagatgaactattatcgcttctcacgtgaacagtggaagcaattttatcgtaacaatcagcatcaagtaccattgaccgcagccaatttgcacgaaattgaggcgtttaatgaccggattagtctcgacgatgtccgtgatatttatatgccgtttgcgcatttgttgcaggccaagtatgaacactacttgtcatggcgggaaacggagtccgtttttttacaccgtcagaaccgccaatcaccctttattattggagtgtctggaagtgtggcagttggcaagaccaccacagcacggttattagagattctatttaaatatttatatccagaccggcggacgcaattgattacgacggatggtttcttatacccgaatgccgagctcaaaaagatgcaattgatggaacgcaaagggtttccggaaagctatgatatgacgcggctgatccaattcttgaacgatgtgaagagcggaaagccgttagcgaaggccccggtatactctcatcagacttatgatattgtgccaaaccgttttgacgtgatcacgcatcctgatattttgattattgaaggaatcaacgtgttgcaattgccaagcaatcaggcgatctacattagtgattttacggacttctcagtgtatgtggatgcggatgccgatttaattgaagattggtacttagaacgcttcaaggccctgatgaaaacggctttccaggatccgacgaattatttctatccttgggcgatcggtgatccgaaggacgcaatggcgatggccgagcgtgtttgggaagaggttaacttgaaaaacttgaatgattatatcttgccaacccgtaatcgtgcggatttaattttgcacaaagttgcgcatcatgtgattgatgccgtgtatttccgcaaatattagcacctaagaaatttctcatactggttgaccgaacgtttagaaatcagtatgatagacctattgagcattaattaatccaaaggagtgaacaacttggcaaaaacggataccgcgtctttcgattccattttggtattggatttcggtagtcagtataatcaattgattacccggcgcattcgtgatttcggcgtttattcggaactacttccgaacacgatcaccgctgaagaaatcaaggcccgtcacccgaaaggtattatcttttctggtggccccaacagtgtttacgatgatggcgcctttcgggttgacccggagattttcaagttgggcttaccaatcttggggatttgttacggcatgcaactgatgacctacacgcttgcgggcgggaaggtcgaatcagctgataaccgtgaatacggcaaggcgaacattgacgtgacgagtgactcggcgaccctatttaagaacacgccagctgagcagtcagtgtggatgagtcatggtgacttggttactcaggcacctgatggttttgacgtggtggccacttctaagaactgcccgattgcggcaattcaagatgttgaccggaagttatatgggattcaattccatgctgaagttcggaatacggactacggtaatgatattctacggcactttgcatttgacgtttgccaagctgaagctaactggtcaatggatgatttcattgatatgcagattgaaaagatccgcgctgaagttggcgacaaaaaggtcttactgggactttccggtggggttgattccagtgtcgtcggtgtgttattgcacaaggccattggcacgcaattaaccagtattttcgttgaccatggtttgttacggaagggcgaagctgatcaagttatggcgagcctagaaggtaagttcggcttgaacatcatcaaagttgatgctaaggaccgcttcttaagcaagttggctggtgtcagtgatcctgaacggaaacgtaagattattggtaacgaatttatccaagtgtttgatgaagaagccacgaagttaaacgggatggaattcctcgcacaggggaccctctacaccgatgtgattgaaagtgggacttcaacggcccaaacaatcaagtcacatcataatgttggtggtttgccagaagacatgcagttcaagttgattgaaccgctacggacgttatttaaggacgaagcacgggaactcggtgaaaagctagggatgccgtctgaccttgtttggcgtcaaccattccccggccctggtctcggaattcgggttattggtgagattacggaagataagttagaaattgtgcgcgatagtgactttatcttacgtgatgaaatcaaaaaagccggcttggaccgtgaaatctggcaatacttcaccgtattaccaggcatcaagtcagtcggtgtcatgggtgacggccggacctacgattacaccgttggtattcgggccgtgacatcaatcgacggtatgaccgccgactttgcacgtattccatgggatgtcttacaaaagatctcagtgcggatcgtcaatgaagtcgatcacgttaaccgcatcgtgtacgatgttacgagtaagccaccttcgacaattgaatgggaatagaaaatcatataaaaatgaaatcgtaatattgatttaacagtatttgtgagcttataaaatggatgaattggtggcgaatctgaaagatttcctatcaacagtctcactaagaatcgtggaggtctttagtcacttaggagtgattaaggatttgcacgattctttttttattggattcttgtttgttcacaaaacattgcggataatgtaagtaagtagagatatatcatatagagtgtggaagaactgttatggcaattacagaagtttaagactaaatctaattgataattgatgaaccaaatcacaaagagtttgttagcacttttgaagagtgaatcaaagagaacccagaaaataatttctaagttatgaaagtggtaatgatttttacaaagaattgaatgaagcttattaaaaaacaaacttttatttaagcgtactaattcagatttaatgcaggcgtaatatcgatggtgtaataggattatgaatggtttgttttcagaagttagtgcaatcaaggttaaattctgagtgataattttattttttatcattagtaggacattttttagtaggacattttttgacatttgtgactagtgatattgcagtgcacgatacaaaggtgatagtgtagttagtatagaatagtgagtgaaaaggagtgaggaggggtcatgagtaattatctagtgggtcctgataagaaaaatctgtttggtcggcggtcaacgtgggattttgatcaggcaattgaagcgtccagtgatggagatgtcattgagattgaggcgggatttgatccgttcaacggtcaaaataaccaatctatagttattactaaaagtattacaattcagggtcacgttgaaaatagagagaatgaacatatctataccaatacaatcgatggtattgtagtgaaggatggagctacagtaacgttgcaaaatatttgtattcagaaaaatactgataagagtaatgcaattactgtgcgtatgggttcaactgtaattgctgaagatgtttacttaattaacaaatcaacgactggaacaaactatccaattgtgtatattagtggaaattcacatgtacaattaaagaatgtaacagtcggagctagcaaaatttcagatggaaagcatcgtatttacgtcgagaattctgagctgactattcgtaattcatggatttgtgcaaaggtgtatttgaagcatgctcaatttttatgtcataaaagtcaactagaatacacggacggttgtgtgcttaacggaaatgaacaaagtactatccaattaatatcgtcaactttaacgggtggaaaaattctgtctaaagaagtgtatccatgcgttcatatatgtgattccaaattaacctgtcaagattgttctattaatcagcccaagtttgacatggctctattggtgttaaacagtcaaatgacacttaaaggtggtcaagtggattcagttagtttagatcacaccacggctaatattaacgaaacactgattcgggaaagctttgcaatcaaaaatggaacacaagtcactggaaatcgcttttttattctagggcgtgacaacggcaaagtaaatttgtatattgcgggccgctctaatattcaggtctgccatattatttttggacaaatctcaaatccaaatttgaaacttgaacggaatgtagatatcggtaagacagcattagattactaccaatataatttaaacaatgggacgtttgtggtggatcaaacaaatcattacatttccgcggacaagcagggtcaagtgagttattttggtaaaaagcctgcgttggatcgtctcaatgaaatgatagggattagtggagttaaatcggagattaatgaatttattgctatagcccaaatgaataagcagcgtaaggagcaagggataagtagtgatgccatgacactacattcactattcctaggtaatccggggacaggaaaaacaaccgttgcacgtattttaggtgaaattttatttgacaaaggaatcattaacgatcagaaatttgtcgaggtttcacgttcggacattgtaggacgttatattggcgaaactgcgataaaaactcgtaaagttctagagtctgctcttggcggagtcctatttattgatgaggcatatacgctagctaacggggatgagaaagactttggacggaagccatcgatgagattttaaaattcatagaggatcatcgtgcggatgttgttgttattttcgctgggtataccgatcgtatggaaaagttcttaaaaatgaatgagggactgcgaagccggattcctaatcactttatgtttgaagattatacaccccaggaattaattgaaattggctggaatgacttaaaggctaaaaattatattgtggataaaactgcatacacggacttagttatgcataattttaatgtctctcacgatcatagtaatggccgctgggttcgtaatcttaatgaaaggttaatcaggaaatttgctgttcgtgtcgccggccagcaaggagaagacctttctgcaattaagcagcaggatattgatgctgcaatgttatagtgacaacagaggagtagtgaagaatgacagaaaagaaacagtatgttcggccgcccaagccagtaaagataaagcctacggtatctaggaaaaaacttagccataaattagacgcatataattatttacatcccgattattggaagcgaaagttagctcacttattactagtaataccagttgtgtggaccatttatggtatgattctactggccatcttttatccaggtatgcaatcaggaattggagttactgttagcttattaggagtaacgatgagtgtattgcatattgttctgacggcaataagtgcttatttctatccatttagtttgtactggtatcgtgaaagtttgataggacgcattttaaatggcatgtggtactttggtggcttctgggttgttattggaaaaattattgtcacactgattggtggcattttgattgcaggtcttttggcaccgattgctggaccaataacattacgtcgttgccgacgaaaaaatataatcattggtgacgcaaaagattttgaatagaatattattaataataagtaagtggatctagaacctgttgcagtgctatgatccctttatggttgtcagatgaaataatataattcatctgacaaccatggagggattttttatatgccaaggtctagacatacaccggccgaaaaattggctttaattactgattttcagagctctggcctttctattagcgcatttagcaagcaacatgaattgagttgttattccattagataatgggatgttatgctatcaacgtgacggtattgatggactagcagaggccactaagaatcagcactacagtcagactttcaagcagaagatcattcgagcatatttgaatggcgagggaacaattcaaggattaactaataaatatggattacgttcaacttcacagctaagaaactggccaatcaagtataatagggacaaactgtgacggcttcaccgtctagaaagcaggtcctaaaatgagccgtaaaacgacttttaatgagcgagtaacgattttggaatggattaataaaggtaatcattcatacagtgaggccgccgaacatttcaacgtttcttatcagcaagcccgttattgggccttaaaggaccaagctaaaggttttgaagttttggtcgataaccgaggacatcgtaaacccgaatcagaattaaccgatttggacaaagccaatctgtggattagacaattagaatcacaaagcaaggatcagcagttattagaggctttcataaaaaaatatcaggaactttagcgcaagggtgaattcacaacgtcgactggcttaccacgcaatcaaggaagttagtcaaaataatcacggtacggtcactaagttattatcaatactcaaagttagccgccaggcatattataaggggctccatcgtgacgtaacgacttgggaaattcgagataacttcttaactgaacgggttcaatactggtataaccaacatcatcaaagtattggcagctatctaatctcagaaaagacccgaccgttaccgaacaggtgacgttaaagcaagttaagcgaattatgatcaagcttggaattcgttgccaggttcgtcagaaaaagcattcacggatcaaacaacaggagcaatacttacaagataatgttttaaatcagcattttagcgttaaccaaccaaatcaggtctggttggccgattcaactgaattaatttatggtgttaatggtcagtataaagtacgcctgagtggctactgggtctttgcggtcggcatctaattgcccataaactaagtgaaactgaaactacgaatgcggaagttcaggtttttcaacgggcctttaattttgcgggtgacgtccaccctgtagtgcatactgaccgaggttcggcatacatatcaggagtattcaataatttttggcgcaacatgaggtactcgtagcatgtcacgaccaggaacgccatatgataacgcaccaatggaacgatttcaaattacgttggatggaccgacatgccaaaccagctacctataaagaattagtggccttggttgaagaaggcagcaactactttaatcagctagaccgttcatcagcaagaaacgacctcaccccagcggaatactggaatgaggccgtttaagtagagcaaaacttatattatttcaaatgacaacttgacagatactcgtacagtaggaactccaatgaaagaggttttcgtcttggtgtttttattttgtaaaaatactagtggctaacttgattttaaaactcaccatcaatgttccgtctcatttcaatgaattttttatatctaggatattgaatgtgatgaaaatctagctcaggcataatattgattagggaactgtcgtgaaaatgcgtgttattcaatagccattctatctttctgtaacattcagcaactacttcatcattactacattccataaaaatcactgaagtgacaaaaatatcgtcaatattatcttcagtttttttcaaattaaagaaataacgctttaatgaattagcaagatcatctagattgagttttttgggattttcaatatagctgaggtaaatatttgcccaggtgattccagtttcgtttcctattgaggattctaaagtatcaaacgtaacctgtttgaaggtctcaggtttcttcataaacttctgtattgtcttaatgggaggtttcaagagtgctttagaaacttctgtatagtcagagttccaagtacttatttcaaaaaagtttccaatcaatctttttactagagaacgtagcacgtcaaattcagatacgttttgagaaatgttaaaaaatggagtcagcggccaccggaatattggctgaaataaaaatctgccgtgtgcaatcgcatttctaagtttaattactgattcaacgaaatacatatcattttctgaatctataccattttttgatagtaaatattttatttttgtgctaaagttagggctctttgcgcctagagctgttgatacaatcttatatttatcgttaacatagttatcaagttcgtcattccttgttagcataagtgaagcatattctttcaaacttgactttattttgctttccgcaattttctttaattcatcttcgcggctgttactcaatagttctaaaatttgaaagagtccaagtaaagcttcatcacgatataaattgctttctaaatcctcattctctaggttgagatttttgcgccatcggtcgagtagagaaatagaaaggtttttatactttgaatcattgattttaaataatactttttctaaatcttttgaatagtcattcatttcggtttgaaaaatagtttttgggggattgtcgataccatttttaaccacgaaagaggatcctgattcagtaatgtcataaatagtgatgggacattcaagaaatagagaaattatcccttgaatgacaagtaaccatggtctcattagtcttgaagtttctacttgtgaataaattgggtctatattcaattcaccacgaactgcaattacagtgcttttatcacgactaattgattcaactgttataccattgaagctaaaatatattttgatattacttaaatcgtaagtattactgtcgacagagtgaactgtaaaaaagtgagttttcaaaatgttttcatcttctctcaagttttagtaagcatacatttttcttgcttttatacatacatcatatcaataaaaattttatttaaaattttttcaagcattgtcagaatttatgatagttgaaggattgattcagcttaaacgctggctgacaagtgtacttatcggcatttatcgcaagtatgtcaaatcagaattaaatagcatatcgaatccatccggtaaggatagttattctatattcatcagttaacgttccacgggcgtttctaagagcagtagcgataaacccggtgatagtagtcgctatgaactttgaagtgttaacaaattgttggtaactttgttagccaacgggcattcgaatgtcagtattgagaaatgtgtgcatagcactgagtaaatttggtttgctttgcaattgcaaaagacttgtcagaattcgttaattgtaacggccttttataaatggtttgcacaattggaacgtacgttctttttgggcctgaataaaagcccagttaagggctgatattactaactgattgcagattagactatgcttgtggttgactaaaatactttaatgaagctaaatataaagatccaccaataattgcgagaattccgccaatccaacccaagaatggaataagcgcgattgcgccgccgacaattagtaaaacgcctgatgcagtaccgacacgcttatcacctttataataaattaatgcaataattcctaatgctaaaatagcaattttcaaaatgtttaggaaagcggccgcacctgatgtattagatactgatccagtggcagcatcgctaacaatgccaccagcaataaaccagcccccgaataataaaataatgccgccgactagccctacaatcccgttagtaagtgctaaattttttgacttcatgttgaagctcctccctttattaacagcttttcgtgtcgatcagtttattggacataagttgttgaagcctacccaaaccattaatccccgtattgataggcttatttttcgtataaataaacaaaggtgaccaatattctggccgataaataagctttccataagcgtgcccgaagtaacttggttcgaacattaagatacttcatcgtaaggggcgttagtcgcgtttagccctattcccagaagatgacggccattgctactcgtacttgttggcgttcttcttccgtaagtgcttcgcctccgtatgtcatcgaatccacatgagctgtgagaaagtcttttaagtcagtggtatcttttctagcaatccatttagatgcgctatcttcacccagcaggtagtcggttgtcacatcatatagatctgcaatctgtttaagcatgttcaaatctggctcattcgtgccatattcatagttggcatatcgctgcatactgctcaaccctaatttcctggccacctcagtttttgaccagttccgactgtcacgaaggttaattagtcttcgaatgaagttgttttgtgtttttgctggcatgttatagtctcccaatgaacgtattgtataatatttaaacgtaaaatttatatttttaaataaaaaatttaataaatagcttatttaaataaaaaatttaataaatagcttatttaaataaactatttaatataaaacatgatttatcgatataaattaatcgcttgttaattataatgcattcaggttgttggaacaaaatagattagtatcaagtgttatctagatgatggttttattcctaggatgctactagatttagatacgatttttctcactttaatatatacggagataatgatttgagaattagtatgatttggaatatcggcagagttctccaaacagataaataattaaaaataggtggttagacttaaaacgatcactgttttccgatgattgtagtttcttaagatagactggtcaaatagtgcaatcataatttcactctgaagaggtgattgttcacaatcaaatggtcttcattatggtattatgacaaggacactagtggatgtttagtcagcttggcggactaatcccaaaacgagctgaaaagctgatgcaaacacataaggaggttggaaaattttgaagtcgaatcgttctattgtcacctggctcctcaatatcgttaaactaattggtctattcgcactatatcaactcgctatgattcctacgatgatgccagcaattcgacacgggttctcggccacggcaacactaattgccggagtggcaagtttagtcttgctcggattactcatttggtggctggtaacgatttatcgtcgtcaagcgccaatcgtgaccagtttatcacgaccgacacgtccggtgttaacgatagtgggcctatttatcctggttgagttaggtaacgtgttggcgggacttatcgtgaaacaaccccctgaaaaccaagtgattttggataaggtatttactactagtccagtcattaatgttgtcatgatggcagtactggcaccgattgtcgaagaactgatttttcgtgggctgatgtatcgttggttatttccgcgggtcacaaattgggtgagtttcacggttgcattagtttttgcgagtttagtatttgcccttgcccatacgttatcatttagccctgcgctactagcctacttaccgatcgccgtcgtgctgacttttacgtacgtgtggttcaacgatattcgctatagtgtcaccttgcacattatcaataattcattagccatggttggcatgttgactttgctttcacgttaacacaggttatcctaccgacatagcggttgacattcgcgtattagtcgcgtgatgtgtaatgattaaaacaggcaacgtccaaattttgggcgctgcctgttttattaatagcggtgtggttgatgtagtggtaatcattgtttggtcacttaataatattaaacagttcagttataccaagaatattattatgatacaattttcgatggaggtggcgagatgcgtacaattacaccaattgagaacagtcggcgacatgaagaattttgtccattggatacaaccttgagtatcttgtcgggtaaatggaaatcaattattatctgtcgattaatggggagttcgcagcgcttttcgtccttattaaaaggcatgccgggctgtaccagtcgaatgttagcgatgcaactaaaggaattagttgcggatcagattgtgagtcaacaaacggtcgctaatcattcagtttatgagttaacgaacattggagtatcactagttccaatcgttaaagcaatggatcgatgggggaaggcttaccttgaaacgttacagttggcgtagtcgattggtcaatgcttagactaagtataggacgtcattattagccactatttttaacaatcataaaaactgctcgcaggaatcttcgggatatactcctctttgggtagacaagcaaataatcaaagcttgtctacctaaggaggagtttttctatgggcagaaaaggttctcgctatacgattaaagagaagttgttttacattggtctagttactcagggaatggctcctaatgccgttca

SEQ ID NO: 4 - DNA, 208393 bp, synthetic construct
  source 1..208393: mol_type = other DNA; note = Lactobacillus plantarum PDA6 - Contig 4
ccaaaggaaaataccaaagacaagtggacctgtgattaccacgtttattgtgagcgccatttgattgagaacttcttcaatcagttgaagaactttcgtaggattgcaacgcgttatgataagctcgctcatgtttatctggctacggtctacattgcctcaatttgcatcttacttaagtagttttaagacggaccctagtaagcttttgatagtctcagtatagcttgaacactagtttgactggaaatgatatgcatcattactgaattagtcgggtcaatgagcattttgattgctcaatataaatattatagttatgataattttaatcacacaatatcgggatggagtgtgttcacaatgggatggataggtgttgcgatattaggactaacaataggtatcgttgcaaatgcggtaggcgcacatggtcggcgtcaaacgacaattaatttaatcgcaggcttattcggtgcacttggtggccagctgtcttttggatggttcgggccaacagttgctggaatgacgttgttgccagtcgtgagcggggcgatgatacttattgtgatcggaaccgttgctgcccaggcgcttcagccgcagtaattgtgattaggcataaaaggatttgttgaagtagcacttgttagcgttatcaaaagatggaggtgtccgtaatggctaaaattaaacgacagacccctggtttttggggtaaattgtcactattgattgcaattgggcaattaggattgactgtgtttcgagaagtgcggcagttcaaacaccgccgctaaaaaggggatgacagcatgcattggttatgggtaatgattgttggcgcggcggttggtgcttttgcaggtgctatcatgagccccagtcaatcgcggggttggatcggtcacattattgctggcgttcttggggcactcattggtgaaggtgtgctggggccgatggggcctgagttagccggaatgactgtgataccagccgcaatcggtgcaattgccgtcgttctgataatgatgttcgtggttcagtgggcacgggttcgacggtcaaaacacaattgaacagtgccaattgacagcctggctgttacgctcggcatcaaaaaatgttaaacatcaccctaaacagccccacaggtgacttcgaggtactagcttactcgaagttgtttttgtgtgcgccgatgggggctctcatttgaagtggcgtaatcataaaaaaacggatggtgattttgatcaccatccgtttgcgccgtgcccacgacaaattttaatcgtcagatttcttcttcattttatccttagcttcatccacgacgcccttaacagtttcttctgcgtcagctaatttgtccttagctttgcccattaaggattgtgttttgccctgggcttcacgtgcacggtccccggttactttaccttcgacttctttggccttgccgctcaactggtccttcttgctatcgaacttcttgttaacatcactcataaaaagcgcctcctaatataagaattaaccttagtttgcgataagtgatgacaaaacgcaaccaatatgcacaatgctcataaccactcggtcagaaaggcaatcagtagggcagcaaagttgatcagccaaatttgttgtcgctgggggagcatgattgtcggatgatgtgtcaaaacgatcgtgttcaacaaaaccattaaaataatcagggcgctgagcccgtaatttgtagcgatcaacagatggtcgctggcaatgccggcccaatgagtcagggcaaaaatcaagtttaaaaaacacgcaattaggatactatggcgtagatactttaacgtggtcatcaatggtaacctcccttagaaataatcatgctgatggtttctaagaaaaaatacaccattgccaggttaacggcgtgcaccgagttttatttggatagtaacggaactaagcgcattttgaccagtccgaaagccgcgccacatcaataatggttgccctcaaaaacggatagggggtgtgatttataggtttaaatcagtatcgtaattcaacggtgacatatcggtgcttttagtaatcaggtcagcggcgagagcttgcattgtgttcaaggcctggtcagcggctttttgattggctttggtcagtgccatagcgagttcgtcgccagtcaaagcggcaacttgctgatccgtgacaataatgtggtgaccaagttgaatcgccaattccttttgtactgtttgtaattccccgtgtagttcatggtagtgggcgtcgactaggataccgacgtgcttgaaaatccagtatgctgaggtagcatcgtatttttctgtagcaacttgataagctgctggagtggtcgtagcaccggcatagaatggaacgtagacactttcagcggctacacccatcgccagccagtgaatctcgctcagcgtgacgggaaggtccggtcgcaattgtaagacgtgtgattcttgcgtcttggcgagactgatgggccgatactgatgtttctccgtagcagtgccctggccgacgggatcaaacggtgtgccttgataatgggacgctaagtagccttggacttggtcaatatgaattaagccatccgcccgttgaatgaacggtaagtcaaacgactcaggcgtctgggtgacacttggtgtaaagcatctttgaccataccaaacgcgaggcgtgttgtaatatcgatcagaaaggtcggccgtaccgaagacttcccggaaattcagtccattgtccattgaagctaactgattgtctaatacaaaattacgaatgtctttagcataaagataattgtcatggtcactaaagtcgatttcttggattgcaagctggttagcaacgactgcataggcatcatccgggattcgttgtgcgacccagtaatgaccagcaccagtttccatgtaccaaacttcgttgacatcactaaaaagaatcccgttagtttcgtaggtgccgtgttcttcaataatatgcccgagacgttcaacgccttcacgagcagaatgaatgtacggtaaggtgacagtgaccattgcttcttcaccgatgccgtccttaacatacgggtcagcagccagtacgcgtgtattacagtaagcactttcagtagcactcattgccacgccgtactcgttaatgccatcctcctcgaacaggccatattcggcagtccattcaggggtggctgtgtatttcgcacgaatctttggcagggtcatggtaaagggatgagtttgatcctgagacttgaaggtctgtggttcttcgaattcgcggtgcgcgtggataatcatttttttcgcccaagcggcgcgtgaatcttcattacggccaatcatggtcgaaccatccgcgctggcatttttacccactaggatactagtgcaggcggaataaggattaaactgatgagtcaacatatggggccttctttctccacggtacgagcagtcaatggcggtatcgtggcataatcatttttgttaaattaattttagcatgtttagtcatcaatgggggttttcggtttgtgcttctgattagttttgcaaggtagccttaattggtcagcgtgctgggcattagaaaagaaccgttaaatcaacaacgtcgtggcttgcaaaatagaaaagattaaagtaagattaaaacattcgaaaatagtgaattaagataggagcgtggcctcatgccaatcgtacacattgatctaattgctggtcgttcacaagaacaacttaaaaacttggtgaaagatgttactgacgcggtcagcaagaataccggtgcaccagcagaacacattcacgtgattttaagtgagatgcagaaaaatcgctatagtgttggtggtgtcttaaagagcgacgaagaagcagaataggttgttcattgccggaccggtcgaatatgacgtggccggctttttttaaaagtttagaaggtaggttaaactgtgaacgaacaaattaagacggatgcattaaattcggcgcaccatttaatggtcgggggcgtcgatacattgacccttgcaaaaaaatatcaaacaccgctatatgtctatgataccggtgaaattcgtgccgaaatcgcagcattcaagcaagtttttgaagaaaaccacgtggactatcaaatcagttatgctagtaaggcgtttgcaacggtcgcgatgtatcaattgatcgcccaagaacacattcattgtgatgtggtttctggtggtgaattgtataccgcccaacaagcagatttcccaatggccgccgtctcgtttcacggtaataacaagtcactggccgagctaaccatggccttagatgccggtgttggtaccatcgtggtcgataatttcggtgaactacgacaactgacgacgttgacgacgcaacggcaacagccgaccacgattatgttgcggattgccccagggatctcagcgcatacgcatgattacatttcaactggtcaggccgattctaagtttggatttgatttggacagtgggcaagcagaccaggctatcaaagccgcgcaagccgcaccatatttgaaactggtcgggattcattgtcacattgggtcacagatttttgaagtgaatggttttaagatgattgttgataagctcgttagtgagtttgctcgctggcaacgcgaacttgatttttacccacagattatgaatgtggggggtggctttggcgtgaagtacactgccgaagatcatccgctacagccaaccgattttgtcgatgcaattattaaggaaacgcgcgcgcaaactgcagccaaacaagttccaatgttagaaatctggatcgagcctggacgctcgttagtcgctaccgctggaatgaccctgtatacgattggcgatgagaaggatattccgggcattcggaagtatttgtctgttgatggaggtatgggtgataatattcggccagctttatatcaggccaagtatgaagcggtattagccaagaatccggccttaccagctgaacaggtagcctcgattgctggtaaatactgtgagtcaggtgatatgttgatctggaatcagcaattaccggccactgcaccaggcgacgtgttagcggtcctagatactggtgcatacggttattcgatggctagcaactacaatcggaatccacgacctgccgttgttttttgtgaacagggacatagtcaacttgttgtgcagcgtgaaagctatgctgacttaacacggctggacctcccactctcagtgccggagaaaaccaagtagattagtcaccaaaaagcatttcaagagttaggctcttgaaatgcttttttgggtctgctgctgtcgtcgaagggcttgtgtcaacgtttgactaggatcagtgctaaaatgggcagtatgaatttattagttacggtatacttatcattgaaggatgttaatggctgctatgaagtcattacgctggtctgaagatggctagcaggggtgccagcatgtggcgtgggatttccaagtgaccggttgcatactggtcctaatttttttgttaaatctatccgctttgcttgcgttaggcgtgaagtttgttaaaatttgatagttaaagtcttcgacggtgacgatggtcaataaggtcccaatagataattaacgatttaaataaccggtgggggagttgttaaaatgtttaaaaaatggctaacttggccagtattctatgagctgacagaaatttatacggcaccacttaatatcatgtggtttgttctcggaagcgccattgcgcaatatcacttaggtacggtgaattggcttaacgtgacgctgtgtttagttagcgtatttatttttgatttagccgtcaatgtttctgataattattatgattatcggcatgctcgtgatcgggaaggctatgcgcagaagacgaatccgattggtcgcttgcagttacccgtagcgggtgtcggccgcttagcattgggattgtacctgatttcattgattcccggaatctggcttgtcatgcggactgggtggttagtgctcgtccttggattagttggctatgtgattggtattttttacacagctgggccctatccaatcaacgcgaccccgctgtgtgagacggtcgtggcgttagcaattgcatttttaattgaattgacctgtgtggtcgtatcgacgtatggacagcatccgttgacttggtcgatcgttgggacgactttcttactatgtttaccactgaccctgattttcttttgcctacaactggctaataacacagcggaccgtgatgaagatattttgaatcatcgctacaccttggcctactaccttggtaagccaggttcggtacggctgattcaagcgtttttaattattggtggcatttggccgctcgtgaacgtcttactgggactagcacccattgttacgatttgggtcgtactcttactaccaattatgtggcaaggtatgcgcccgttctttgaggtgcaagataaaaagaagacgtttattacgacggtcaagagtgcctcgctgttcttcattctatacccagtgctatttgttttagggacttggttgtaacgaattagtaaagctcacttaatttttcgcacttatcgtggttatttttatgaaagtggactatattattaccagtttataaaataggggtaagcaggatggaaacagaacagcgacagcaacgaagaattgcggtgtatcacttaattgtcacacttttgacactctggtcagcagttaacgtgatcctattatcgtttcatatcggtgattggcacgttgaaacccgcatcagtaacggcttattagtcatgtttgcggtggactactttgtgcgcctaattcgttctcgagatcggaagacttttctcattcattcagcgttcgatttgatggggattattcccatgcacccggtgtttgcactctttcgacttgggcgtttggcacggatggtccaatatcaccatttgttctggaagctcggactggatggtaagtggacgcacgattttcaccgctttatctatagcaccgggtttatctacctgttttcaattagtattgcgattattgttcttagtgcgttgctcttttccgttttcgagcatcaaagcctgtcagattcactgtggtgggccatcacaacggcgactaccgtgggttatggtgacgatacgccccatactgccgttggcaaagtgatcgcggtcgggctgatgttcggtggaattggttttattggtttgttaacgagtacgattactgacttcttcacaacgcaagccagtcagaatgtcacgatcgaggaaccacagcatgatgacgagctgcgacaactactgattaaaattgacacgttgacgacgaaggtcgatcatttacaaaatcaagttaaacgtttagaaaaatcaggctacaaaaaacaacattgaattttcggaccgttggatgcccttaatggggcgcagcggtccgttttgctatgctataataacggtaacaaattcgaaacggtggtggtgagatgggacaagcaataacacggtgggtctggctaccagccccaattgtgacccgtcaatcaacgtttaaaattcatgtgggggatttacagcggcatccagtgccattacgtgccgcacagtggtatcaatttgagcagtcacgaacaaagcgaatctgctcggtgccaatcacaacgactcagtatgcggccgttacgcacttagcagctcagcggcttaaagctggtcaagcgggaatgttaccagcacccgagcagcccgtgatgacccgggggacgacgattacattcacaatgtaaagcggcgtgatgaaagttacttactgtaaagatactttgtgaatggtacttgacggttggggggcacgatgctcacgtgttatattcaggctaatcaaattgccgcgaggtcgcgaattcacgagggagtgatttttcgatgaaaacacgctatcagttacaagtcaagtacgacggaatcagatcgttaacacgttgccgcgtgttggcaatcatcattgcgagtttcacgggttggctgaccggctgcgaattagcgcaggccgccacggtgcctactatgatgcaaacttaccatccttggtccgtacgggggctaaatctagaaagcttgcgtttgctggtggcaacgaccgtcttagggctagtctgttggggcctagccgcttacttaaaacctaaggccaagtgagactgagtaaacaaacgattgttgtctgacccttgataggggacggatgataatcgttttttcttaccgcttatgtggcactgagcggtgtcgttcaatgtgggagcgcccattcccaacgtgcactagcacgccacggacctcgcgcgcagcaggtgagctgaggaaaatgatggcgaccagcaaggcaagtttggtggtcgcgttcacaatttaaaatgatcctagcttgttgattcgctgttagcaattggttgaatgaaccggtgatttttttaatttacatcttattaattaaaaaattgattaacgctaaagctagggctatgctggtaaagacgggtatttgtaaacaaaaatatgggcgcaaggacttgcatataaattaaaatatgattaaaataagtcttattaaattaatggaggcttgcgaatgattagtcaaaaccatcgtttggatcagcaacttattgaacgtgaagaccattatatggcgacggcggcacgaatcaattactatgatttagttattgaccatgctcacggggccatgcttaccgatgttgatggcaaccaatacatcgatttgttagccagtgcttcggccattaacgtgggccatacgcaccctcgcgttgttaaggccattcaggaacaggcagccaagttgattcattacacgccagcatattttcatcatcaaccggaacaacgattggctgagcgactggcaaaatcagctcccggcactgataatgaggtggtttttggtaactctggttcggatgccaatgatgccattattaaatttgcacgggcctatactaaccgacaatacatagtcgcctatacggatgcctatcatggttcaacgtatggctcaatgtcactctcaggagttagcctgaatatggtccgtaagatgggaccgttactacctgggatcgtgcacgtcccgtatcctgattgttatcgtacgttgccgcatgagacggaacatgaacttgcattacgctattttgaagcgttcaaggcaccatttgactcatacttaccagcggaggaaaccgcgtgcgtcattattgaaccgattcaaggtgatggcggtatccgcaaggcaccagcagagtatgtccaattagtctatgatttttgtcaccagcacggtatcttatttgccgtcgacgaggtcaatcaagggatgggacgaaccgggaagatgtggagcattcaaaacttcccgggaatccgcccggacttaatgtccgttggcaaatcactggcttcgggattaccacttagtgcagtgatcggtcgccgtgaagtgatggagagtctagcagcgccggcgcacacctttacgacggcggccaatccggtttgttgtgcggcggcgctggcgacaatcgacgttctagcagatgaacagttggttgcccgttccgccaattatggccgctatgccaaggaacagtttttagcgcttcaacaacgccatcctaaaattgggcaggtacggatgtacgggctgaacgggggcattgaattggtgacagaccggcagagtcagcaacctgatcctgattttgccagtgacgtcatttatgccgcttttgaacggggtgtcgtcatgataacgctcaaaggaaatattttgcggttccaaccaccactagtcatcacgaagacgcaattagatactgcgttaaccgtattagatgaggcaatggctgctgctgaacagggcctggttaaacggccccaaggcaagattggttggtaaaataaggaggattttgatgcaacggttattaaaacggttaactttaaaggaagatccaagcatatatgaagacaaagattctcacctagctcgagtattgacggtcaaggacttcttggctttaggggtggggacgattgtttcaacgtcaatttttacattacccggagtggtggctgcgaaccatgcgggccctgcggtagtcttctcattcatcgtcgcagccgtcgttgccggcctggttgcatttgcttatgctgaaatggcggcggcgatgccgtttgccggttctgcttattcgtggatcaacgtaatgttcggtgaattctttggttggatcgctggttgggcgttgcttgcggagtactttattgcgttggcattcgtcggttcaggactgtccgccaatctgcgggggctcttgtcaccattaggactaactctaccgaaagctttgtcaaatacgtttgggactgatggtggtgtggtcgacctgattgccgtcttggtgattgcgctggtctcgttactgctctcacgtggaatcagtaaggcctcccgggtcgaaaacgtgttagtggtgttgaaagtgttagccgtactcacgtttatcgtcgtgggtgcgacggcgatccacgtgcaaaactacgtcccgtttatccccaagtatcatttaaacgctgatggtagtgcttttgggggctggcaaggaatttatgccggggtatcgatgattttcttagcttatattgggtttgattcgattgccgctaattcagcggaagctaagaatcctggcaaaacaatgccacgaggaattcttggttcactcgtcattgcggtggtactctttgtggctgttgctttggtcttagtcggtatgttcaaatattcatcatatgctaataacgctgaaccagtcggctgggcattacgacaagctggccatccgattgttgccagtgttattcaggccattgccgtgctgggaatgtttactgcgctgattgggatgactttagcagggtcacggctaatttattcctttgggcgtgatggtatgttacctaagtggcttggcaagttacatcataatcaacctaataacgcgctacttgtgttaacaatcgttgctattatcattggggcgttttgcccgtttgcttttctggcccaattgatttcagcgggaaccctgattgccttcatgtttgtctcgctgggaatctatgctttgcggcgtcgtgaaggtgttgatattgcggtaccagcctttaagatgccgttctatccagttttaccagctattgcctttctaggcgcactgttcgtttttatgggcttagatatccaggcaaaattatacgcgggcgtgtggttcatcgtcggcttagtgatctactttagctatggtatgcgtcactcatatttggctgaaaaacgtctgtctaagactgatactgcggctaaatcagcttcgaaggtggctgattcgaccgttgaagagcgtgactgaacttagctaacgcaatcccttgatagttgaacaacaactaaaatggcacttccagaattgaattttatctggaagtgccatttttgagtggtgattacgagctagtgtaaagtccgaaaattaatagtgatgcgcagtcagcaacttaagatacaactgtcgactacttgcatctgaacgattattccgcaatcgcaaaataatcgttcaagtaacgagcaacaccgttttgatcattattataggccgttacatcgtcagccgttgctttgatcttgtcagtaccattggccattgccacaccgagacccgcgtatgctaacatctcgaggtcgttatgttcgtcaccaaaggcgatgatattgcgccgtgaaatttgaaagtaatccgctaagtaggcgacacccttggctttgtggacgcctttggaggtaatctcgaggatggcattcgggccgccccaaacaccaacgtcaacttgatcgccaaagcgttcagtgatccagtcaatgatggcagcccgccgatcaagctggactagcaagacgagggaattcggattacgagtcaacgtatctggtgtaagtcgggggctgtcagcaatctctgggaagaattgaccagcaatcaaatcttgacccgctgtcatggtactgtttttattttctgcaataatttcattgatccccaattgttcgcgatatttaacgagtgctaagacaatcgctttgttgatcgtgaactgatattctgaggcccatgtttggtgaggtaaatggcccagagaaccgttaaagttgatcattgggcttttgagacgcagctggtcatagattgcttgtgaaccctgatatgagcgaccagtaataatgctaacaatgtgacccgctgcttgtagtcgttgcatcgtttggatcgtcgctgaattgagtttggattcagcattcaaagtggttccgtctaagtctaacgcaattagttttctttccatattcaacaaacatctcccatatttccggcagttaattaatttaatttagcataaatcccacctaattgcgaatctttgctaccttacagtcggggcaaaatgtggtaatctaattgaggatgctttttaattgaggaggaaatttgggtgcaattaccagcagaatttattcaaaaatatcaacgactactaggcgatcaagcgcccgcttttttggcagctttcgatggccctgttgaaaaagggtttcgggttaatccgaacaagactttgacggccacgatgcgcgccaagatgacagcacccgttccgtatagcccaattgggtattatggcaaggtgaacggcaatgcgctggaacacttggctggtgccgtctacagtcaagaaccaagtgccatgaccgttggcgagtttgcaaaaccagaacctggtgaacgagtgttagacttatgtgcggcaccgggtggcaaaacgacgcatctgttaagctatttgcgtcagactggtctactcgtgacaaatgagatcaatcggcaacgggtgaccgcccttggcgataatgtggaacgctacggcgcccgcaatacagtgattaccaacgatacacccgccgcccttgccaaggaattgccaggcttttttgaccggatcttggtggatgcgccgtgttcgggtgaagggatgtttcgtaaggatcatgacgcagttcagtattggacgcccgactatccagcggcgtgtgctgaacgccaacgggagattttgacggaagcggtcaagatgttgcgtccgggtggacatttgatttattcgacctgtacctttgcaccggaagaggacgaacagatgatggcctggctgttaaaaacttatcctgagtttgagctggagccactggccaagacggctgggatggtcgatgcaaagccggaatgggcggatggcaatcctgaactggctaaagcggcccggttatttccgcacttgatgcgcggtgagggtcactttattgccaaattggtctatcatggcacgacggtgggcaaggacaaaaaagtggttcgcgaacagttaaacgccacgcaacggcagctatggacggactttttaaaaaaacaagcaatggccggtttaccacagctcgtgttacaggcacatggtgatcagttatacggcgtgccagcgatgatgcccgttacgcgaaagctcaaggtctttcgccccgggattttattgggaacgtttaagaagaaacggtttgaaccaagttacgcgttagccttagcgagtgatgatttgtccttacccaaaactgaaataacgcgtgaacagtgggcattgtatgtccatggtgagacatttgaattgacaagtgcgcctgtagctggttttcgggtcttaacttgtgatgggttgccagttgggtttggaaaaatcgtcgccaagacggttaaaaatttctttcctaagggcttacggttcttggcgacctctgaaaacgcgacgctctaacctgacatgatattgactaagtcataacgtccgcgtgcgattgacgctgaacaggtgatgagcagcggccgtcatgaatcattcgatccgtggtaaaatcgggggaacgatctacgcaagttgatggtcaaatggacccaatcaatcgtgatattggaggaagagtttatgtattgcccaaattgtgggaaaaagaatgatattgacgcgttattttgtgaaaattgtggtgcgcggctgattatcccagccagttcagcgcaaccaacaccggcgtcagctgtaagttctgctactcaatccacgtcgtcaacggctgcttcagaagcaccgagcgccagtacatcgatttcggctgcaccgactgcacctgaacctggcacccgttcagcgcaacatgcgcgtcaaaatgcgcaaccacgttcaacgtcaaaactgtcttgggttattttgatcgtggtattagccgtggcacttggtggtggctattactggctgggacatcagcgtcagagtaattcgacggcaacaacgacggccaaatcttcgtcgcgcactgctacatcggaaaaagccgagtcgtcatcatcgtccaaggcatctgctagtacggcaactcagacggcattgtggtcgacaaccaagtcgagcgagttagcctcgtttatgtcgtcatggcaagataccatgaaccaatcgtacgaggggacttatgatggacagtcggtaactattggtgagttgaatttaccttcagacatcaaaaacaatcagtaccaagataagattacggtcaatggtgacacagtcaagctcaagtggacgacggctgctgataccgatgcgaagtaccaagtcgttgccgcggccactgatccgaacgcgtctagtggcgtaattacgtatctgtatgttttccataatggttcgccagacgttctggtctcgcaagacagtgccactgccacaacgtttaacttcactagttcacaaaatacggatttacaagatggctttgcaaagattgccaatgcggattaataactgaattattcggaatcgtgtgtttatgctaagtcggcctgaacacacgatttttttgcgccaatattcgacagaaaatggcgtattggcgttttaaaactgaataattagtgtcgggtaatggaaagcgatgctgatttacaatcgattattgaaaattattatttatttacaaaatgatatccgtcggctggagcggtttattagtgcaacggcacgcaacgtttcagcgcctgcatctatttgttcatgcaacagtatacaatataatgacttttttatgaattatatgtgaattttatatgaatcgatgtatcagctaatactatttgaacccttgatattagccgatttcatgccaaataggcacggatgtcaataagtaaaacgccttcatgcaatttcacgcaaacgcttgcataattttggaagcggttttataatctaacttgtactcaagcgattgatattatttttgggaggctttattgtgaaagaaacatctaaaacaacggccggattaccgaaactgtcatccaataagatttggatgatgagtctaggttttctcggtgttcaaatggcatttacacttcagagctcacagatgagccggatcttccaaactttaggcgcggatccaaataaccttggctggtttttcatcttgccaccccttgctggtttgatcgttcaaccgatcattgggagtttatccgaccgaacatgggccccacgtttaggcgggcgacggttaccttacttgattctgggaacagtcgttgcggcaatcgtgatgttactactacccaattctggctcgtttggatttggttacgcttccatggcggccttagtttttggtgcgattaccgtggcatttcttgatttatcgtctaacgtcgcaatgcaacctttcaagatgatggtcggggatatggtcaacgatgaccaaaagagttacgcctatgggattcaaagcttcttgttgaatactggtgccgtcattgcggcaatcttcccattcctgttgaccttgttcggggtcgccaatacggctagtaaaggtgttattcccaattcagtgatctggtcattttatattggagcagcaatcttagtggtttcaacgattatcacgattgcccgggtgcgggaatatgatcccgtaacttacgcgaagtatcacggcattgatgaaagcgctaataaatctggtggtaactggttggcactcttgaagaaagcaccaaaggttttctggttagtagccttagttcaattcttctgctggatggcatttcaatacttatggacatactcaaccggtgcaatggctgccaacgtttggcacaccactaatgccagttctgcaggctaccaagccgctggtaactggtacgggatcttatctgctgttcagtccgttgccgcggttgtttggtcatatgttttagccaaggttccgaataatcggcataaacttggttatgctttgagtttattacttggtgcaattggcttcttctcaattttcttcattcacagtcaatcagcacttgtcgtctcatttattctggttgggatggcctgggccgcaatgaatacgtatccattgacgatggtaaccaacgccttatctggcgaacacatggggacttacttgggtctctttaacggctcaatctgcctgccacaaattgttgcgtccttattgagctttgcattatatccattatttggcaattcacaagccaacatgttcatctttgctgggatcgtccttgcagtaggtgcgggcacagttggtttgatcaaagaaacgtacaaaaactaggaggaattaacttatgaaacgaatttttgatgttaatccatggcatgtcttgacgactgatttcaaaccagaaaacaaacggctgcaagaatcaatgactagtctaggaaatggttacatgggcatgcgcggcttctttgaagaagattatactggggatacgcttcccggtatttatcttggcggtgtctggtatccagacaagacccgggttggctggtggaagaatggctatccagaatactttggcaaggttatcaacgccgtcaatttcatcaaaatcaatttcaaactcaatgggactaagatcgacttggcaactgccaacttcagcgattttaaacttgatttggatatgcaacacgggactttgacacgatcatttatcgttgatcaagatggtcaacgggttcgcgtgacctttgagcgtttcttgagtgttgcgcaaaaagaactttcggttcagaaggtgacgtttgaaaacttgagcgatcaagcggtggaattaaaagttgcttccgcactggatgctgacgttaagaacgaagatgcgaactacgatgaacatttctggaacgtccacgaagttacggatgatcggttaattgctcagacggtaccaaatgattttgggaccccacagtttacctctgggatgcaagttagttatgtaacgagtttaacccataaagcggccgaagtgactgatacagccacggttgatcgctacttcggtacgttagaagctggggccagcgttagttttgaaaagcgggtcgtcgtggttacgtcgcgggattatccgactgatgatgccattatgactgcacttcaacgtctgacagatacggtcagcgcccaatctttcgatgatttattggcggcccatgaagcgggctgggccgatcggtggcaacaatcagatattcaaattgaaggcgataccgaggcccaacaaggcatgcgtttcaatttgtttgaactctttagtacttattatggtgatgatccacggttgaatattggaccaaagggctttactggtgaaaagtatggtggtgcgacttattgggatacggaagcatttgccgttccagtttacctggggattaccaaaccagaagttacccgcaacttactgatgtatcgttataagcagttggatggtgcctatcataatgctcgtcaacaagggcttgatggggcattgttcccaatggtgaccttcaatgggattgaatgccacaacgagtgggaaatcactttcgaggaaatccatcgtaacggcgacattgcctttgctatttataactacacgcgttataccggtgatacatcatacgtcttacatgaaggcagtaaagtgttgacggagatttctcgtttctgggcagaccgggtgcacttcagcaaacgtaatcagcagtacatgattcatggggtcactggcccagatgaatatgaaaacaacgttgataataactttaataccaattatttggcgcaatggacgttgaagtacacgcttgaaattttagatcaggttagtgacgaccaagcagcggccttaaacgtgactgctgaagaacgtgcccactggcaagatatcgttgatcggatgtatttaccatatgacaaggatctggatatctttgttcaacatgatggttatctggataaggatttaacgcccgtttccgcaattccagctgaccagttaccaattaatcagcattggtcatgggaccacatcttacggtcaccttatatcaagcaaggtgatgtgttacaagtgatgtatgactttattgatgatttctcaaagacacaattgaaacacaattttgatttctacgaaccgatgacggttcacgaatcaagcttgtcaccagccatccatgccgtgttagctgctgacttacactatgaagacaaggctgtggctttctataaccggacggcacggcttgatcttgacaattacaataatgatacggtcgacggtcttcacatcacctcaatgactggtggttggattgcgatggtccaaggatttgctggcatgcgtgttcatgatggacaactgagttaccggccgttcttaccaaaacaatggacgaagtattctttccgtcaggtcttccgtgatcggattattgaagtcacggttgatcacgatgggacgactttgaagttgattgccggggaaccgattgatgttcaagtggatggtaccacgcaaacattgacacagaactagttcaatccgcactgatcgaagggaatgaggcgtacgatttctgcagtaccatttggtgtgtatcaaggcgagtcagtctatttatacacgattgaaaatatccatcatagcaaactaaaagtgttgagttatgcggcaacgtggtatgacttcgaagtgcaggtcgaccgccagccacactcattagtgcttcactttgataacttggcggattatatcgagacgccttatcaagtcggcaaaacagtgggtcgagttgctggccgaatcggtaacgcgacgttttccttgaatgggcagacgtatcacttaccaccaaataacggccagcatttgctacacggtggcaatcatggcttacaaacgcataattttcgagctcgttttgatcctgatggcgacactgtcacattgacgacaacgctagcgagcgctgacgatggttttccaggcgacttgacggtaactgtaagctatacgttaacggccgatgatgaggttcaaatcagctatcacggggtgaccactgctgatacgttattcaatccgacctgtcacgtttactttaatcttgatggtcaggccgcactgattaatccccagcaattacgtatcaactcgaccaagctagttcatacgaatcacgagaaggttccgaccggcgtcttctacgtcccgtcaccagcgtatgactttcgtgagcagccaacgattcaatcgcagctcgatcgattgatccaagaaactggcaggacggaatacgatgattgctatgtgcttgaccaccaggatgaacccgctggcgtgttggcaacgactcacgggcgactgctcatcaacacggatcgcaatggtttagttatctttaccgctaatcccgaacgaacgcagtcgtatcgtttaggggactaccatgcgctggccgtggaattgcaaaccttgccggatgctattaatcatcatggctttggcgatgttgttctacgggctggtcagccacggacgtacgtgaaccgctaccaatacgtgtcaaaatagcaatcaatagatgatggaaattattttctttaccacgatcaaaaagcagtgcttgccataggggcacactgcttttttggtgtacttggttataacaaaaacgcgtcatcacaagtatagaatgacattccgtagtttgtgatgacacgctttgttttaatctttaatcgattgcttgtagttaacaagttcaggtgataacagaatcttgtcctgaatacggctacttttgaattgatcaacacgcgttacgccgacgagtgcaaataggcgttttaattgcgactgccaatccgtcagcatcgcaatgacttcgtcgtccgtatgatggagtaaagcgtgtagcacggtgccagccatgccgaccgcgtcagcgcctaacatcaacgcttttaagatgtcgagtggctgtcgaacgccaccagcagctaagaccgtgagatcatccggtcggttctgaacgcctagcaaggactcaaccgtggtgaggccaaagtcgtgaaggtaggccatatcgcggttagcacgtcggcgattctcaatgtcgacaaagttagtcccaccgtgaccgcctaaatctaggtagcgtacgccggcagcgtagagctgttgcatcgtggggcgggaaataccaaagcccacttctttgacgatcactggtaccgttaaggcttggactaagtccgaaatgttagttagccaatgaaagtcacgatcgccttctggcatgacgatttcttgaacgacattgagatggagctcgagcgcatcggcctggagcattgcaatcgctgtttgggccgcagataacgggtggccggcaccaagattgccaaagatcagcccgttcggattgtggtcacgcatcgtggcaaaagtgggggctacttggggatctttgatggcgacactttgagagccggtcgcaatcggtaagccacaagctgcagcgatgcggcctaaacgagcgttgatttcgcccgttcgctgtgagcccccagtcatcgcttcaatgtagagggggctgtcccaatgccactggccaacggtggtggctaaatcgacgtcggccacggcagtttccggcaacgcgtcgtggcgaatccggacctggtcaaaggcattggcttgttcgccatgaaaatacttttcagctaacgaaacatgttcatctttccgatgagattgttgactttgtggcacggtgccacctccaattaatttagaatctgaaaacgagtccggcaaggctgccaggctcgtcaataaactgcttaagaatttggtaaaacggtatcctgaaccgtatgcacgtttaagttaagttgttcgataccatcgtgagcccacgcagttaataatggtcgtgggtcgatggtttgatcaatcaaaacgatcccacagtcaccaccaccagcgcccgaagtctttgcggccgcgccagcactttcggcgagttgaatcatacgctgcagcaggggtgtttcaatcgtcacgtgactgaaatcgcccaatttctgaagtagttgacgattcgttcgcaactcggtttgaatcacgtgcaagtcactgtgatgaaaaccagtgatcatacgttttagacaagctttgctggcttttagaaaggtctggtattcgctgcgttgcttcgccttgactaaagccactttatcgactaagtgtgatgtggaggccggtgaacccgtccaaccaatcatcaaacgtaaggctgctggaggggtcagtaactcgatttttaggtcgggccacggcattgtcaacaaatcacttaagcttgactgagcttgttgtaggtgtaaccattgccgatcgaatgaatggtaggcgatccagccaccatagatgctggcagcaatgtcaccaagcgaaccattgccttgcacggatagatgggcaatcgcggctaatttgaacagtttatttttatccatcggtaaatggtaaaactgacatagtgctttgacggttgccacggtcactgctgctgaagagccgagaccgtattttttaccatcagcactatcgagttcgctattgataccgagatgataaacaccaagttcacgccctaattcatgggcgtaactttcagtgagattgatcgctgctaaaatataatggaagggattgtcacgattatcaaaaaccatcgcgtctccctgacgtcgccagacgattgagttttcttgatactgctcagaaacgatgctcccaatcgtttcgctaggtgaaatcgttgccgtcacaaattgatctagtgcaacaataattgctggataaccactttccactacggcgtattcaccggcaatgtagagttttccaggggctttcaccgttatcatgccatcatatcctttcatgaccatcgctgatcattttaaattaaactgaattatttttccgttatcgtgatacctggacctggtttagcgacgattaattgatcagcgtcaaaatgttgttgtaacccggtcataatggtgtcggtatcttgacccgcacaaatgattttgacgtttgggccagcgtccaaagtataataacagtttatcccgtgtgaacgcaagtcgttgactgcttgaatagccgtcagtgtatccgcggtgaagtagttaaaggcgggttcagcgctcaaattaagcgcgtgcattcgcattgcgttcgtttcagcaatttggccaacagtagtgagatcacgatcggcaatggcttggcgcattcgcttcaagtccgtctcagccgtggtgatccaagctggatagtagggggatgtcgcgacgacccgtgccatgccgtccgttgagctgattggctttttggtggccttcaaaacaacggcgatcatttgaatgtcccaatcgaccgggtcttgtaagacttccgcgtaagaactctgatcatcatggccggcatgccattcgacaaaaccgccaaaaattgagcgggtcgcagaacctgagccacggcgtgctagtcgtgatagatcagccgcatctagttgtaagccagccgcacgactagcagcccctgctaaggccgcgaatccggaggcggaagaggctaagccagctgaggtcggcacatgattttcagttttgaccgttgcatagttggtttgaccactgcgctggcgaataaggtcgaggaactggctgattcgtgctgatttgcccgtgggtaagtgttgatggttaaagtaaatttggtcagtatcgagatgctcatcgaaggtcacactggtctgggtatagaagtgatcaagggtcagcgaaatactcccattttgtggtagcatcagcgccgcatcttttttcccccaatatttaactaacgcaatgttagtatgggcctttgccgtaacggttttcactatgtcttttcctccaaaattaaaattagtcatcgcacaaaagtggttcgacccaagtcgcagtcgcaccggctgcggccaatttttgtgataattggttggcgatgctggcttccggagcgagcgcgatcaagcaaccgccctgaccactaccggttaatttggcagcgagtgcaccattttggcgagccactgcgagtagttgttcaagggcaggatgactgacacccatggaacgtaagtcatcttgcgcaccattcagggctgttgccagggcccccatgtcaccatcttcaagcgcggttcgggtctgacgagtcaatcggcccaagtcatcaatgcgtgcttgaatcgtcgcgccctcaaccattagtaagttgcgaacggtcgccactgcaactttggtctgacttttaatacccgtgtccgcgatgactaaatagccgggaagctttaccggaatcggaaagttctcacgacccttgacaaaccagacgggacttttggcactggccgtcgcaacgtctaggccgctgggttgaccatgcgtgtaactttccgccacattggcagtggccaataattcttggtgggagagtggtcggtcgaagaaatcataaaaagcccgcgttacggccacggccgctgcggctgaggaccccattccgcgttcagagggaatatcgctcgtgatgtgaatatcgaagccctgctcgggggcatcaaaacgtgcaagcaaggttctaatgagcgtctgaataccgcctaagttggcagacatcatcttaaagtcgccgttgaagtaacggcttttgaccgtctgcgctgcatcacggcggtgaataatggcctgcatttggatggtcgaaatcggtaaggcaatggcgggttgtccgtaaaccacaccatgctcgccaattaaaataattttggcatgactagtaccggtagctagatctttcaatcgtgtcgctgcctttctgtaagtagattaataatagcttcataataccttattagcacttcttttgccatgctaaccccggcgaacgcgctgaattcagttgaaatgtaagttaaactggtttggaaagtaacaatttaattaaattaaatcattcacgtgaggggcgtatggacagactggttatcaacggcagacgaagatcgattactatgttaaaattagtaaatgattagaaatcagtccgataatgatgaaaaagaagttgagctgcttgtgacggactacgtggcccagaattcactaattaggaaagtaaattttgggtagcagtgccggctattcaagcgcgcgtactcagctgactgtgttatggcagatgtacgccgagacactttcatgaactttatcgttgctcaatcatactcttgaccagtctctgcccgttgtcctcagactgacgaatttggcttaagagttggtcgggctgagttccctacgccgaatatgctataatttacaatgatcgacgtgacgtatgtgtgacgatcggtgtggaggatgagccaagcggcttgcgtcatcaggacgacttgtgtcactggcacagtttagtaggttgaactcagctaagttgggctgaccgacgaaccgttaaagttagtggtcgagaccaagtgtagcgctacttggaccagccttcagtctgattacaaacacatcgcacgtgatatgccataaagatcgattagttggtcgaacatcagcgttagtgttgatgacggattcaagcggtaaccaatctaatgaacatctttacaatccataacttggggaaatgaccatgaaaccaaacacaacttatgcggtagttgatattgaaactactggaactagtgtgaaggacggcgaccggattattcaaatcggttgcgcgtttgttaagaataataaaataattaatacatttgccacggacgttaatccgttaacaacggttccggccgttatcgagaatttaacggggatcagcaatgcacgggtgcgcaaagcaccaccctttgatgatctggctggtacggtatacagcttattacaagggactgtttttgtcgcccacaacgtgaactttgacctgccatttatcaattcagaattgcagcgtgtcggttatccagaactaccaattcaggccgttgacactgtgtctcttagccaaattctgttaccgactgcttcgagttttcggttgcgggacttgagtcacttgcttgcgattgaccataatcatccgcattctgcggatagtgatgcaattgctacggcccatttgtttatcacgttacaacagcggctcgcacacttaccattgatcacgttacaacaaatggtgcaattagcaccggagttaccacgtgaaacggctgacttgtttgcatacgcctttcaacagggcaaacaacatccacagcagttaccaactgacttagtgatcaaaaacgggctcgctctgcgtaaacagcgattgccacagcaagccgcgggtcgtaaagcggcacgctatccgttgacaaaagcacaaaagcagcatatctttggtgatcgcttgacttatcggccacaacaggcccggatgatgaaccagatttatcggcactactcaaaacagtctgctgaacaagtaccattgttgattgaagcaccgaccggaacgggtaaaacactcgggtatttgctgccacttgcctacttggcacaggatggtcaacaggtggtcgttagcacggcgacgacggtcttacagacgcagttacgtgatcagggcgtggcgttgttgaatcagttgttgcctaatcctgtgacggcggttgtgattaagggtaatcagcattacgttgatttaaaccggtttgcccgtggcttggcgttgcatgaacattcgaagcaaacgcaattattgaagttgcgcgtgctagtgtggttgacgatgacaacgactggtgatctggatgaattgcacttgagcacgtatcaagcgccgtactttagcgaaatcgcccatcatggcgtggcctcgttgaaagctgatgacccgttttttaaagaagatttcttacgctttcgggatcaattgaccgcgcaagcgacttttatcattaccaatcatgcctacctgatgcgccacgtggcccaattgggtagccgtcaagagcggccactgctggttcttgatgaggcccagcatctggcagatggtgtcgttcgtgactcacggcagacctttgatttcaatggctacatggcgacctgccacagcttgatcagtcgcattgacacggaacatagtctaaatttacgggcactgttcgcggaacaaccacaggccgattatcgtctgaaattattagataattcattgaatgatactgacctacacctgcaacaactgcaggcggcgctagctagaacgtttgtaccagcacaaaagggcggcaatcagcctgctgaattaggaatcaccacggatcagttgactgatttctttgcggcccacaatccgctgatcaaacaattacaaacggccatcgaaaactgttttttacagtttcaacaattaaatgagcagtatcaacatgatcaatcgcaaatcttgcctagtgaacaacacgtcctcgacgactttgacaatcgtcttcaacatctccgtcagggctatgagttattacaaacgtggttagtgccagcttcgcgggaacaacgggtcttctgggtgagccttaatcaatggcatgatcgcggcagcctcacgctcgcgggtagcttgatcgatacgcaagggtattttaagacgcaactatatccttacttcagtgcgccactattaactggtgccacgctatttgccactgggaaatctcagtacgtttattcgcaattggatattgaccaagcaacggctaagcatcaccgattatcaacaccgtttgatttagaacaccaggcacggctattcgtcgctacggatgctactgcggcggaagcacccagtggcaagcagcgcgtggcatacttgacgcatgcgattcacgacatcgtgatggcagcgcctaagcaaacgttggtcttgttcaattcactgaatatgattgaagcagtcttttacagtttgcatcaaacggatctacctggtgatcgcgaaattttggctcaaggcgtcaatggtagtcgtgaaaagctgcttcggcgctttatgcagggggacgatgccattctcctgggtgccggtagtttctgggaggggatcgacttgccacaagaacagttggaattgttgatcgtcacgcaattaccgtttgaatcgcccgaccagacgacaaccaaggcccgttatcaacaactaaggcaagcacaactcaatccgttctataacgaagcgttaccgaaagcggcattgaagttacgtcagggaatcggccggttgattcggacggatgaagaccgaggggcagcggtgattctcgatgaccgtttgatgacgaaacgatacgggcagacgattcttaaagctttaccgaaaacgttgccgcccgcaaccggttcattgacgatgattacgcaggaacttcaaagttttttcaaaactaagtaagaaaccattccgcaatcagttaaatttgctataattaatttatctgtttttgaaaggaagagcatatgcgagttcaacgtagaaggcgccctgagcgactcattatgattattctggtcgtcattttagctattatcgtggcggtctatggcacgttatgggccgcacaacggccaatgcaccaagcccagaagacggcgtatagtctggccgtcagcaagggcaagctaaagaccacgacggccttttcacagtacaatggcaccagtagttattacgtcgttacgggaacgtcgagtaaaaatgttccggtatacgcgttaattaacgcgaataaacatcataaaacgaccgttatcaaacagtccgctgggatttcacgtacgaaagccttgaaaaaggtctggtctaaacgcaatcctagcaaggttatcaaagcgacgcttgggaagtatgatgggacggtcgtgtgggaaattacgtacttgaaccagaaaaagaatttatgttatgaaattttgcagtattctaatggaaaccagctgaaatcaattattaacatttaaggttaaaggagtgcggatgtacatggaattatcgcgtaaagtaatgcaggttcaaccgtcagcgacattgaagatcagtgcgactgccaagcaaatgatggcggacggcgttgacgttatcaatttaggaatcggtgaaccggattttcagaccccggataacattaagcaagcagccattgatagtattcaaaatggtcaagcgagtttctacacaccggcaactggattaccagctttaaaacaagccatcagtcagcgaattgaggctgaccatcactaccattttgatcctaatcagatcgtcgtaacggatggcgcaaaaatggcgttgtttacgttattccaagttattctgaatcccgacgatgaagtgttattaccagtcccatactgggtcagctattcggagcaagttaaattagctggtggtgtgccagtcgaagttagcaccgatgaacagttgcggtttaccactgctgatttggaagcgcagcggacgcctaagacgaaggccttagtcttgaattcgccacagaatccatccggtctggttttcagccgtgcagaattgacggcgatcgtgaattgggccgttgaacacgacgttttggtaattgcggatgaaatttatgaaaagttattatataacggtaatgaatttacatccgtgttagaattagatgatgctaatatggatcacgtggttttgatcaatggggtttcaaaagcctattccatgactggttggcgtatcggatatgctgccgggccacaaaccatcatggctaagatgggggtcgtgttaggtcacgctgctagcaacccagccgccgtatcacaatatgctgcgattgaagcttttagtggtgaccaatcatctgttgaaacgatgcgtcagggctttgaagcgcggttaaacgaactatacccactgatcgagcgtttacctgggtttaagatgcctgctggcaaaccagcgggagccttttacttgttcccagatattacggaagcattgcgtttaacaggctatgcagatgcaccggcctttgtgacggcagtgttattagaagcccatgtcggtttagtgcctggagaggcgtttggcatgcccggttgtttacggttaagctatgcaactgatatcgattccttgcgagaggcccatcgacggttacaaaaatttatgacagaaaaaattgctgaacaagcaaagtaattggaggatgtaagtaaatggtgcaacagatcaacattatcgatgctaaggaccatgtcgacgaaaaagtaaagattggggcttggctcactaataaacgttcaagtggtaagattgccttcctacaattacgtgatggctccgcctttttccaaggtgtcgttgttaagagccaagttagcgaagaagtttttgaactcgctaaggaagttaagcaagaagccagtatgtggattacgggtgtgattcatgaagacagtcgttcaaagttcggttatgaaatcgaagttgaagacattgtagtcgttggtgaaagtgaagaatacccaattacgcctaaggaacatggggtggacttcttactagatcaccggcatctatggttacgttctaagcggccatgggcaatcatgaacattcgtaatgaagtcattcgcggaacgtatgaattttttaatcaagaaggtttcattaagatggactcaccaattttgactgggagtgcacctgaagggacaactgaattgttccatactgaatattttgatcgggatgcctacttatcacagagtggtcagttatacgccgaagccggagctttggcctacggaaaggtctttacttttggcccaacattccgggctgaaaagtccaagactcggcggcatttaattgagttctggatgattgaaccagaaatggctttcatgcatcaagaacaaagtttggaagttcaagaacgttatattgcctttcttgttcaaggtgtgattgatcattgtcaatacgcactcgacattttaggtcgtgatgttgaaacgttgaagaagtacaccaagttaccttatccacgaatcagttacgatgaagccattgaattgttgaaagaaaatgactttgacgtggattggggtgttgattttggttcaccagaagaaaccttcttggctgatcacttcgatcaacccgtcttcgttttgaattacccgaaagccatcaagccattttatatgaagccgcatccaacccgggacgacgtggtgatttgtgcggatttattagccccagaaggctatggtgagattattggcgggtcagaacgagcaactgattacaattacttacttgaccagatcaaacaagccggcttaaatccagacgactatgcttggtacttagatttacgtaagtatggtagtgttcctcatgctggttttggtttgggactcgagcgattcttgacttggattacggccgaagatcacgtgcgggagacaattccgttcccacggttgttgaaccggatttacccgtaaactttaattgaaggttatttttattaagagcgtgggacctagtctcacgctcttaatagtgaaaggatgataacgagatggagtccttagctgccgcgttagtgaatgatggtcaaacgaccattgcgaacgcattattggcccactatcgtgaaattggggtcacaaacgatgaattattggtttatttgcagttcaaacggttaattgatcagggtaatcaattcccagatgctgcggtaattgccaagagtttaggtgaatcgacaaatgccgtttttcagcggctacatgaaatgttagccaaaaaattgctgacgattgaatcgatcacggctgatgaccaaaaaattcatgaccgttataattttgacggcctgtatgataagttagcagttgcgctcaaaaagcagccagttagcactcaagcttcggaacaagccacgagtgaaaacagtcggcaaaaggtttttcgggcaattcagacggaatttggccgtgacttatcaccgatcgaaatggaaagtattagtaagtggttcgacgaagaccattatgaaccggaagttatcgaattggcattgcgggaagcagttctgcgtcaagtctataacttgacgtatatggaccgaattctgttgaactggcagaagcgtaacttaaaaacggctgcccaggtggaagcagagcgccaacgcagtattgagcaacgcttgaattccgctccgcaaccacaacaccagacgggcgcaaatgctggtccgaagattccgttattcaaattaggtgaagaccagtcttaaacactgtgctgaaaagcttatcggggaaaactgattttaaataaagtggtggcgattgcctgtgcgaggcgtcgctaccactttgtttcgggatgggttagtcgttgtttcatatcaatggcgtttgcccacgtcattggcgcagcgtactgaggttaaaacaggaccaccaggatttcctgtcctggtaagccggtgggatgcacatcattggaccaaaatcagtgggcaccactataaattaaaaaatggttataattaaatgttgacttctcattaaaatagcgcaatactgtaaacaaccaagtaaatatattaataaatacgtctaagatgagtagccgttgttggaatgccttagagaactgccggttggtgcgaggtagccatttcgcaacgttgaagatggtcttataatgcaagtttcaacgctgagctgacggggttaagcgttgacggctacgcccgttatgcggttagagtctcgctaagaattttcagtggcggtacttgaagtgcggtggcctgtgagggtcatttgaagtaaggtggtaacacggaaaaacgtccattcgtccttaatctgataatcagattagagacgatgggcgttttttaatgggaggaagcagactatgacagaggcaatcattgatttaaaagacatcgcagtgacttttgacgacgggcaccaagtcgttcacgcggttcaagatgtcaatctacagatccagacgggtgatatttatggcattattggatattccggcgctggcaaaagtaccttggtacgggtgatcaatttattacagtcaccgacaacgggccaggtagtcgtcaatggccaggccttacaaacgctatcgccagctgcattacgtcaagccaggaaacacgttgggatgatttttcaacacttcaacttgatgcaatcacggaccgtgttgggaaacgttatttatccattattgggtcaaaaaattagtaaacaggaccgacgcgccaaagcattacggctactgaagctcgttgggttaacggactatgcgcagacctacccagataaattatctggtgggcagaaacaacgggtggcaatcgcacgggcactagtcactgacccgcaaatcttgatttctgatgaagcaactagtgcgcttgatccaaagaccacggcggcaattcttgagttgctacaacgggtcaatcgcgagctagggattaccattgtcctcattacgcatgaaatgcaagtcatcaagagtatttgtcatcatgtcgccgttatggctgatgggcggattattgagcggggccccgttgctgaggtttttacagcccccaaagcacctctgaccgttgattttgtggaaacatctaccaatgttcgggccgccattcagcgaatcacgaaaacgattaaattgagtgaattagcagcggaccaagagctgattgcgttcaaattctttggtcaatcaacaaagcagggaattgtctcgcagttatcgcagacgctgggggtcgacgttaacattttgtttgccaatatcgaccagatcgatggtcaaaatgttggtgacatgattgcgattattacgggggatttaacggccttcaatgtggcggtcactaatatgtcggctcaaggtgtccacactcgcattatcaatgaagaagttgtgaagggaatggtggactaatgacagcattaattccgaatgtcttacaaatgaaagctgaatttattcaagcaacgttagagaccctctatatgaccgcagtttccgcgctggttgcaggaatactggggttgggtttaggggtactgttagtggtgacacagccccatggcattttagctgatggcccctcgtatcaagtgttagacaagctaaccaacttactccgttcggtgccatttattattctgttggccgtaatttcgccgttgaccagctatttaatcggaacaacggtggggaccacggcatcgttagtcccactagtttttggtatttttcctttttatgcccggcaagtgcaaaatgcgttactcgatgttgaccaaggaatcgttgaggctgctcagtccatgggatctagtcccattgcaattatttttcgggtttatttgaaagagggactacctgatttgattcgcgtctcaatcgtgacggtgattagcctgattggtctgacgacgatggctggtgcgatcggtgcgggcggcttgggtgatattgcaatcagtattggttacgctcgctttgaaaacgacgtgacgtttgtcgcaatgatcatcattttgatcttagtctttgctgtacagctgtttggtgattggctcgttaagagcgtcacacatcattaataaagggggaattagccgatgaaacgattagcatggtggttgattggtattgctgcaattgttggtatttgtgtgggattacatgaaataacgagttattcggcccgtacacaacagagtgccacgattacggtcggatcaatgggatcggactatgaagtctggcagcacattgctaaaagccaagatgccaaaaagatgggcttaacgattaaggttaaacaaatcacggatggtgttcagctgaacaaggccacggtggacggtaacgttgatgtgaacgcctttcagtcctggtcatattaccaaacttataatcagcagaatcccaaggccaagttggcggcgttaggaacgacttatttggaaccaatgggaatctactccaaaaaatatcaaagcgttgatgaaattccggatggcgctacgattgcaattgctgacaatccctcacaagcttcgcgaggcttgttactgctccaaaaagcgggcctgatcaaactggcagctaattttggtgtcttaggttcagtgaaggatattacaagcaatccccgtcatctgaaattcaaacagatcgatgatactactggtccccggatcattaaaagtgtcgatgcagttttgatttcgaatacggttgctttggaaggacatttacacgttttacgggattcgattttccacgaaagtctgaataagagtactagggataatgttaatatcttagcaacggccgctaagaacgagcatcgtgctagttatcttaaactagttaaactttaccatcgggcggatattcaaaagtatatcaagcaaaaatattacggtactaagattaacatcaataaaccgctatcttattttgacaattaataagcatattgggtgctggatgattatagataagttatgattatgataataaatgttgtaactcattgaacttatcaggaggtctcaaccatgtataaacgaatcctagtcccattagatggttccgataatgcttattatgcacttgaacatgcgattgccttagcgaaggtttttgactcccagttatttttattgaatgtcatcgatgttaatcgatttggcgtctacagtccagatgtttttacgagtgcggcgccagatatgatgagttttgatcaagcccagagtaagaaactgttggagcgggcccaggatcaagttgcagcccatcagttgcacgccgaaacaattcggcaaactggggtacccaaagtgacaattgcggtcgatgttcccaaggctcaaaatattgatttgatcgtgattggtcgctctgggactaatgcgatttctcgcctgttcttaggttcaacgacagcgtatgttgttcgtaatacggaggctaacgtcaccgttgttaacatgccgaatgatgaagctgaagaggttgaacaaaccggtgatgtttcggccgatgattctaaataacttgtcagtgatgattgaagctggtcacacgacgtcaacattgacgctcgtgcgaccagcctttttagtttgggataggcgatgacgaaaaaacaaagtcgttttccgctactgacgattaccgatttgagtgccaactgatgccgtttggctggcgtactggcttagtagctgattgcaggtgattagctgcaatcagtccaatgaatgtcagtgctaccgttaataccgctagggccataccggcggccgcttcatcttgttcgaacgattgatagataaatgttgaaacggtcgtcataccggaaggcagtaacaatagggcaacgactaattcacgactcgtggcaatgaaagccatcacaaagctgttgagtagcgcgggccatagaatcggaagtgcaatttttaggataatgcggccgaaactaggttcgaagatgcgtgcgctagccagcaattccgagtcaaaggccttgagggcggtcgtcaagtattgcaccgttgttggtagaaataaggtgacatccgcgatcaggaggatggttagggtgccgtataatttggtgaacgccagcacctgtgaaaagagcatcattaagctcaatgctaagacgacgtttggaattgcgagtggcaatgcgcccaaggtatgacataactgtcgcagccacttgggaaaacgttttgttaaactcccaacgctcaagaataaaccaacgatcacattgagactgctaatcagtaatgccaatccgacggtcgtaacaatggcctgccaggcaggactatcaaagcgtaagaggtctatatagtgtacaagtgtcaaattagacggactccaaccaagactgcgttgtttgagtagcgattggagcacgatggcactgaatggcaggacaatagcaatactgatgactagggtgacgaaagtgcctgctaatgttgtcactccaagctgccgatattgtgacgctgaccgttgtccggtgaacttaacagctggccggcgtaacaaccattgctggataccccaggcaatcagggcaatggtcagtaggagggtgccggtgagtaccccgttttggaaatctaagggccactggttgaggtccttttgaatcgtagtcgtcagaacttcgaagtggatgctccgaccaaaggtggctggcgttccaaattcagccaaggttttggtaaagactaaaatccatacagctaagtatgggactaacatgattggtaatgtgattcgcactagtcgttgccaggtgttgaccccatgaacttcggccgcttgaagccagcgctggttgaattgcatgagggctgcgcgtaagcctaagtatgccacgggatacaaatgcagactcatgataatgaccatcccgaacggtgaaaatagccactgaaattggtggtgccaactcggattaagctgagccagtaatccgtgtggttgaaagaaatataaccagcccatcgcgttaatatatggtggtgtcatgaatggcactaacaagagccaatgcaaccaggcgagctttgttaaacgggtgtgcgtcatgatccatgccaaaggggtggctagcagggttgtcccgacgaccgtgcccccactgaggaacagactgtgttgaatgctcacacggttggttggctgcgtcagttgtgaccatagctggcttggcgattgcccgactagtgtttgaccaatcagggcgactaacgggccgataatcagagttgccaacaagcaactggtgatgattgataaggacaagcggatttgatgattactcattggctaaagacctgattgaatgcgacaacgtttttagtcagggccgcgttggcactggtccaattgaccgtgtaggctttgatggcttcgccattgcgtggatcggtcaaagtgctcgtggtacccggaattaagttacttttttgaatttgtctttgaactttagctgataagagatagtcaataaattgtttggcagcggcttgatgacgactagccttcaaaatcatcgccggtcgtggattgaccaaagtcccactcttaggataaacgaaaccaattttttcgccttttttaatagctgttagactcatgtaatcgaccccaccaaagacggcgattttttggccagtgatgactgcatcgagtacttccttgttagcacccccgatatcggcaccgttttcttgaagggctttaagtagttgcgtaccgtgtttcatttgataagcgttaatgaagtccaagctagaaccagaggtttgggggtccggaatggtcacttgattgcgatacggagtggttgtcaagtcagaccagtctgtcggtgccgatttgatgtgctgcgtattgtaggtgatgccgactgccgaagcactgtaattgatcaactggtggctagtatctttaaattgtttattcaggtgtttagcttgagaaggctgataggttaatagctggccattcttttgtaaatcgacgccagcggccattgaagctaaaatcagcacatcagcttggggattgccttgctcggtcttgaccttacttaaaattttcccggtcgtgccgtcaaaacttttgactttaatgccagttttggcttcaaaaccgtggatgatttgatcagaaaggggtttaggtccagcagcgtatactgttaagacttgttgactggtttgcgcattggcggttaacgtttttttctgatgttgattaacataaagcgacgtgccaattgcgagcacgccgagcgtggataatgtgataattgctgctttagacatgtgagtcaactcctaaaaagttagtatttgatgtggatcgatgcttaatgtgatcggtgcagtggtatagggtagctgggtcttgacgtgccaatcataggcgccgacttgaacgtaagtatcaaaatgatcgcccataaaggttgaacgctgcaccaagccttggtaagtgggctgctgagtacccgtttgactgactgcgacatattccgggcgaatggcctggtgcgcgttgatctgattaagggtgcccataaaattggcgacaaattgagattttggctgttggtacagctgtgctggtgtgcccgtctgcaccacgttgcccccttgcagtaatacgaggtggtcggcaacttgcaaggcttctggacggtcgtgagttacaaagatggccgtcagatgctggtcgtgaatcagggcgcgaatttctaattgaagccgtgtgcgcagttcggggtcaagcgcacttaaagcttcgtcgaataaaatcaaatccggttgggtcgctagtgcccgtgcaagggcgacccgttgctgttgcccgccagaaagttcacgtggataacgatgtcggaagtcaatcagactaacttgttcgagggcccagttgacttgagcagtcaattccggcttggtcagatgcttttctaaagcgaaagcgacattttcttggaccgtcatgtgcggccacagggcaaagtcttgaaaaaccatcgccaagtgccgctgggcagggggctgattccaatgagtcgcggcgtcaaaaatgggctgattatcaaatgaaatttgaccactgtcaggtgtcgtgagacccgcaatcatgtttaagagcgttgatttgccggaaccggacgggccaattaatgccgtgatttgttgatcaggaatcgtcagactgagttgattgattaccggaccttgaaaacttttggataattcgtgtagcttaatggcaaccacgatatgcaactcctttgtcttaattggtttgctcagtttattaagttactttgtattgtagtggtaattcgccgtgttaacgttgattttgagtttagtttatgtaaactttgtgtgttatttcggtaaaacagtgcacataaaaaaagaccactgaatcgaattcagtggtcttgggtgattcttattgtccttcagtcgtgttattggtatcagcggtcggtgtttccgatgaagtcgcttcggaacttgcttcggagcttgaactggcttccgaactactgctactttctgaactagattcagaagatgaactttcggcgctacttgaggaagaagcagcttcggaactactactgctactttccgaactacgactacttgcttctgtgctggtgcttgaactacccgttgttgttgaactagagctagctgaactagcggttcctgacgaggcttcactactggagaagaggtgaccaacaacgtaaagttcttcgataccgttcttcttagtcgtgccaactgagcttggtttggtccaatcagagtttggtgaatactgttgaaggtaattcatcatggcgcgataaatttgttgtgaaatcttttcgttggaggtatctagataaccaccagcttcggtggacttatcatagccagtccaaacggcgaccgaataattcttcgtgtaaccggccatccatgagtcaacgacggcatcggatggtactttgtttttatactgagaagcatagttgtcagtaccagtcttaccagcttggtaaacgccgctgatcttagcggttgtcgccgtcccagtagaactattgatgacccctttcagcatatcagtaatcatgtatgccgttgatttcttcatggcgcgcttaccagtgctagtatacgatgtcgtaacgccatcagaagtagtcactttacggatgtagtatggcttatgataaacaccaccgttggcgaacgcagcgtaggcaccggcaacttgtaaggtggaaacaccagcaccgatcccgttggcatagttaacggttttgaggttcatcccaaggttattggcaaaggttttggctcggcttttaccaacggcttgtaaggcccgaattgctgggatgttccgtgattgaaccagtgcttcacgcatcgtcatattgcccaagtaattattgtcaaagtcatgcacggaaatgttagtcccgggatatttgtatttcgtatcagacaacgacttgtaagttggccaattcaaatattcaatggctggtccataatcgagaatcggtttcatcgtcgaagcgtttgagcgtgatgtccagacagctcggttggttccgtacgtgacattaccggttttccgaccaccaatcatagctgagaccttgccagtgtatgagtcaacaaccgatacccctaattggaaagtctgttttccattattaggatagttgacgtattgagacgtgttggcaatgtcataaagccgtttctgggcatccatgtcaatgttcgtataaactttctcgccatcggttaaattataaccttttttgaggaggtcttgacggacttcgttcaggtaagcatccaagattttatttgtcttttcatgcttcgctaggcttgaacgtcccgaactagttaagcccgtcttgacactgactttttcagcagcagtttcctgactcttggagatgaccttgttatcgtacatcgcttccagcaccagattacggcggctagttgcgtatgatggataagtcgtcgggtcgtagtaggttggtgattgcggcatacctgcgagcagtgcgagttgactaaggctcagatcttttaatgacttaccgtaataatacttggcggcagtccccataccataaatcccgttacccatatagaccttattgatgtaaaattccagaatctgagatttactgtaatgtttttcaagattaagcgcaatccaggcttcctgcgctttgactttcaaatttcgatccgaagtactggtggaaaagaccgcaagtttaacgagttgcatggtcaaggtactcccaccttgcatcccaagtgagctaccttttaagttgccgactgcagccccaagaatccggtaataatcgacccccttatgcttgtaaaaacggcgatcttcgattgagacgacggcattcttaagtgtggatgggatattactagacttaacgtattcgtggtcgttagttcccaaagaggtcaaatacttgtcgttctggtcataaatcttagcggtccccgtattgacaaggtcactctgtttgactgttggtgccgtctgcgcatagtagaagaaaagtgctagaccagcgagtaccccgatgacaaacagtgcagctaaggataaaataatccgccgaaaccagtgtttcttaggtggtttaggttggctttttctgcgagcaacccgtgagttctgttcattgttacctgccatgatgttctcctttaatgaattgatgaggtctcatcaataatatgatcaagcgcatccaaatagggaatgcgtggattgatttgataatgtagctccgcggctaaatgttcaatatccgtcagtggaattgacttgcgaccaccatctccttgatgatcccaataagtaaataagtcgctggctgttaacaaaaataggcgccccaaactcgcaaaccgaatgataacaaaacagattccgctttgagctaagcactggcgcatgtgcttaatttgatgctcatgaaagttttttagcggaaaagccgttttgttcttggtctccttggcctcaaaatctaaatacttcccccgatagacaccgttataatcagtagtagaagcctgtttaaaataagcttcgcggattacagcggcgctgcgtttgggataatcgactttaacgatttgaatgggcgttggctttttatgaataactgcgatattattttcaagataataggcgttactatcattgatttcttgttccaagctcattccacgatcgccaaaattgacgttggcaaatttggaagatttcgatttagttgggccgggttggcgataaacttgaccgtttggatagcgaatcgtcacattaatcaacctcctaataatgttacattttaccattaactaatagggaatgtgaaatatctgtgagtttttaactgatttagaccgatttagtgacagaaaggagacttttttatgagccggttgtggcttagtggttaccggagttacgagttgaatgtctttggtgatcaggatgataaactaaaagttattaagtttgcgttaactaattacttaacgacgcagatcgaggatggtatggattggctgataacgggtggtcagctcggtattgaacagtggacagcggaagtagggttaacgctcaaaaagacatatccagaattgaaagtggcaatgatgttaccatatggtgaatttggtgggcgctggaatgaaaataaccaagctaaattacagactttgctggcccaagtcgattttcatgcaccagtcagtaaacaaccgtatgaaaatccgcaacaattaaaaaattaccaagaatttatggttacccatacggatgcggccactctggtatatgatccagataaccccgggaaacccacgtatgactatgatttgattcggaactttagtgacactcatccgtacccattgaccctgatcgacttcgactggttacaggaaagtgccaatgaatatgcagaaaaacagaataatggttttaattttgaataaagtctgctacaatgttttaagtaatgcggatgccgaatgggtatcgcgcgaataacaatgaggtgtttttaaatatggctaaacgtaattttactcccaaagacatccttcaaaaagagtttaagccaaagatgcggggttatgatcctgccgacgtggacggcttcttagataatgtcattaaggactatgagtcatttactaaagataaccaacaactttcagatgaaaatgaacggttacgggccaaggttgacgagcttaccaagcaagtcgctgtcggtgcaaccagtccatcttctcaaccgactagtacggtgacgaatatggatattctgaaacgtttgtctaacttggaacgtcatgtctttggtgcccaattagataataatcaaaatgaatcacaccgtctataattgtgattcgatgtaaattctgggtaatcgcggtcggcttatgtcggctgaggaaggtccatgctcgcacaagctgcgatgcttgtagtgttcgtgctcggtgaaaaaataagccggggtaccgatttatcggtaacggcggaaaaaacggctaaggcttcggctatgcccgagtattcctgaaaagtgccacagtgacgatactcaattggaaacggttgagttggaacgcggtaaaccccacgagcgggcaacccaaactacggtaggggcgcttcacataaggaactgaactaaatgtggggggagattagtaatctcgagatagatgattaccgcctagttaacagaccctgtactttaactaggtacaaaacatggcctacaggaatttacatttagacaggagactgggacaaaagttcgcttttgtcccagtttttttattcgatcagttagcaaactagcaacttatgctaaactaggtgaggaaaccaatttagtggaaatatttactcaacaagatacgcctacagaacaggcgtcgcaggaggaaactatgcaagaatttagattaattgccaccgccgctagcggaattgaagcattagtggggcgtgaattacgagatttagggtatcaagttcaaactgaaaatggccgggttcgatttaacggaacgatcaaagatattttgcggaccaacttgtggttacgaacggctgatcgaatcaagatcatcgttggtgaatttgatgcttatacgttcgatgagttgtttgaaaagactctcgcattgccatgggaccagttattgccgatggacgctgaatttccagttgaaggtaaatcgcgcaactctaaactccacagtgttcccgacgtgcagtctatcgtcaaaaaggcgatcgttaatcagttagccgatacttatcatcggagcgggcaccttccggagacaggcgctttgttcccattagaagtggctattaataaggatcacgtgttgttaacgctggatacaactggctctagtttattcaaacggggttaccgagtcgaaaaggggggcgcacccttaaaagaaaacatggccgctgccttagtgatgctagctaagtggtatccggataatccatttgttgatccagtttgtggttcggggacgattccaatcgaagccgctttactggcgcgcaacattgccccggggttcaaccgcgcatttgcgtgcgaaaagtgggactgggttcccgctggcctgagtcaacaattgagagacgaagctgatagtttagccgattacgacactgagctggatattagtgggtatgatattgacggtaaaatgattgatatcgccaagctgaatgcgcgggaagccgggctgttgcatgacattcatttcaaacaactggctgtcaaagactttacgactgacaagatcaacggggtcctaattgcgaacccaccatatggggagcggctaagcgatcgagatagtgtccggattctctatcggcaaatgggccaagtttacagtaaattgccaagttggagcaagtatatcttgaccagtgacttagaatttgaagacttctatggacaaaaagccacgaaacgccggaaactctataacggtgcgttacggacagattatttccaatattggggcaaacgaattcggccagcacggacggaataagcaagcgacctttgttggtaaaagtaggtgaaaaatattggcaaatgaaataccgcggtctgaagttgattcccagcagctattagtatttaaagtgctggctgacgtggttagactgaacattgttaagtatttgaagctgcaggatcaggccgttacttgtgggcaagtcggacaagcaatggggattagtaaaaccgctggttcatatcattttaaattgctggaaaaagcaggattaataaccgtcaaaaaagttgcacgtgaaaaatacgtcatgttgaaccccaaaacttttgatcactatgttacccatttttatcaaagcctttaaattgctgagtattttgggcggtcttcaactgtgattctgactaataccagttcttaagtgccgattggtcttttgaactggtatttttttgttgccgaatcgttagtgggatggtacgctgtaatagttcaaaaatatttgaactattgtaggtggccacccaactaaatctaagaaaaagattgacatagtagatttaaactttgtgagtaggcttattcagcattggtaagtctgaataaatgataatggggcggaaaacatggaaaatcgacagcgacagtttggctggttattagcgttaacttcattaggcttttttatggcaatgatggactcaatgattgtgacaacggcgtcaacagcaattaaaattgatttcgacatctcggaggccagtttacagtgggccctcaacgcttacaatgtcgcgattgcagcaacgttacttgtgggcgttgcattaggtgatcgctttggacgccgccgggtttataatctcggcattttagtttttacgctgggttcagtgttttgtgcattagccaatcgaatgccattattgatagtggcacgtgtcattgcaggtattggggcctccgtcatgacaccgatgtcaatggctattttaacggctgcagttccagttgcgaagcgtgggaaagctttaggaatctggagcggtatcggtggactggcactgattgtcgggccggctctgggtggtctaattgtagctaaattaacctggcagtggattttttggatcaatgtgccacttggcctgattgtcataggattatcccggttctatttaccagaaagtaccggggtagcaacaccaattaatttaacggacgcaggtctttcaatgttagcgatgaccgcaatcatttgggccttagctgccagttcgactagtattaatggaattggtccgttcgttggcctgataattggcttagttgcaggcacttggtttatcaagcgacagcaacatgtcgttgcaccgttaatgccgttaacgctttttaaaaagcgtatttttacgatggaaaatgtggcgacttttttattatatgccgcgatgtacggagtcgttttctttttaccccaattcttacaagttgttcagcatgataatgcgtgggaggcaggattgtccttattaccttggactgggacactagtattagttgcgccatttgctggcaaagctgtggacctctacggggaagcgattgtggcagttatcgggctattatctcaaacatttgggtatttcatgcttggttatctagttgccaaccatgcggcttatgttatgatgattgctccgctggcaattgctgggatgggattgtcaatggcgggccccgcgttacagcatgcagttttggggggagtgtcaccggcagttatcggtaaggcagccggaatttacaacgtttttcggttacttggaggtgcggctggcacggcaattgctgtggtggtgtttacagtgggtagtcgggtacccgcgatgaatgcaattggctttcaaacagtcatgtttagtacagcattgatttcagctataggcgccggttgtgcttggcaaataagaaattcaaagaacttgtagctgacaataacgatcattacaatgtgtgacagatagtttgagtagccttaaaagagcgtgtttaatcgggtgaccgactaagcacgctcttttaaggctaacgttaaccatggttgagcctttgataattaatttaaataataatcgaagaaattagcaactttgttcatcagaggcactttgaccagatgtttggcttgataacccgtgataaatgccacttgttcagcatacggggcggtatgcacgcggtcaaagaaattacgagactgtgaataaggaatccgttcatcctcagtaccatgccaaaataaaagtggccgatgattgatggtttccggttgcaggttaagatcatagtgatctagccaactcgtcaatagggctaaatcactgggaatgtaataagcatgggcctgcgcatgcttgcggactagttgggcgtacgcgttcaggttaggggtccccataatgattgtggctgctttaatttcaggatgatgggtcaataaagccccggtcgtcatgccacccattgagtaaccgccaacaccaatctgctcattcaaaatgagtttgcgctcccggtagtaattcacaattagctcgaattcgccaagattaccttggatactgttccaaaaagtaaatgaaggaatctggctaacgatttggtgtcgttcaccgtgattcatggcatcgggcaagacgactcgtaaattcttgcgagccagtttacgtgcttgggtcaagacgagttctttattggactgccaaccgtggtaaaaaatcactagtggcagcggttggtctaaatgggttgtagtaacaacttccagcgcaggcacatcttgaaagtgtcggttagtaactttgatcatatttatcggctcactttattaatattatgattaagttaactgtgccagaaatgactgctgaatacaactgatagacttgtttagtcaatatttggtcttgttaattgttagtgatgttaaaataatggtaatcgcctgtttattaactagaattacggcctctaaaaagtaatcttaaaacggaaggtgttataaatgaccgaaatcgaaacggcactacttcgggaccgaaaagcaaaagtccagcaatattttgcgatgtgggtcactcgtgattttgaagcgttaccaagaatatttgcggtcgattgttattatcaagaatgctatggaccagcatatctatcattagcggaagttcaagcctggattgaacatcaattaagagttcaacgggtaacggcgtggtcgattcagcggttgtggtcagcaactgacaacatgatctttgcccagtggtccttcaccgctgttactgaccggatgactcagtttgatgggctttcagcagttcattttaatttagcagaacgtatcgacgatttacgagagtatcagaccacgactgcgcatgattatccctatcatggatccgtgctgtgatatgcgaagcatgtgtgtcataatgtaagcgaaatcatttggagtgttgggggaatcagtatgcaagttcaagtttctgttattgtggctgcgtataatgaggagcactggttaaggcgttgtttgacctcattaaaaaaacagacattagcggccttagaagtcattattgttgatgatggtagtacggacggcacggctacaatttgtgaccaatattgtgcgcgctggccgcacctatttcgggttatccatcaacgtaaccaaggacagggacctgcacgtaatgcggggattaccgccgcgcatggccgctatttaggttttgtcgatgctgatgattgggtcgaaccgacgatgtatgcgaccttagtagcaacggctgagcgtagtcatgcccaaatcgtcgtttgtgatgttcgtaaaatctacgcggcgactcaccgcacaactagtctgctgagcttgccagatgcgactgagcacgtggcaattgcgacttatcttaaatacggtctaaataatgcttattccggaaataaattatatgcacgttcgtgttggcagaaatatcgttaccagcggatggtctacgaggatttagatattttgctggacatgttgagttactgtgagcgagtcgcctatgtgcaacaaccattttataattattataaacatgctggttcgacaactttagattataccaacccacgactgtttgatattatgacagcctatcaagatgccattgagcacgccaaggtgacgtatcaggatgcggtgacttgcggtgacttattgcgtcgctaagcgaattttgattaatttagcaacgccaggctttgccgattatctagcggagtttattgaactgatacgacaattgcgtcctatttttgaagccagtccgtcaataatgagtgatccggctattaaaaaagtttgtgattatgcaggtcaattgacattaccccggcgatttatctgtgagcgtgaggactgggctcaatcgtggcatcagtatagtcggaatttcaaaacgattataccggtagctaaagcattgccggccgatttacgacaacggtctaaccactttaaactcgattattggttgttgaaaacgttatttgaacaaggtggcttgctgattttgggtaccgtcaagttgcaccgcccgtttggccgtttacgggcgggaggtgacgtgttagcctttgaaggtgaacattgtttattagttggtgcgcaaccacgttccccactgatttctgaattactgcaacagttgattgttggttccgagtcactaacagagttgctgacaatggttaaggcacagccagaacgatggtcagcgggtacgcataagattcgcttggttgacataaaagattggctacaatagggcgacgggtcactgagtcatgcagagcagcggactcagtgacctatttagtcgttggttacattgaaaatgaataaaaaccaaataacaatttaaaatattatataatgatgataaaattaattttaaattaaattaggaaagggtgagaatatgttaaaaccagcaccattgcacgttggtgatcacgtggctgtcgtcagtctttcgagcggcacgctcggagaactcacgcagcaacatcaattgaatcgggggctaaaacggatgcgccaactagggctcgtcccagtcatgatgccgaatgctttgaaagggcgactgattttacagcaacgccctgaattaagagccgccgatttgaagacggctttcttagacccaagtatccgtggagttgtggcggcaattggcggtgatgatacgtatcgaaccgtgccatttttgatggctgatgagcagtttaagacggcggttcggcggtcgcctaaactgtttacaggcttttcagatacgacgatcaatcatttgatgttttatcagcttggactgcaaactttttatggccccaatttcttaagcgacttggccgaattagggccgacgatgttgccgtataccacgaagacttggcagcgttactttgaaaatcctcagcagacaagcattattagcagtcctgtgtggtatgacgaacgaacaaatttcagtgaatcggcgcagggaacacggcgcatgacccacaccgaaatgcaccattacgaagtgttacgtggtcacgggacaatcagtgggacgctacttggtggttgtctggacagcttttatgatttattgaccacgacccgttatccagacgaacggcaagttgcggaacagttcagactgattccatgtgcagccgaatggcgcggaaaaattctgtttatcgaaacgagtgacgaacagccgcagccagatttgttcaagcggatgctgcaacgaatgcgacaagctgagattttgacaaacgtagccgccgtgattgtaggtaagccgcagaatgagcattattatcaggaataccgccaaattttgatcgatgagacagccgatttgaaattgccaattctgtacaatattaattttggtcacgcttttccgcgaacggcacttccatatggggcgcaagtgtgtatcgattttgagcaagctacgttaaaaattttagaaccttggtttgtggaagcttaagtggttattgttaaattggtatcggcagacgatcaaaaaggtattcgttgttcattgcaacgagcaaagaatagtgcaatacgagaggagttgtcatatgcaattacaaattcgacgttttaaaactacggatgcgccagcagcggcggcactgattgcgcgcacattactgacgagtaatcagggtgactatcccaaagcatacttggatcggctcattacccagatgacaccggcttggctatgccaaaaagctgctgcgacgcacttttatgtcggttattttcagcagcaactcgttgcgaccggggcgattgggtcatactgggggcgcccaggtgagtacagtctgttcacgatttttgttgatccggaggttcaaggcatgggtggtgggcgtcaaattctgcatacccttgaacaggatgtctatttcagtcatgcccaccgtgtagaaattccagcgtccgtgactgcgcacttattttaccaacacttcgggtatcgacctaagcctggaggaatctacccggatgatgaaggcctatatcgattagaaaagtttccacatgaatcattttactagtaaatcacactttcctgcattagtttataatgtaaacaaattgtaaagcgactgcaatcagtttgagaacttatctgcacattttatcggtaggataaggtgtgcagtaaacgtacatatcaaactaatgatgggaaggcgagtaatttggtcatgcagaaaaagtggcggttgatactgctgctcgtgggttgttttttaggtggtaccggagtcgttcaggcacacgcggcggtgccggatatctcagagtggcaaggtcagttaacgagtaccgaggttcaaagtttgaagagtcaggctgattttgtcatcaaccgggtgcaatatgggagcagttatgaggatctctaccacacctctaatgagagtctctatgtgaaatatggtgttccgttcgggtcctatgactatgcgacctttacgagtaccgcgactgccaaagccgaggcagataagttctatcaacgcgcaaataagaacacgaagttctacgtcttggattttgaaacgacttccatgagtagcacggcggccaacgcggctgtcaaggcttggtatactgagatgcggtcgttaacgagcaagaagttgattttttattcgtaccagtcatttgcaaccacatacgccaacacggcacggcaaagttttgatgcccagtggattgcaaattactcctcgaagccgacgatttcgttctcattgtggcaatattccagtagctattatttatcttcgctaggacaatatgttgataacagtttgtatgacagtgcttccgtgacgacataccacccgttaagctggtggacttccgggacttcgacatcatcgtcgaccagttcaactagcacgacgtatgcctacagcagttatacgaaagggcaacatgtgtacctcaataatggggcgtcgagctattatgacggcacaaaagtgcccagtagcgctaagaaaaaatactacaaggtcacagcaaccaagtcagtcactaagagtcgttccaaacagctggtttacttaagtggtctgaataaatgggtcttatcacaggacgtcaccggctattgggtcggccaacacggattatatcaacttcgtgaaaagagcactttgttcaaagatgttaatttgacaacctcgacgggtaaaaccttgaaaaagggtggcatctacagtggtaaattggttaaaagtgggaatttctatcgaattaaggtgagtggtggttatatcacggcgaaggtctccaaatctgatcattggtactatgaatcagtaccttccagtggctggatcaaggctaaagtgggactctacacctataaatcttcaaactttgttaagtctaatcgacacgcttaccacgccgctggtgatcgaattaaagtaacgaaggtttactcacggtcgggtggctcacgctattatttaacgaataaagggaattacgtttcagccaaccgctcaaacgtggtcacacaataagtcaattaagtcgctcaaaacgagcatagccagttgattactaaacgactttcagcaagttattagctgaaagtcgtttttttgaggaaatacgtcgattggaagtacgttaagattaaaaagtgctacacttattttaattatattttaatcttgtggggtgggaatacaatgaaaattgggacattttctgcatcaacgccgattacggcattatcgccaaaccgttatgctcgcgcacgacggttcttggcaacccaaggagtgaccttagttgccggtaatttgacgggacgacgggatagttaccgtgctggttccatcaaagaacgggcggccgaaatcaacgcgttaattcatgatgattcgctggacatcttgatggcaacgattggtgggacaaacgcaaattcggttctagcaatgctcgattacgagtatctcaatcagcatcccaaaacaattgttggttactccgatgcgacggccgtgttattggcggtgcaaacgcacgcgcctaactgtcgtgtgatttacggaccggccttagtagcctcacttggcgccttagagtcagagatcgtgacaactacttggcaaaattttctgacagtctaccgcgcagcaccggggcaggccgtaaccgaaccggcaccggcacagtggacggatgaagcgatcaattgggagacctttgaacatccgaaacacatgcacgcaaatacttggcattatacggcgacccccgttttggctggccgtttgatcggtgggaacttgaacaccatgtacggcttctttaactcaccttattttccaaaattaactggtaacgagcttttatttattgaagatgccgagaaaactgcagcaacgctggaaaaaaatttcgtaatgttagcgttggctggtgtttttgatcaaatctctggcattattttgggaaaacacgcgttgtacgatgatcaaggcagcgggcggttgccaatcgatatcttacaggaggtgctgggggatcgccaattaccaattatttacgactacgatagctgccatacagtccccatgctcagtacgccattgggggcggatgtccggattgatgcgcaggctcgaacggtgacgtttagtcatttttagactaccttttgcaattaaagacgtttagcaagctcaaaaactttgtaaattggccatacttacatgcctggtataagaatacttgctttttgataaatgataaacatataataaaacaattagattaacaaaaggggtgtgatggtgatgcacaaatatagtgttcaagtgggggtctacacgcagtatttttttaaggtcattcgggatactcccggggtgttaatttacacgatctgtttgccacttgtctttttaatcatgaatgtcagtagcgctttctttaaacctttatcgctgacaacttatacggctcaagtcgtgccctacattggttggatgattttttccaattgtctaacgactgccagcaatgtagccattcttcgcgagcagggttatctcaaacaatatcgaaccttggtggttagccctgcagtttttcttgtcagtcaagcgctggtcagcttgggtataattttgatgactttattgttggtggccctgttgagcgcgattactttcaagttggcctttttatcgttgctaggtcgcttatggttgactgtgttgcttacgtatctaccagtcacttgttttggcttacccttgattgccttggcactccgacgtaaaactgtcgatatgattggaaatgcactggcgctgatcgtcgtcgtaggtacctttatgttgagtaacatgctggcagtgtctgccaataacccattactcaacctggttagtcccatttacttagttaccaatgtttttgcgatgatcagcgtgggccccgtcagccactttatgacgacttatcttctgagtctgattgtattattggttatcggcggatttagctatcggcacattaagattctgccaacggagggcttataatgatgcgtgttgagcacttagcatattacttttcaagaaatgggcaaccgttcttcaaggacgtgagttttcaattaaaaagtcccggtgtcaattttttgattggtcaaaatggcgctggaaaaacgacgctggctgatatcatcactggtttgcggccggcacaaggtgaattagacctacctaaagcagccatttatttgaaccaacaactcccgttactgtcttcaattcgtgtgcgggacgttgcccaactggttttgggcatcgagcacggacgactacgattgacaactgaacagctccaacaacttattgatacccaagcttatcaattcttggccccgttgtgggatcagcattatggtcagctttctgggggccaacgcaaattagttcagttattgctgttcttacaagttgatcgcgaattgattgttttggatgaaccaacagcagcggtcgatcgggaaaacgtgcagttgttgtttcaggtcatgcaagcccatcctgagcgaacctacttgatgattacacatgacgttcgcgaccttcatgcttttacagattaccaagtgctgtggctcaatgatcggcaggtgacgacactgtccaagcgaacgtttgaagctgcgagcgcgcaagctgactttgttgcgctcttcaaaacgcagtaatataacagtaatggctcttgcgccgcaatggcgacacttattttgagtcctttggcgctcaagttggcctcgctggcaagtctcataaaatgacactaaaaaacggtactcagattagtttgagtaccgttttgcgtattattggtgagcgtacctagccaaagtaataaatataaccgatgatcaatgcccagataacgatccataaaatactgaatgccaacttgaagtaatacaaatgaaaacgaaaacgacggaagcggtcgctaccggccaatttgaacgtcaaggtcttgttatctaataattgcaagtaatcatagaaacggggaagccacacaccgcccgctgttaacacgattaacaatccgatgatggcaaacgccgctgcggggtaaacgatactggtatcgaccgtaaaggccggtgcaagaatgttggcatataacaaccataaagcatacaaccccaacgcgtaaccaataatccgaacaacattaacgataattagccgtgactttaagtccggttgttgttgcatgagtgcctgattcgcatgataatgctgggtgccaaagcgcccgctgaccggaatcaagtatcggttttgatgtaagtatggcagttgtgctaacagcgtgatcaatgccacaactggtacggcgattgccaccaccattagtaggtactcaatagtgaccatgggaacggtgctgacccggtaggcccaactaatccaaccaatcaggatgaagacgtctaatgccaaaaccaaccaaatctgaaagcgacgatagtgttcaaacgtggcggtatcggctagctgccaatgatggtcttgagttgagtgaccaatcaagtaatcataactttgcgtcggccacactaaggcgggaatcattagcaagataatgccaacgatcattaaggcgatgcttgtgacaacactccgaatcggaaaaatcaacagggttaattttgcgctgaccaagtagcaactgactagtaaactgataacaccgagccaccagcaagctgccattccataatataaccatttcaatcgtggtgcttgatcggtcacgtgttgccgcacttgatgttgcaattggagctgtgcgcgcggcgccagggttttagctggctggatgaccggatgctgaagattgtggtattccaaccaacccatgagtcctaacaataaaactaaaagaatccaaacaataactaacatggcaaaagtcctttaaaacaatatagtcgtgcatattaataagtgtaaaacgaaaatatggtcaaaatgtgacgattatttaaatcttgtaacttttttaatggtcagttgatttaacgaagcggttaaaaaccattttctactgatcagttgtggactagactatgcatgactgattgtaaagctgtgttttatctgtaataaaaaagcatttggaactacttacgatgtctgtcattgtgggaggcaagtaatcatgaatcaattaatgacggaattgggacaagtgtactatcagtaccgaccggcgggaccacaacagccgacgttgatgtgcttaccggcgtttggctgggacgccactgattataattttaagcatttaatggcacgattgccaagtcaggtgggattacttgccatcgacacgattggcgtgggccgtagcattcatagtcaaatggtgcgcactgtcctgcatattttagccaatcttgaggatgtggttcaccatgaacacgtgagcaacttattattggtgggccacagtttaggcgctagttacgcattcttatatgcccagcagcacttagataatgtttgtggcttagttttgcttgaaccaccctatgccgcgatggcaccacaacttcttgcaaacgtccaatcttttattgaaaactatccgcaactagtacaacagcgacaaactttgacacttcagcaactcttagcagaagttaatcctttaaacctactggcagaacgtgttgccaatgcccgtattgatttagcagcttacgcgaacccgagtattctgactgaagcgcaatgcttaccacaattagtaacgacgcttcgaaccgctgaaaagcgggtactgacgctgccaatccaagttttagtcactgaccaacgcttgacggcgtaccaacaatcaccgtggtgccagcttggtcacctagttcatgcaccaggtcagcattatttacactggacgaacgaaaattttgtccggcaacaactattgattgctctgtcccagtcatagggggcaaagagccagtccacggtattaaattaatcgctgcaaagctagtaccagcaacatctaccaatggtctgactttaatccaactgaatcagccacccgcaacaaattcgagtatgctaaaatgaaagcagattggttgtggaggcgttggaaaatgcaaaaacaagtaacgattattggtagtggcattgttggggcggtcacggcgtactatttaagccagaaccctgacctgaacgtcacgatttatgatgaaggtattggtcaagcgactaagaattcagcagggattatttcaccttggttatccaaacgtcgtaatcagcgttggtatcaactcgctaaggccggggctgctttgtatccggaaattgttgcggacacgcaaatgggctattctgtttatcaacaagcaggaacgattgtgactcgtgccgatccagatgatctgcaggcgctatacgatttagctctaaagcgccggcaagcggcaccccagatgggaacgattgagaaattaactgctgaagaagtccaagaacggatcccactgctaacggcgccccaacccggtgtgtttgtgagtggtggtgcgcgggtcgatggcgataagtttgcacataatttactgaaatacgctgaaaagcggaacctggtccgtcataaaggtaaggtacgtttaggtgaccagggccaactattgacggttaatggtcagcaaagctatgacacgttgattttagcagtcggggcgtggctaaagccgttattgttgccaatgaagattgttgctgatgttcggccacaaaaagggcagttgattgaaatgcagctgcctgagacttgggctgacgatgttccagtgctcatgcctgaaggtgaacgagactttattccctttacgcgcagcaaattggtcgtcggggcgacgcacgaaaatgatcagggctacgatttgcaggtttcaagtctggttgaagatgatctctttgctagcgggctcaaacttgatgccaacctgactaaggatcaaattacgcaggtaaaagtgggtacgcgtgcctacacgcgtgactttgcgccgttcttcggtccaattccggataacccacatattttggtagctagcgggttaggttcatctggtttaacaacaggacccatgattggtaagttgttagccgattatgttcaaactggtgctcataactgggaccagtatcaacgaccaattgaaacttatttggccccggctgattagtcactaagatgtaagccttgttgtgctaattgatgggcgccatggttatcactttcggcaatccactgggtgattactaattggcactggtcttgcaggtgcagcaaagtcgccagctcgacactgaaagttttgctgtaacccttggcgacactttcggcgacgatttgactatccgtatagaaaaagacgctgacttgcggaccataagaatctaataaagttttaaagccagcaatggcggcaagaaattctgcggtatgattatcactgtctggcaagacctgtttgaattggtgttgttggccctgatcaataattaagattcccgcggcactgcgctgattatcgggtgtggtcgcggcatccgtatataattgcatcaaactcactccaatgtgaaaggaattttgtactgtgaataacgataagcatacctttaaataccaaccaatgctagcgtcaagtgtgatcgtctggtcgtggacggcactagtattgatggcggggattattttgtggctagaaatcttgaagtttaagtggtggttactcgtcattgcggcgctctttattgccttggtcgcgattcaaatcagcttgcggcgcgtaacaatcaatcataacctcattatttttagcacggtcttgaaccattcttggcttgtgattccccgtgatcaactcgaattgatcgtcccgatacgcggtgggttgaaagttcaaatcgatggtaatcaatatcggtttttgatgttgaaaaaggcgcgcaatcagttgattgacctagcaactagtcgatagatacgaataaaaacaatcaatatacaaataatgttcataatttcaggaagattgttataatggagtaagtaaaaacagaagggcggagaattgatgaaggatattgaaattgcacagcaagtgacaccagaaccgattacggcgattgcggctaaagcgggcttgacggttgaccagatcgaccaatatgggagcacgaaggctaaactcaaattaccgttaccggttaagaaaactcaacgcaaccttattttagtaacgtcgattaacccgacgcctgctggtgagggaaagtcaaccgtgactattgggttaggtgacgcgttgactaagattggtaagtcaacgatgattgcattgcgggaaccttcattaggaccagttatggggatgaagggtggcgccactggtggcgggtactcacaagtgattccaatggaagatatcaatttgcacttcaccggcgacatgcatgccctgacggctgcgaacaacacgctcgcggccttaattgacaaccatattcaacaaggtaaccagttgggtatcgatcagcgtcgaattcaatggaagcgcgcgttggatattaatgatcgggcgctccggcatacggtgattggccttggtggtgcaacgtcgggtgtacctcgtgaagatgggtttgacattaccgtcgcgagtgaactgatggccattctctgtctttcagaaaatattgcggacttgaaacaacgtgttaatcgaattgtaattggctacacacatgaccgtcaaccagtgacagttgctgatttgaacgtcggtggcgcgatcacgttacttttgaaagacgcgttacgtccaaatttagttcaaaccctggcgcataccccagcactagttcatggtggtccgttcgccaatatcgcgcatggttgtaacagtgtacttgccacgcaagctggattgaatctagccgactatacggtaaccgaggcgggcttcggtgctgatttgggtggtcagaaattcatggatattaacgtgccagcggtcggacaagcgcccaatgccgtggtaatcgtggcgacgattcgggctttaaagttacatggtggcgtggctttgcaagatttggcaaccgaaaatgtggcggccttgaaagccggtgcggctaatttaggacatcatatccatgccatgcaacgttatggggtgccagtcgtggtggccatcaacgaatttacggccgatactgacgccgaaatccatgccgtcaaagactattgtgccgatcttggagtcgatgcagtcttggctgatgtctggggtcgtgggggtgacggggcaaccgacttagctgccgcagtggttgatttatgtgctcagccaagtcattttcaaccgttatcaccagcggatgcggatcttaagacgaaaatcaacgatattgtcactaagacgtatggtggagccaatgtcgaatattcagcgaaagctcagcgccaattgagaacgtttgctaagcaagggtgggatcatttgccagtctgcatggcgaagacgcaatactcattgagcgatgatcccaaacgtctcggagcaccaaccggatttacaattaatgttcgtgaatttgtgccgaagttaggtgcgggtttcattgtcgctttgaccgggaacgtgttgacgatgccaggactgccaaaacatccggccgcactcgatatggacattagtgatgatggaaaaatctcaggtttgttctaaagcttgaccgataagtcgatgccagtgggggtcggctttttatttgcgctgtttttggaagactgcgacagcgaatcaatcacacacgtttaatttgtgagctaccgatgatgactaactcgcttagcagttgagcggtgcaaccaatcatcaggctcgttgcttcaactggggggtggttaaccagatgccgatgcttttgggggaatactcgaaaggtgcttagttattaagtctgcaataaaaaccgcgcttttcctgccggagtttcgtacaaggacgacgtcttttggtataattaaacacagcttagcgaaatgtgaggacagaatatgtggatctatttaattttaatggtagcgctggtcattattgaccaagttatcaaagcagcgattgtgagtcatattgcgttgggtgccagtacgagtattgttaccgggttattatcactcacaaatttacataataacggggctgcttggagtatcttagaaggcaagatgtggttcttctacttgatttcagtgattgccttgatcgtgatgggctacttgctgtggcgcttacgtggcaaatggctatatgaggttggtatttcactgatgattgcgggaactttggggaatttcattgaccggttacgtattgggtacgtcgtcgatatgttccaacttgattttattaattttccaatttttaattttgcggattcatgtttaaccgtgggcgtcatttttatcttgatcggcgtgctgcgggatgatagttttgaaaaataagttacagggagctgataacgtggcaggagcgaccacggaacaacaattcacgattactgaccaaacagggcgcttggataaagtgttagcggcactacagtcggtctggacgcggtcgcaagttgataagctgatcaaaacggatcaggtgacggtcaatggtcagctcgaggcgagcaagtatcacgtcaaaccaggtgacgaaattgtcgttgccgcacagacggttcaacaaacaacgattgagccagaaaacattccattagacattgtttatgaagacgatgacgtcttggttgtcaataaacctcaggggatggtcgtgcatccagcccctgggcaccctaaccataccttggtgaatgccttgctgtatcatagtccgttgtcgacgatcaacggtgaatttcggccaggaatcgttcatcgcatcgataaagatacgtccggattattgatggtcgcaaagaatgaccgggctcaccaatcgttagcggctcagctgaaggcgaaaactaacttacgagaatacgtcgcactcgttcacggagtgattaaagaggatacggggacaattaatgcgccactcggtcggtcaccgaaggatcgcaaaaagcaagccatcgttaagaccgggcgaccagcagtcacccattttaaagtactgaaacgttatcagcactatactttgattagttgccggctggagactggccgtacgcatcaaatccgcgttcatttacaatctattggacatccgctggtgggcgatcccctgtacggccccaaaaagacgattaaggggcacggtcaatttttacacgccaaattattgggattcaagcaccccgtaacgggtgacttattgacctttgaagcaccactaccaccaatctttacgacaaccttggctaagcttgacaaaaccgatgggaatcattaatctaacagtaatgagcgtcctttaatccggccctgcgagactgaaaggcaaaccgttaacaataacttttcgtcgacggccgtgacaccttgtccggccgtctttctttgtcgtacgggttgctcaaaaaagcgataaccacaaattgggaggcaattatgcaaaaaaaagttgttgattcaatggcgatgaaacgggcattgacccggatcacctatgaaattatcgaacagaacaaaggcattaaaaatgtcgtcttagtgggcgttaaaacccgcggcgtctatattgcgcagcggattgcagcccaattacaacagcttgaaggtactgcgattccagttggcgagttagacatcacggcatttcgtgatgatcagccgctggatcaagcacggctttcaacggactatcagttaacgttttcggtggcggataagcgggtcattttagtcgatgatgttctatttaccggccgaacaattcgcgcggctttagacgcattaatgggtggcggtcggccccagagcattgccttggcggtgctagtcgatcgtggtcaccgcgaattgccgattcgcgctgattttattggtcgcaacattcccaccgcgcgtcaagaacgcatcaaagtgacggtcaatgaaatcgacggtcacgatggtattgaaattattaactagtacgacaaagtcaaacagatgagaagggatcgcaatggcagatcgctatttgattcttgaagatggcagcgcctatttaggtgaaggctttggctcgccagcggtttctaccggagaaatcgtcgtcaacacgagtatgacgggctatcaagaaattattactaatcaaatttatcataaccaaatcgttgcttttacgcagccaaccattgggagctatgggatcaaccacgatagctacgaatcaattttaccgaccgttaagggggtcgttgttcgggatgtcgctagcatttcgaccaaccggcagcggcgctggtcactggatcaatatttaaagcaacaaaatattcctggcatcagccatattgatacacggcacttagcgaagcaactccgagcaagtggcccgatgaaagccagtatcgtagacgttgcagatgcccatgcctttgatcaattgggtgcgaccgtgctgactaatcaacaggtggcagcggtcgcaacaccgaaaccatttcctaatccggggacggggctcaatgtcgtggtcatcgactttggcctcaaacacgggattttgcgcgaacttagtaagcgtgcttgtaacgtcacggtcttaccttatacggcaacgactgaggaaattttaaacttagatccagacggcgtcattctatcgactgggcccggcaaaccgcaggacttaccagtcagtgtgactgagatgatcaagaacattcaaaatcgggtgccactgtttgccatcggactgggccacgaactatttgcgatggccaatggcgctcaaattatgaaattatcacctgaacatcatggggctaaccacccaatccgcgaagtgattacgaaccaaattatttatgcagctcagggccaggggttcgcggtagatgcggatactgttgatcgtaataagttaatcacgacatttgttgacttgatcgatgggacgattcaaggactgcgtctacgggactttccagcgttttcagtgcaatttttcccagatggcgctcctggtccgactgaaacgcgcgatatttttgatgaatttgttgagtcgatgcaacaagcaagggggccaatctggtgaacaatcaagccttacaaaaagtgttgattattggcgctgggcataatgacattggccgagagggacaacacgacgcggcggtgacccaaatcggtgcggcaattcggcgtctgggcattgctgttgtcctcgtcgataacaatgcttactccgtggcggctgaaaatcggtttgctgacaaggtttatttggaaccactgactgtcgccgcactatccaaaattattgaaactgaacagcctgatggcctcattccttcacttggtggcgtccaaacagtcaccctaattcaagggttgattcgcaacaatgtgttaaaaaataatcacgtgaagttgctacagtgggatcaagacgtggtcgacatgatcgtcaacccagcgctgatgagcaaccggttgaaagatatgggtgaacccgtgattgcctcacaagttgtggctagcacgactgaggcgatggccgtggtgcgccacgtcggttttccagtgatcgtcaagtctgtcgcaccccgaatcgaagcgagtcgccaactatgtgaagatgaagacgaactgcaacgggcactagcaatgggattcaaagtttcagggaccaaacaatgtattgtcgaacagagtatcgtcggctataaagaactcgaatttgtagccgtccgtgatcagaaggacaccgcgctactagtcagtgggatggaaaattttgatccagttgggattcactccgctgattcaatcgtttttgccccaacgcaaacgattacggatcaagaataccaacagtttcgctcagcgacactcaagatcatgcgcaagttacacttgaccggctcttgtcacgttcaatttgcacttgatccgaccacgcaaaactattacgtgattaaagtgacaccgtactttgatcggacgatggcgttagccgcgcgggcaaccgagtatccgttagcacaagttgttggtaatctaatggtcgggataagtttggcagaggtcaaactgcccggagcctaccgtaaacaaacagctttaattgaacccgttttagatcatattgtttgccggataccagtttggccgtttaatgtgttgaagaaagttagtcatcaactagacaccgtgacggaatcgacaggctcagtgatcggtattggtcgttcaacggaagaagccttgttgaaggggttgcggtctacggacgaatctcgctatcacgtgattgctaatcgaccccagaactattcggagggtgaactgatccaacggttgattcatccgcaagctgggcgcatgctgattttacttgaagccctgaatcgtggttatcaaatcgatgaattagccgagctaaccaagattgatgctttttacttttataaactgagtcatattttagaaattgaacgagccttgcgtgaacggccgtttgacgtccacgcgctgggccgagccaaatattttggctttaccgatgaagatgcggccgctgcctggcaaacggatgtggctaaggttcgcaactttgcgttggaaaatgaaattcaaccgacttttaaggaggtcgaaccgactgccggggaatttactgagcagacgagtacttattactccacgtacgaatttgataacgaaagtcaaccgtctactggtcggcgagtcgttgtcattggcacgggtgctaaccggatcggaaccaaccatgggaacgactatttggtctcacaactgttgttctacttgaaaaaggctgattatgagcctgttttgatcaacgctaaccctaatagtgtggcgatgactccgcgattggccaaaaaacgttacgttgaacctaaacagtattcggatattttaaacgtcttagcgattgaaaagccgttgatcgtttttaccacctatcatgattaccggctgggccagaagttagtacaggatggctaccaagtgatccaaatcaacaatagcttgccgcgcgagcagatcaagaccaacgattcgcccgccgtcgaggtgattacggacggcaccgatgtgacaatttttggggtaagtgaaattattgcgggaaataatttgcgtggcaatgtccgtggtgcggtccaagtatttccgattcgtgataaggcggaaaatcaggcaattacagctttacacgctgaaatcaagcaacgagtgctcgccatgggtgcgcccgggctctatacagttcggttagcaattgctgatacggctttgcaacttgctacgattgaaccgatgagcattgctacgatggcgttaatcagtaaggccagtgggtcgagcgtgacccgcttattacttcacgtaaaattaggcgaagcactgactaaggtgatgtacgactatccggatgttaaccggctaaagccagtctatgttcaggcgaatacatttccctacaatcatttacaaatttatgatgaagtggaagccaccggtgaaccgggccatgctaccggcacggtgattgcacatggcgacacgttaaaggcggcgttgacagcgttgaatcagggaaatgaagatacggatttttagtctgagcttttgatcaatatcgctatttaaagcacagccagactaaaatctggttgtgcttttttgcgcgttcgtaggcaaaagtaggctctaactggccaatgtataggacgctttaaatagcgctttcatttatggtatgcttatctaaagacaaattaaaggcaggttagttaaattggcaaagacattatatatgatgcggcatggtgaaacactttttaatcggctgaagaagattcagggggcgtgtgactcgccgctaacccccaaaggaattgcggatgcccaacgcgtgggtgcgtattttcaggcgcaagggattacgtttgatcatgcgtacagctcaacgcaggaacgagctagtgacacgttagaattagtgaccaagcaaccttatgagcgtttaaagggtatcaaagagtggaattttggcgttttcgaaggtgagtcggaagtgttaaatccaaaaccggaccccgtgcgccgcagtcatggtgactttttctgtcagtacggtggcgaaagtgatttgcaggtacaagaccgcgttgtcaaaacgttgacggcggtgatggcacgtccggatcatcatcaggtgttggcggtcagtcacggtggggctagcttcatgtttttgcggcaatggctttcaatggacgaaattgagcggcaaggcatcgtgttacataactgtgcagtcatcaagtaccagtatgacgcgggccgcttcacatttgaaaaaatcattaatttggctgcaactgataaaaattaaaattatgtcaactagatttaagtgcgttgacactcagtctgagtttaagcattaaaaagcgctcacgactcggattcaggcatgaaagcggggtcgtgaacgctgacgcatcaagggcgccaaaaggtcgtcatggtttgtttagtagtcatattatattgaatgatttctgcaagtagcttgtgattgattggcgcatcgaaagcaacttgccataacatcttggttgttttatcaccagcagccgtgatcgcgttccgatagctatccaaagtatgtgattcaagtgcaatgttcagatgatccttggcggtactgaacccaatgataaatgtgtcgtggtcagtaaacatcggttgattccaggcgacccgtgccttgagttgtggaaaagtcgtgtgtacccagttgagcaaggtaatcagttgggcgcgatggggtgttgcacccagcttttccagatatggtgtcaaaacagctaggtcagcgtcaaggtactcagccattggcatttcctccattcattgatggcttcagtgtaccggatacccgcagagcttgcaaccaaaaataatcccgttcaatcaggtggcccacacggctgatcgaacgggattgtttttaataccgcgcatttgagcccactacgattcagtgcacggttcgtttttattagttcattaggttccaatgccagtaaggatggcgatcgactctataaatgacagctggatcagcactccgaggccgcggttgtttcaccgtgatcgttaagacttgtgaatgacgcatagacatcagttcctttcttaattaatgtctttagtttacccatttgaagcagactcaactactgcgttttcataaggctagcataagaatttcttagaattgtactggcgagggccggcactacttggacagcggttacggtgtggttgcttgaagaaaggcgcaatctgatgagcgaacaaacaccggtaaataacactgattaagctagtgactcattcgcttcaaaaaaagacctgacgagcggtgtttaagctggataacaaatgcacataacgggccttgactatatggttaggctaagtattgtgttggttgttcccaacatgactggagttcattaaaaaaacgactgagatgatcgccatcaatggtggcatgattgaccgtaatgcttagcggcatgattgttttgtcagcgtccttcttaaactggccagcctgaaaaattggaaagaaactatctagtggtttgaatgggaggggcgtgtagctactaaagtggactcctggaagacagccgatattaaccagattaggtgtttgtggtgttttcggcatgggccctggaagtgcactaaattcagcttggtctgctaaatagtgttgatagaacgtttcaaaatcggtgtcgtaagtcgtccataaattagccattgtccggtcagcgtgtaagatcgtataagacggatgtaacacgtcaaaggtcaccagttgatcgttcaaatagccgatgcgcatttcgggatgtgtggtcaacaagcgactcactaggtatagatataccgcgttgaatttaacgtggtgggctttagtccaagctagggtggcggtaatatccatatttaccgtgagactaaaaccgctgggggctatcttggtgaaatagtaaaaataagtttggcgcggccaggctgcaggattaatagcaacggcgtgcatgtttggtttagtggtggtcatttagttttccttccaatctttagggcgccgattatagccatggtcatcgaatggttgtaaatcgtgcagccatttggttttgagtgctttgagcgtggcacgcatattagtaacatcggtcgtttccttttgccacagaatttgatatgaaaagtcagcggcagtttgttgattccaatcagcctgtaacgggttggaccggtaaaagtttttattaagatttagttgataaaaggcccagcggttgtgtaaattgggcactgtgtcaatccaaattttatgattgcgttcgttggtaatttgaatgacgccgtaataagttggggcaagtttgtatttttgttgtaagcgatgcttttcgactggttgcatggttcagtcctccttagtagttgtgcgccagtattgccggccatcgacggtacgctttaagaagccgtagtcgatcaggtaacgacgcagcgtggtgtaatcaaaataaatcggtcgtaaatagtggttgagctcgtcttcattgattggccggttcatcggaatttcatcaataatccgcgttagaattgtgacgatcgtcttttgctttttgggccaccgcttcaattgtagtgggtcatgatcaaagttgaagtactgcttcaatgtttggaccgcttcgtcttcagtaatcgcaaagcggtcatcaataattccaggttgttctggcaggacaatcaaatcattgggcgtctgaccactctcaaagacggattgatagatggccaggtacaatttagcttgtttggctttttcacgaaatgtaaatttttgatgtcgaatcgtggccgccgctaattgaaattgtttagccaagtcggcatccttgatgccagtcgcaaaagcagtcagtaaattttgctgtttagtggttaaagtattgtagcgactcgctaagtgaatcagtggtgactggataccaccatggacgatcgttaagtgttgttcgatcgtggccgccgctgtagtcgtttcccagctagcatcacagtaattacaataccgggcagtggctgtttgatgccagccgcgttttaaatcatcaatcgttaaactagttaagtccatgaggctacctccaatgttactgattataagactgtttactgtatttgtaaacacaatcgatgaattaatgtttactaaaatagtaaacttacaatcatctgatatgtttaccgttacagtaaacgcttaggtttgccttgacaccaagatagctagcgcttacgcttaacgacgctgtttaaacgtgaaaggacgtgggacaatggaaacttatcaccgtgcatttggtgtttatgggattattggcgatgagcatgcgttggtcgttactaaaaagtttggtggtccctatacgaatcgctacgacttaccaggtggcagtttggccgatggtgagcccttacttgccgcgattcgccgtgagattcaagaagaaaccgggttaatcccgactgaattgacgcaattgggtatcacgagttttcggtatccctggcagttcaagcagtggcggatgaaccaacatctggcggtcttttaccgagtgacccggacaactgggcaactggctgaacatgtcgctaactttgatggtcaagattcgcatggagcatcacgggtgccgttgcatgcgttgactgaagctaatgcgtcaccgttggttttaaaagcaaaggcagtgttgttatccgggcggtttgacccaagcgatcagacctacccggactggaccgtgctggatcatctggtttattgacctgagctaatcccggaatggcgccaaaaatttcatttcaaaagcgaaaaataggtgaacactaggttggcaatgtggccgatctagtgttcacctgtttttgattcatgcgcacaactagtgcgtttaagtgggtgtgtggcttagccctaacgtgacaaaaatgatgacgttgattggttagttaatcgtcgtttcgcgtggtgggggttaaaagtaccaaaatactggtgtgcgcccgagaaaaccaacatttaaatgaatagcgagctataattcagtaacgtccgaatggtaatctttcctaggcagggttacttatcgtttaaggagggacgcaacgtgtcgacagcttatgagaacgtttgccatcttgaaagagaggggatttaaatggccgatgcaattttaacagttaaacatctgaataaaagttacggccaccagccagttttgcgtgacgttagttttgaatgcacccagggacggatcgtgggcctggtgggcgcgaatggcgctggaaaaacgacaattatgaaagcaattttagggctacttagcacggatggtgagattcaaatcgcaggtgaatcgatgcgattcgatcatcatcccatcttggcgacggtggggtcactaatcgagtatccgagtctttatccgtatatgagcggttgggacaacttgcgtttgtttgcggacgggcccgatgcccaagcgcgattggcggcggtggtgtccgcactaaacatgaccgactatatccatcaaaaagcgcgtcattattcattggggatgaaacaaaagcttggtgtcgccctggcctttttgaatcggccgcaactagtgattttggacgaaccgatgaatggtttggatccacaaggtactaaggagttacgcgattttatcttgaagcaaaaacaggtgggcgtcacgtttttgatttctagtcacattctcagtgaattgcaaaagttagcagacgatttagtcattatcgatcacggtaaaattattgagaaaacaacgatgacagcactgttaacgacgaccgatcattttgtcactgtgaaaactgatcatgacggtcaggcgaaagcggttttggtggcggccggctatcaagtagttgccgacacggttgtgaaagtccacttagcaccggaccatcaggtagcagatgtgctccatgttctgactagtcacggactgacggtcagggatgttcggcatgaggcggctgatttggaaagtacgattttaaaattactggcgacaaccagcgcctagggagtggtactgatgatgacgttatatcgacaagaactcacaaaactatttaagaagaagtccacgatttggtgtggactgatattggctaccatagcgctgatctttgcgattttggcgcggatcaagccgacgatttttcccgccaaaaccatgtttgccgctaattttgaagcgcagcagttcatcgtcttctttatggtagcagcggcggccacgatgatcacgatggaatttcaatttgggacgatcaagcacgtgttaacgcagcgttattcacgaccactcgttttggttagtaagtggctcgtgctgttaacctacagtctattgttgtatgtcggtagcagtctgtttgccatcttacttaaagtctgcttagtaaatgataaatttgcgatctttacgcgggccaagttttggcatgattggttggcgggcgttggtggtgaatttctcaatacgtggttactgctaagtctagtgctgctaattgctgctcttttcaagagttctggtgcggcagtcgcggtcggaatcatcggatactttgttctgggaatggttaatattcccatgatcgcacttattcggaagtatacgtggctcaaatggaacccactcaacatgttcaacttttcagcccagttgggattaccgacgctgagtaaaattaccaatctcacggatgtccagttgttttggggcaatcttgcatacattattttattcttagtgttaggcctgctattctttcggcggcgggaagtttgaaccgttaccgtttgaagcactgccagtaagtactaaaaatcgcgcgtccagaaattttatcttggacgcgcgattttgttggttaatgattgatcactgcgtactcttaaaaccagtttacgcgtgcggtgtcagttgttcaacaagctcagcattgggagaaacgtacaatgttttctgaccttcatagatcacaaagccaggtttggcaccattgggcttgcgaattcggcgaacttggacgtaatcgaccggaacggttgctgaatcgcgggcttttgagaagtatgcggcgagattcgcggcttctgtgagcgtttggtcactaggatcatctgaatgaatgatgacgtgtgagcctgggattttttgtgtatgcagccaatagtcactcttacgggccgttttcaatgttaactgatcgttttgccggttgtttttaccgacaaagatcggcgtcccgtcactcgcagtaaattcctggggttgactcggtttacgtgaactgcgttgctttttcttagtcttgtgttgctttaagtagccttgttgcgtcaattcttcacgaatttcggtgatgtcagcgggactagcaagctcgatttgggtctggatattgtccagataatcaatttcagcttgggtcaagctgatctgctcaccaacgaagccaacggcatttttttgcttctgataacgcgaaaaatacttctgcgcgttccgggaaggcgagagctgattagatagttgaatctttaacggcgcgttatcgtgataatagtctggtaaagtgatctcagtcatcccacgtttgacttcatgtagataggtcgttaagatttcaccttttaaccgcagctcatcggcctgcttggtgttagctaaggttttttccaactttttgagcttattacgattcttcttcaggttatttttgaccacccgaatcagattgccggcttgttgttgaactcgttcccgttgggctgcgtctgcataataaaaatcaagcagactgctcaatgagtcgaactggcgcgtggctttgccaaaatggtcaaacggtcccgcggcaaacatggtcttatgatttggtaaggtgatcaacgtcgcctgcggctgatcaaactgtgccaaaaaggccagataatggtgatcaaggtcgccaggctgatgcaagtcggcagctaactgttgtgcgctatcacggccgaatccttgataatgctgctgcaattgttttgccaacacgtcttcgttggggtaatccgtgactaaggtgtgaaaatcagtattcggtgtaaatgggtcttgtttgtcttgcttggggggctcgatgtaggtcgcgcctggtagaagtaatcggtagcgattctgatccgcaccgacatgcttgatgacgtcaatgatcttaccagtctgattatcaactaggatcacgttactatgtcgtgccatgatttcaataatcaacgtcaatgtctcggcatcaccgagttcgttacgggtcgtcacggtcaggtgcacaacccggtcgttggcgacctgcgacacatcggtcacgatggcaccttgtaaatatttacgcatcatcattgcgaagttcgtcggcacggccggattaacgtaagggatttgtgttgtctgaatccgcgggtacgtcgggtcagccgatagtagaactgggtgattcttccggttggcacgaatggtcagaatcaactcgttttggtatggctgattaatttttgaaatacggccgccaactagtgtttggcgtaattcggtgaccatggcatgggtaaataaaccatcaaaggacatgtgatcactcgctttctaagatattcgttatcactgtaaaaatacagttaaccgggtactagtataccgtttttgaacaggtaaaaacaagttagcgccccacgctgacgcataaagttaggcgtcgacgctgctagttgtcaaacaagcaattagcggatgaacgctttgaatctaaaaatgttatatgcaaaaactactttaacggtattttaaataaaaagtagtcgtaattacacactctatattgtataatacaaatgtattcattgtgggtgctgctattcgcataagtgatggttaaagcgtgctaattacgatggaatcgcactggatcagccagtttacgctgaagcgtgcttgcgtcagcaaagctcagttgagtttttttgagtctaaaaaattagcacgtttttaatcatcaggcggggtaaatcaagtcacaatggaccaatgtgaattattgttgagaggaatgaactgtcatgaagtcaagtttaacggccttagcggaaaccgctaagttgcaaactgccatgttgaaaaaaattactaaggcccaaggaatcaccgttgcggaatggcaactgctgatccagttggcagcaggggccaatacgcaagaaaaattggcgacagccatgcagcttgatacatctacattaagtcggcaactggctagcctagtcaaaaaagaacgtttgagtaaggaagcgattggtcgtgaccgccgccaacttgtttacacggtcacgccggcaggaacagcggcattgaccaagattaatgcggattatcaacagtttgaagcagaagtttttgacaaatggccacaagatgaacaaaaccttctccggattctgctcaatcggttaaacaagtcagttagccgaattctcgagccatgactttccaaacggtcgaaggtagagtataacttagttttatgctatgatatttgttattatttaaataagaagtaggtgtaagtcatgaagattgctgttgttactgacagcacgagctatttgacaccgcaagaggtcgcggacaacgatattcatgtcgtgccgattccggttattatagatggaaaagtgtatcaagaaggtgtcgacattaaaacggccgacttttacgcaaatatgaaatcatttaagtcgttcccaagtacgtcccaaccacccgtgggggaaatggtggcattctataaccgcttgggtgaacaaggttatgatgcagtcatcagtattcatcttgctagcacgatttccggtttttataatagcttgatgaacatgcgagatatggtcgataatatcaaactttatccgtatgactcccagatcacggtccgtctgatgggctatttggcaattgaagccgcgcggatggctaaagctggtcacagtgttgaagaaatcctggcacgcctagatgatctgcgggcctcgatgggcgaatactttatcgtggatgatttgcaaaatctggttcggggtggtcggttatcgaatgcgtcagccttcattggaagcgtgttacggatcaagccactgttgacttttgatgatcagagccatgaaatcgtcgcctttgagaaagttcgttcaactaagaaagctttagcgcgagttgagcacctctttgctgaagcacagtcaaaagtcgactatccgctgcgagcaattatcgttcaggggaataatttggctgccgctgaagattggaaacaaaagttacaacaaatttatccagacatgccgatcgatatcacgtactttggtccagtgattggggcccatttaggtgacaagtcattagcgttagcctggttgaaggacattgataaggcctactaaaatgaaaattattttttcagcatcaccagccaatcgggcagcggcctacgcgttacgtcaggctgtatttgttgaagagcgtggaatcagtgctgacgttgaatttgacgtcaaggatacagaccagcgtgaatacgctgttctatatttacagcctgatttaccaattacaacgttacgcttagaaccacaagctgaccacgtgatgcgatttggtcgagtctgcactcggaaggcctatcgcggtcatggttggggtcgtcaattattgacagcggctgaggagtgggccacgcaacgtggttttactcatggcgagattcatggtgaactcactgcccagcgcttttacgaactgtgtggttatcgagttacggccggcccgtatgatgaagatggggcccccgttgtgattatgcataagcaattattatgattcaactcgtagcgttggcattttgccagcgcttttttagggttttgccgttgactaacggggacaaaacacggaaaatggactaaattaaacaagtagtggaggagtggcgcaatgattcaaaaaacgagggccgaacttaaaaccgaaattaagcaactctttaaggggcgttggaaagatgccatcttattatgtattattattagcttattaacgattttcggggtgatggccaattattcagatcgcgtgtcgtcgggcagttccacgactgacgacacgacttttaagcagttggggaccttgactggttctgatatatcgttgattttagctgtaatagctgggtttttactggttcaagttggtgtctggctggtcgttcaaatctttcggattgggacgagttatgcgatgttggactgggtccgacaaccagaacgccagatccatccggtcagtgactcaacggtcgggttcacgaaacgttatgggtgggcactggtcggtctgattatttataaaactgtgcttatcttcctatggagcctgctattggtggttccgggtattattaaggcgtacgcttattcacagactttttatgcgtataaggacttgttagctgcaacacctgctggtcaagcacggccacgctatcgtgatgcggtcacccgtagccgtcagttgatgcacgggcacaagtggcagttattcgtgttgcatttaagctttttgggctgggaacttctcagtatcttaacggctggaatcggccagttatggttggtaccatatatttatggtgtacttgccaactattatgataatttacaagcaattaattaatgaacgtcgatattaaaaatcgacacaaataatattgtttcttttattaagcattaagacaagcccgccaaaatatggtaaactggcggaagcaagaaaggaagtgcgatagttaatgcctgaacaaaaacagacgcgcatgtcacgcttaaaagcgcgagaggctacgggtggcaagcggggacgtaaggcgagttcacagggatcccatgcacctaaggaaccgaacgatccaaagaaaccgcaagcacctaagtcaccgcaaaaaaaacatcacgtttcgttatggctattggctttaatcgtgattgcgctcggtggaacagtcgtttactttgtcaaagcagctagcaaccaagacttagtcgaaaccacgagttcctcaagtagcagcaaggcgcgcaaaaaatcatcttcgaagaaatcatctagctcatcgaagaaaaagaagaagcattcaagctcaagtagtgaaagtactagcgaaacgacggctgcaagtacggatgccgacactagcacagatgggacagaaacgacgggtgcgtatagcagttcaactgccactaatacgaccgctggcaatacgacagctagttcgcatagcacgacgaccagtcatcaaacgaccacaagtagcgccacctctcacagtacttcaacagccagcagctcatcaaagagtgaaacggcgtcaactagtactgaaaagagtagcagtagtagtcatgccggctcgacatacgataatttaaatgacgcgaaggactatggtgaaaactcaatcagtgggaactataaggtcacgacggatagcaatggctcgtaccacgtgtcaaaggctgattaattttaattgcaatcatgatgtttgagctgggcttttgcgaccgttttcggtataatagccttaaaatgattgtaagaagtgagtgataaaattgaatcacaattatgtggaagttaagtatccagccatttttcgtgatgaaggcacctactgggatgtccgttttccagacgttcctgccgcccagacctttggggcgagtgtccaagttgctgcggacaatgcggcgaacgcgttggctattgcgctctttgaacaatcactcccgccggcgtcggatccgcagtactggcggttggcttcaacggaatttgttgtttggatcacgatggcggatgtccagtttggtccgggcgctgatacaccggaaccaatgaactaatgcgtataaaaggcaaacgggtcggcacctaattggtgtttcggacccgttttcttatttcatgaaagaagttgagaaaccttgccaaaccagccactaatctttgatacggccattgcgaaggataagccagaaaatatccggcacccgcacaatgcctgtcctttttgcgatccgggccagttgactgatattatcgcgcaagatgcagatcgtatctggctattgaataaatttccgaccttgcaagctacctggcaaacgatcgtgatcgaggcggcccgccatgatggcgatattgctacttactcatccgcacaaaaccgcgctgtcttcgcgtttgctctgaagcactggcaagccacaattgcgagtggtcggttcaaatcggtgttgtgctataaaaattttggcccacactcgggtggaagtttacggcatccacacatgcaaatcgttggtttaatggccgccgatggttacgctaacgtgacagcagccaatttgactgggtattcagtgttggcggtcgatcaggtccaagtaactgtttctgatcggcctatcatgggatttgtcgaaatcaacgttgctgctccagctaccgcgattgcaccgttagccgatgctgtgcaacaggtcgtccagtatacgctaaatacgtattttcatgggcagtgtgatagttataacctatttttctatccgcgggatgaccagattgttgccaaagtggtcccactatttaatgtctcaccatactatatcggctatcggctggcacaagcagatacgccaaagcgaatgcgcgccatcgctgaggaaattcggcaacagtttgaacgatcgaatctggctcactcaaactagctaataggccgaacagccccaaacgacggaaaaggcccccaggaatcctttcgattctcgggggccttcactttaccgttcacgtgcatgattaatggtgacgcaattgcgattagtatggggtggtcaaaagcaaccggtcaagtcgtgggggaacatctctcagcagtaatgtcagtgattagttatggttttcaatgctggacggcccttcgccgggcatagccgtaaagactcagcaaggcgatcaatgtcagcaggccacagctaccgaaagtaacggcaaaccccacccgttgaattaaccagccaatcagaggaaaagcgctgatcatcgctaaactaaagaccatgctggcaacgctcagtagggttgcccgttgcccgtttggaatcagctgattgtagtagttggaaaacagtggctcaatcagtgccatcaaactattgatgactaaatagatgaggaccagtagaccgatggcgtgactaaatgcgctaagtagggccataatcatgcttaggcagagcccgtaaagtaactgatgttgggtttgatgtcgctgtagccaaggtgtcagttggatcgccacaatattgagggccatactcgcaatgaggatcgtcgtgattagtctcccactaaagtgctgagcagtcatcactgtttgaaagtaatagtaataagttgttccgagtgccgaaaagagcgcgtcaaagatcattaaaagccgtaaacgacgttgggtcactaacagatgcgcggcagcacgaaggatcgttcgtaacgacggttgtgttgaatgagtcttggtcaactggcgctggggaacgtgcagcccactgattgccagaatggcaatgagagctgccgctaaatagacccagtacgtcactgaaagatgctggggcattaaccagccagccaacacgacacccaacgtatcggccacttcgattgtcgtgttgagaatcgtcgtgacgcgtggataatgttgcgtggcctgagtattgacgagactgtcatattgtgccgcttcaatcgtaccagactggagattatacgcccaggcttgtaggatgaatgctaggagcaaccagccgagactgtgagccgtcaacatgatgagggcgtgtccgatagccatcaggcggctaatgatcaggacaggccgataaccaaagcggtcggcgataacgccggagggaacttccgagagaaaactagtcagatgaaaaacactttcacatagccctatctcaacgagtgataggccttgttgctgtaaaaagatcacccagagggtgttgataccaaaaaaagcacaggccgcataaccataactgagggttaggttacgacgggtaagtggtgataacatattggactcctttagcggccacgagcggacaaaaaaagacgacccattgtcgtcagctgctcgtgacttcgcaatggctagtggtcattcaacttggaaaaagcgcagactgcgcccctgacataaccataactgcaaaaattgtgcgcttaaggttaatccaagctgaaaatttagccaacacgtcattcaccactttctaataatctcattttcttatcataacaataccatatcaatttctgactgacaactgataccgataagtttgaatgcctgatattagttgtgattgtggtatgatgttaagtaaatgaacaaaagtggaggaataattatgcaaaatttgattccaggagacatgttggaagttaatcaaaaacttaagtgggaattagacgcgggaatgactgcggatgaaagtagcgtgattaatgaagctgtgctggcgggaactcagtacttcgtcgatgaggccttagaaggtagttactggacagttaagtgggctgcagatggtcagactatcgaactctatgggacaactggcaccgtcgttggccgcattaaaccgttgtctgccacgttagaaaatgattttcgacaggattcacaaggcttatttatccggattgaaaaagaggtcgcagtgattgttcgtgataactaagccgaattgagtaatgaggtgattagcatgtttgatcaagatgaagaacggtttgcaacgctagggttagccgccaagctaccgagcgcggtgattgatggcatttgggatattattgatcaaaatctaaagggggtcgttcgcctgccacgggtcctgcaatttgccctgatcgcacgtaatgggcaagtcaccgtggcttttgatgcgcagcacgatgccatcatggaattcgatttaccagtcaattaccaacgggagtttcccgagacggtggcagtcttagacgatggtcagtatcagaccatgatgttgatggacgaactctccgtctgaacgcagcgattattcaatgagctgaatacgaggaaactcgtcacttcaggccggcgaataatcgctttttgattggtggtctttaactgggcagatgcgccttaaatttgtataattaaatagatggtgtgaggtgtggttttgcgatgttaggttccggttgctaatcaagggggccgcattgttcacgtaattctcacgccgggatcagagaaaggtgtgtgtctaatggcgaaaacagcagtgtgcattgtcgatcaacaacgttaccaagttgtggacggtatgcgattagaagaattggaaactagtttgcggcaaatgattttaaaagattttccgcaggcccataatagcagtttcatttgtagtgagcatctcgtacattatcgcttagcaaagatggatgcgatgatcgagaacgattatcaacaaaatgataaggtcaatgcgcaattatctaagattctcgctaaccacacgtatcgggtcgtcgatgttaatagcgagctggaaagttcattgacatttggtcaacgggtcgcggatggggtcgcacggttcggggggagctgggcgtttatcatttcgtttgtcgtggtgatgctcgtgtggatgttgctcaacgtcttaccaatttttagccatcattttgacccttatccctttattttattaaatttatttttaagcatggtcgcagcaatccaggcaccattgatcatgatgagtcagaatcgggcagctgagtatgatcggctacaagcggccaatgattttaaagtgaactcgatgtctgaagaggagatccgggtcctgcactcgaaagtcgatcatttaattcaacaagatgaaccaaacatgcttgaaatccagaaaatgcaaacacaaatgttaggtgagattcaagcacaagtcaacgaattgcgacgattgcagccgcggcgacgtcgcaatcaaagttaaggtggctgattgagtagttaaccaaaaaaactgagcgcctggaattttcacattccgacgctcagttttttggttaaccgtgaccgcacaacggcattcgtcaagattgccaacggtcagtggcactatttatatttactttctaaagcactcatccagtaacccagcgcgattcccacagcaagagctatggcgctgaataggtaggtactgagtgtggcatgcgcatatgagatactctcagccgcatatggattcggaatcaatatcagcatggtactagccagaacaatacctaatatgaaatggtagactcgggaatgaaacttcactaataggtgatccatcaacttcgagaacaacgccatcgccaggatgccaccgatggcgatcggtaagtagacgcctacgatatctagtcttttaaagcccgtcagcatgggtgtgaaaaggcctaaaataagtagcaagttggaaggactcagtcccggcactaagacgcccaaggtaatcagcgctcccgcaacgatgaaaccaccaaagttagcgggcaaggtcccaaacagctcactcataaagtaaagtaggccggcactaataatgaaggtcccgaagaaccaaactccgtcgagccagtcacgtggcgcccgactagttgcagttttcatcagggctggtaaggtcccgatgatggcccctgcgaacccccagagaacgatcacctgagcgtgtgcaagtaagtattccagcggggcggaaagcagggcaatcccgacgatgcctcctaatccgacggggacaaagtaccagaagtcccgtttaaagttacgacggaagtgggccataaagcccaacagtcgctcgtaaataccgagaatggcggcgagaaccccacctgagacgcccggtaaaataaaaccgagggcgatgacgacgcccttgaagaatcttttccagaaagtatcagttgttttagttggcataagtaaactcctttagctctaatgactggtattccagtaataatcaaagtaattaaagataccagaaaaaatcctgcatggcaattaaaacccgttttttacggttgccttcggtggcaaaagttgcacggcggattattttatcataaaatgaatggacgtgaaaaaatctgtatttttatgaaaattattatcaaattggattaaaggaaagttgaggtcatatggaaaatcagcaacttgcccgtaaactaaaacgccgtcacgtgcagatgattgcgcttggtggcgcgattggaaccgggctctttttaggctccggttcagcaatcaaacaggcggggccgtcgatcttgttggcttatgccattggcggtttcttctgttacttgatgatgcgagcactgggcgagctattattgtcggatacgcgtttacattcgtttctagaattcattaatcgatatttaggtaaacgtttcgagtttgccattgggtggacctattggctctgctggatcagtttagctatggctgacttgactgcgagtggtatctacattcgttactggtttccgtggatcccgcagtgggtgacacccttaataattattttgattttattagtattcaatatgctctccgtcagtgcgtttggcgaattagaatattggttttcgatgattaaagtggtggctatcattgctttgatcgtgacgggggctatcttgattggttcatcggcccatgtcggtgggcaaacggtctcggtgacaaatttggtcagtcacgggggcttcttcccaacaggcgtccagggcttcttgatgtcgttttcgctcgttatctttgcgtttacgggcatcgaaatggtcggaattacagctggggaagccgaaaacccagaaaaagaattaccacgggccatcaatagcttacccattcgaatctcattcttctacgtgggcgctttgttcgtgatcatggcaatttatccttggaatcagatcacgaccagtcagtcaccctttgtgcaagttttcagcgacgttgggatcaaagccgcggccagcattatcaacttcgtggttctgaccgcggcgctctcggcttgtaatagtgccatcttcagtacgagtcgaacactatttacacttgcgcacggtgacaacgcgccgaaatggatgggaaaggtcaatcgttacaacgttcccgcccgctcattgttattctcatcattgatcttactggtgatcgtggcgttgaattacgtgattccaagtaccgtcttcacgttgatctctaacgtggcaacaaccaacttcatcattgtttggtgtgccttgttggtgtgccattacgtttacaaacgaaccactgacagtacgcataatccgtttaagctgcccctgttccctgttaccaacatcgcgaccttggccttctttatcgcggtgacggtcgtcttgtgctttgatcaagtcaaccgttgggcagtcatcggttcagtcgtttggttcgtcattttattagtcatcgaacgaagtatgcatcgcaccgtttaaaaacgataattgtaatcaccggtcatcagtcttggtaaacccaattagtttaccagctaatggccggcgatttttgtaaggtgcaataatcacccctaatagtgcattctattctataattaagtcaaacatcatggacgttgctgacgaccacgtatcagccgtgacatgattattggggaggggaacagtatgaattatcgcaacttgctcgtattaccacttgccgtcttgttggtcggctgttcatcaccaacacaccaggattccaagtcaactagtcagacgaccacgagtgccaaggcaacggttagcagcacccaaaagaaggctaaggctaccagtagtactagtagtcggcctcaaaccgcagccacgcgctcgtctagaacagcgcgtgagcgggccgccagcgccgctaacaagtcggtcacccagcccacggctacgacccggctggcagcattgaatcaacaattgactaagacgttgggaaagcaggcgctcgttccacaagtcgatgggttaactagtggcagttcgaagttgaacatgcgctattcaggtgacgcagccaattacaccatcaattatagtgtgggacaacaggcccagccattcaacgcggcggccgtggtggatgaaacggcttatgcgactgtcactaagacgacctatgcgacaactaatgccgcggcccagcaggtgggttatcgtgataataaatccacagcagggctgccaaccgtcgatctcggtcatcaaatcaccgcgcatatcgacgcgggtgctggtcaacgatatatcatgtggaatgagggccgctggtcgttgaccgtgcatgcgaacatgatgcacgaagatgcgggcgtcgcgttagctaaacaggccgtcgctactttcgagcaagtctacttaccagtaccacagtcggtcggcgccatcacttttgacgcgatttcgtcaggctctggacctttagaccaagttatccaatggcaagctggtaaagtggtttatcaagtcaaggctcaagagatggcaacggctatcaaaatggctgccagtatgcaataatcaataactagtttctacgctcgttaaattaagcagtgagctgacaaacaaaagtagcagcgtaatcagccagagatggctagtacactgctacttttgttggttaggcgttattttcatctcattcgactgccagctggtgaatcgcgactattgatcagtcggagattggcgcagttgttgttcgatgggctgcgtcgcttttaagataagtgcttggtcactcagcgagatgatacggtggtgggtgatcacggcagaatcagttaatgcttggtaaacagccgctgcaaccacccaacaagtatcggtgtcgtaatcacgcgcatgcagtaaatcataaccgtcactcatatctaggtagacttgaaagccgatacctagccgcgcctgtaatcgtttcgcataacgttgataaagcgcgcgattggcctcagggtcgggggtcggcccgataatccgttcaccgagttgtaagtttggcactaagcgcacttgcatgtcggtgcctcctttgcgttgaaaattataatcctattttagtataatccattcatgaaataaaggcactaatcagccgcagttaaggtgattagtgcctttatacgcattcagttaagctaagagacgtaatagtagccacccggcgacgccaattaacagggcgtaacccagacctggtagtagtgttttacgtaagatggcgccttcttgaccactcaggccaacgactgagctgacagcaacgatattatggacacagaccatattgccggctgccgcaccgacgagctgggctgccaagataatcgtgggcttcaaactcgcattggccacaatatcagcttgaatttgcgcaaaagtcagtgtcgagaccgtggtactaccagttacgaacgcccctaattggcctaggaatggtgccatgatgacccaaacaccagctagataggtcgcgataaacttggcgatatacattggcatgctgggtaggttggcctgattcaagccagaattagtgaagacttgaaccatgatcagggtaacaccgagggcaattgcggtgttgcccatcgaacggatgaccgaatgggcagttggtagtaagggctttaatgaacgggcttgtactagtaacccaatgatggccgctaccgccaagattgtccctggcgaatagaggagttcccaatcagagttgatttgactataacctagaatgtgggaccacgataagttagcataacgggtcaaaacctgtttgattggtgtcacgacccggctagcgagtaatagcacaacgaccaacaggtaaggaaaccaagcggtcatcaggttcatcggactaggcgcaggcgtctgggctgccatcccgttcgtccgccatggcgtcaactggctcgactttggtaacaaccagtgcaatcggatcgtgatgatggcaataaccagcgttcccagcggtgcgatgattgaaacaaattcataacccactagccaagcactgaggagtgccagtagactgtaaacgaaaccgatcactaacgcccaaggtaagacggaaagccagcttttcaagcggtgtgccttagggccaaaccacatgatgagaattaaaatgagcaccgctggcattagcgcaccaacgaataaatcgagttgcgtgatgcgcaggccaatcaagttcaagacggatgctttttcggtcacattactcagtcccacggtcaatggtgttccaacggcgccgaacgctgcgggggtcgagtcagccactaaggccaagataacggccgccatgggtgaaaagccgagtgcaattagtaatggtgcagtgaccatcgctggggtcccgaagcccgagacaccttcaatcaagcccccaaataggaaggctaccaaaacggtttgtagccgcatgtcagcagacaaactttgaaagccctggttaatccggtcgattgcaccagtggcacgcaaacagttgagcatgagtaaggcgccaaataagatccataagatggggagggctttatgaatcgcctgcaaaattgaggcggtgaggaccgttggactaatctgccagaaaaagtagccggtaataatcaccaccagagcgctaatggtcattccacgggtcgcggataaattcaggcccccgagaagaatcagtggcaggatgattgcagcacttgcaataaaaatcatggtcgtaaagcctccttagatggtgcctagtcgtttgactgtgctcgtttgaaataatactgaccgtagagcgtgaccagcgtaacaatcagagaaatcgccgttaagggccaaaccatccctactagataagtgttcttcaaagcggttgaagctggattgaagaaattgagcaagtttaattgtcgaaaactgctaacaattactaagaggccgaagaaacacagttgacaaagcaggcccccataagtggaaaagcgatatttatgaataattgcgagatctggatcatcaacctcagtggcataaacgctagtattaatggctgggttttcaaaaccgacgtacaacgagatcaggagcaaaccggcaacatataaaacgggttgggccgtggcaactaacaaatggccgacaatcaagccaccgcgcgcaatcgtggtggcacgatgtaagtcatgccgtcccaataataaatatagtggccggccagtctcaaagcccaacaaatagatggcgaagaccaggtacatccccattttgccaaagacaaagacaccgaagaaactattaaacagtaggacaaaactcagtaaaaagccccgatcaacgatccgtagtttgttagccggcatggattgccaatcagcagctagttctagatttagtagaacaatggccacgacgataattcctaatacggccggtagtgcgatttgtaggctcgccttacgaagtaacgtcagtaaaccaatcgcagcaaagaagacgataaagaccacaacgcgccacggcttgatgggacgtacttgggccatttcgtgttgatcgtaaaatgcgagcgaaaactgactcaacaaacggccagcaggcaacgcaatgataaatagtagcgccagtaggataaaggcaagccggtaaccccagttcagcgcaaaatctagcacaaagagaatgccgagaactaagaaaattaaccagtaaattttctttaacttaaaatccgtctgcgcggacaagtgtaacttgatcgtcaagtaatagggccagatgttggcggatgtatatcctaagaatagggccccagccagcacggccacgatgttagccgtcaaactgaacaacaagctaccaagcgcacccagccagaggcaaatgagcaaataactactagccttgaggtttaggtgtttagtcccaaagacgctcgccgcccgggccacgtagaagaccacgatcgcagctaagtaattcgcgttgtgggtctgctgatacttaaagagaattagaacgtagggcaggacaataccgacgttagccaagaagttaagcgtcgcgacagagaagtccaacccagagtttcgtagacgagtcaaagataatcacaaccatttcgttagtttttctaggcctagtataccaattaatgcacataaatggtgttaaaaggtatgtttaggcacttttacctgtaaattgagcgccgggatacgtagatatatttaagccaatcgtataatcttactttaaccaaataaataaaaaaacaattcttaccaggaacgtcacacttctttcatatttattcacaaaaaacataaaattcttatttatcattatccacataatttaaataatgaatggggtcatgtagatatgatttatgcacaaatattagccggcggtaaaggaactcgtatgggcaatgttccgatgccaaagcaattcttgctgcttgccgacaaaccaatcttaatccataccatcgaaaaatttacacttgaaagtcgctttgatgccattttggtcgtctgtccagccgattgggtcagccatactgaagatatcattaaaaagtacatcaccgatgagcgcgttcacgttgtcgttggtggggccgaccgtaacgaaacactaatgagtggaatcaactatatccaagatcattacgggattcaagacgatgatgttgttgttacccatgacgcagttcggccgttcatcacacaacgtatcattaacgacaatatcgtcgccgttttagaaaataaagcagtcgatactgtcgttccagcaatcgatacaatcgtccgcggtgctaatgatcaggtgaccgatattccggttcgttccgaaatgtatcagggtcaaacccctcaaagttttcacatcaaaacattgatcgactcatataacgcactcagctccgaacaaaaggcatcactgtctgattcatgcaaaatctgctcgctggctggtcaaaaggttagtttagtacgtggtgaaaattataattttaaaatcacaacgccgtttgacttacgcgttgcatcagcattagtagaaaagaggtcataagatgttaaatcaagtttatcgcttagtaagtccccgtcaatttgaagttgaaacggtcgccgaagaggtagacgccgatgatttgatcgtgcggccaaagttcttatcgatctgccatgctgacacgcgctatttctttggccaacgctcccaagccgcattacgtgctaagctaccaatggcgctgatccatgaggccgtgggtgaggtcgtttatgatcctcgaaatgagtataagcctgggacgctcgtcgcaatggtgcctaatacgcccgttaagaaggattcaatcattcaggaaaattatttaccttcttcaagattccgttcaagcggctacgacggctttatgcaagaatatgtttgtttacgacgcgaccgcgcaatcaccgtgccaagcgacttcgatccacacatggccgcattcattgagatggtctcggtcggcgttcaagcattaaccaagcttgaaagtaccatggatgaggaccaacgggttatcggtatttggggcgatggtaacttgggctatattacagcgactctggttaagcaaatttttccagacagtcagttgctggtattcggtcggcatcaatccaagttagattatttctcatttgcagacaaaacttacctggtcgatgacattccagccgatgtcaaggtcagtcaggccttagaatgtaccggcggccagggcagtgaagcagcgattcaacaaattatccagcatattcaaccgatgggaactgccattctaatgggcgtctctgaaaacccagtcggtatcgatacccggtctgtccttgcagaaggattgacgttacgaggcgtcagtcgcagcagccgtgaagattttaaacgtgccgttgatattttatcctccagtccagtcactcgcgaacggttgcaaaatttagttggctacgttcaaaaagtgagttccattcaagacattaccaacttctttgatagtgcacttactaattattggggcaaggaggtgatggaatgggacgtctaaagacggtaaagctcgtgttactacacacgagctttaatttattctatcaatttttttataaagtgtttggcccgaagaagggacggatcacacttgccacgatgcgcagcggtcaattaaacgacaatttggcagctcttgagcagggcctaaaaactgccaacgttaaaccggttactgtgttttgctatcattatgaccgcaccctggctggaaaagtgggcttcttgctcgcctccattaaagcgctatacgtgattgccagggctgacgtctttgtgatcgatgattacttttttccactttacgcaattcacaaacatgatgataatcaagtggtacaattatggcatgccattggttcattgaaaaagtttggcctcagcttaccgaatgctgatcagagcgtcatgaagccgcacacaaattatgattgggtcttgatcaatgcaaagtctgatcagcctgcttatctagatgccatggctatcaatcaagatcacgtcattgccactggatcgccaatggtcgactcgttgcttaatcaacaaccacaacaaccgcggctcgccgcccatcgtattctatactcaccgacttatcggcaaggtgtccagggtaagcagcaagtcatgggatatgtcaacaacatgattgcggcctgtcagcagctgaccggtccatgggaactgtacatttcgctgcatccgtacttaaaactgtcagcgatgacgctaccatccaacgtgcatatcttccaagatgctgagcgggttaagacgctgatgccaacgattgatttatttataaccgattattcgtcattatcattgacgtttagttattttgaacgaccaatcattctgtatacgcctgattatgatgattatatgcaaacatccggattctatgtcgattactatcaatatttgcaagcaccgcacttcagcaaagcggcgcgagttgtcgattttattaatcaggaagttgatcatatggatctatcttatgtacatgaattaaagcaaaagacatttccacatcaagatgggcataataccgaacgggtcgttcaatttgttgaaaaattagcagggggagaacattagatgatacaacgactaaaacgaatcgcgcgtcgcatcgtatacggacggaatcaaccgcaatatactcgtaatcgtgaactggttgaggacgcacaaacgaccaaggaagacgttgattttctaaatacattgcgaattgagaaagatgccgaatcattgatcaaacgtcaagtgactaagctggaattcaacagttcttacttagtgattgagggaatggcgtggtttgaaaagtatcccgaacaagatactgaacgaattattaaaagcttaattttgactagcaagacgaatgaagaattagaaattccgttgatcaacgttcgtggtcaaaacgctgattttccatatgccgggtatcatggtgacatcaacttttcgacactcagtgagggtaaaccgctaacgccaggcacttatgaaatcaagatacaattaaaacagtatctaggtaatggttggattatcagactaacctccattggtcaagtggtggaaacacagcaagacttaaattatacgactaaaatgacaagctattcagcgaaaagcaataagtcatacagtctaatttttcggtataatttagccgcccaagccttaaaggtcacttcatataaactgagtgatgtcaacccgcttgaaaatgagtttactgaagatgtcgggttagatagtgtagcgatgcgtgccattaaacgccgggcgctaaaactctggtatcggtggtactgccttcaaccgattcataagaaacaaatttcatttgtttccgatagtcgggtgacaatctctggtaatttcgagtttatctaccaggaattaaaacgtcgcaatactgattttaagatttcattctatttgaagccaagtattaaaaccaaaaaatcctggaaagaggttcgaacgttggctaaagcgttggctactagtcgctatgtgattttagatgacttttacccactagtttacccattgcatatccgggaaaatgcggatttgattcaggtatggcatgcggtcggtgcctttaaaacatttggttacagccggttggggatgcctggtggtcctaaggttcaatcgttaaatcatcgcaattacaccaaagccttggtttcttcgcataacatcgcggataaatacgcggaaggatttggaattgcgccggataagattcagccgctaggaattccgcggacggatatctttttcgatgagcccaagaaacaggcaatccgggaacggctcgcgcaagatttgccattcatcaagggcaaaaaagtcattctctttgccccaacatttcgtggcaatggtcagcaatcagcatactatccctttgaaatgttgaattttagagcaatctacgaagcgttacacgaagattacgtctttttactgaagattcatccgtttgtgcaaaacaaaccaacgttaccatatgaatattcggacttctattacgatgtttctgattatcgtgagatcaacgatttattactcgttgctgaccaattaatcactgactactcatcagtttgtttcgaatacgcactactgaaccggccaatgattttctttgcgccggacttagcggattacatgcaatcccggagtttttacttcaactactttgattttattcctggtagtttagcggaaaacacgggtgagttgatcagccagttgcaacatccacaagttgaccaagctaaattggacggctttgtgaacttcttctttgatgatctagatggtaagtctacagctcgtttcgtggatgcgcttgaaaatgacttcgaggatccgaacgcagctgagttagaaaataacgacggtctcgccattagtgaagatggtaagattatccctgattggggtaaaaaggctaaataatatgttaagataaagcagtcagtcacatcatcagcgcatttacagcgttgattgtgtgaccgactgtttttgctaggaaactataggaggaattgatcatgtcacaaattacgacacggcggctcaccactgctgacgtgaacaaactacaacaaatcagtattgaaacctttaaggacacgtttggtgtacaaaacacctctgaaaatatggccgcatacttacaagatgcatataacttgcccaagttaacccatgaattagcggaatccgaatcacaattttattttgttgaacgagccggtgaatcattaggatacttgaaattaaacaccggtgcggcacaatcagaagcaatgggtccagacactttagaagtcgaacgaatctatatccgaaaagctttccaacaccaagggctcggtaatcaatttatgcaacaagcgattcaaattgctaaagctgatcataagcagaagatctggcttggtgtttgggagcataacgaacccgcgaagggcttctatgcgaagtggggctttgaacaattcagtgctcacgattttgtgatgggggacgatcgccaaaccgatttgctcatgatcaagtcactgacccaagactaagggcagtaaaggcttttgagtgaactgcttttacaagtttagaattagtcgctgtctgtggcgaccagcagattacaaatttatttaccccttgttttttacgggcaaggggcttatgctgataatcaatcgcacgcgattgaaaggagcatccgcatgacaccagaaattgaccttgctaatcaactttgttttagcatatacaatgccaatcggttatttaacaaattttatgtcgaagcgttaacaccattcaaactgacttacgcacagtatctcgtactaatggcattgtgggaacacgacgaccagtcattacacgagttaggtcaggttctgcgcttaagcagcaacaccttgacaccgcttttgcgacgcatggaagacgcagggtggttgcagcgcgagcgaccggcaacagatcggcgccagttactcattcatctcacgacgcagggtaagcaacaacaagcaccaatcgaagccgcgattgcaacttgtatcagtcgctaccacctgactgtcgatgaatatcaacaagcactggccctgaaccagaagattattaccgcattatcacaggatttggcctaaacgggcctttttattgaccgtttcaatcgcgtgcgactgaaatataattttaggaggaatctctaatggcagattatgacacaatttttatcggtagcgggcacgcaacgtggcatgcggcagtggccctagcacatgcgcaacataaggtagcaatcattgaagaagataccatcgccgggacgtgcactaactttggctgtgatgctaagattctgttagacggtcccttcgagctgactgaacaactcaaacaatatcaagggattggcgtcaacacaacgcccaccatcgattggtcacagttgatggcctataagcaacaagtcattcaacctttatcggtacaaatgacggccgtcttcaaacaattggggattacaattattaccggtcatggtgagctgactgatacccacactgttcaagtagcggacagcacgtatacagcggataccatcgtcatcgggaccggacaacgaccagccaagctggctatcccgggtgcggacctgatgcatgacagtcgtgattttcttgacctaccaaccatgcctaaacggttgaccttaattggtgctggaatcatctcgctggaatttgccaacatggccgtgttactagggtcagaagtgcatattattgagtttgccgatcgagcactacccgcattttattcagaacacgttaaaaagatgatcacacatctacaggcagccggggtgcacttccactttggcgaagcgcttagccaagtgactaaaacggccacagggttaatggcaaccactgccagcggcctgaagattgagagtgatgatatcattgcggccactggtcggattccaaacatcgaacacttaggactaacgaaagttggcattaagaccgaccggcacggcattatcgtcgacgaccatttgcggacaagcattccaaacatttacgccagtggtgatgtcattagtaagactttgccgaagctaaccccgaccacgatctttgaatctaactacattgccggccaacttcttggtagcactgccgccattgattatccggtcattccagcggtcgtctttacgctaccaagaatcgcccaagtcggtgtcagtgtcgaggctgcccagcatgatactgaacactttcacgttcaagcgctgccatatggtaaactgttagcctttcagtatcaaaacgaggtcgacgctgatttacaattagtctttgaccaagagaattacctcgtcggtgcctcaatctatggtaatggcgcaccagacctgattaacttactgaccatgattattgctgatcacgtctccgccacaacgttaagtcagaagatttttgcctttccaagtgcttcagtggggatcattgatatgttgacaccactactacaccatgactagttattaaaccaactaactaatttaaagatactgggtatgttgctgactacccagtatctttttgtcgtttcagattaactcactgactgaggacacctaataatttagcgagcaggaccatggcgccaccgagtgaccaaagaaagataccccagcttagccagctagcttgaacaaacaggctgatcagaataaaccaattcattccaaatagccaccagccgagcgtccttttcaaaatcgttgaccaagtatagggtgccgcataccgatttagcggcttaagcgcgattaataaggccggaataagcgcactctcaagcatcgccaaataatggtgcggatcactcgtataagcgattgctcccagcagaccatagcgactcggaatcgtcgttaatagggcccgttgcgcggtgtaaatgacgatcggttgtccaatcaataatgcgagtaatccccaagttgcttttttcatcaatctccgccgtccttattagttaataatactatcctaccaatttatgtacggcactaactaccgaataagtgtaaatttctcgtgaaaaagacgtaaagaataggcatgattcgttcactatgttttcataacataaataataggcattttaaaaaagtatgcgtataataccttcttaataagtttcgatgggggagttatgatgataataatcagagttgcaattatgatttcagttgttttttacttgtattttattattaacttattgttgatcaatcactatcgggagcccattcaaagctatgaaaaagggcccacaccctatgaattatttttggtcattccggtgctcaatgaagaacacgtgatctcgcgcacgattacgcaacttactgaatcactcgaacaattaccaccaaccgttcacgcccagatcattgccgtcgatgacgattcgactgatcacagtctactgttgttaactcagtcatcgtcgcgcttcttacaaatcctacaccgcacgggcaaccagcgtgcaggtaagggggccgtcctcaacactgccgtccagtatattcataagacgttagcgctaaaatctgatccgcaacggacgatcgtgggggtcctagatgcggacgcattcatgaatactgctgatttgacgcgggtactggcgcactttgaacaagaaccacagttggccatgattcaaacgagcgtgaatatctacaatcagcccaactggctgactaagatgcagaattttgaattcatgggggttaataatgctacccaacagttacgcaatcgccttggtcagggaattgcgtcaggtaatggtcagttcgtccggctagatttagcgttacagaatccgtgggggaatagcttacttgaagatctcgaattcactttgcggacctggctgctaggtggtacgcgaacggcctttgatcataccttggttgtccagcaagaggccgttgaacaactacgcccattttttcgtcaacgggtacgctggtgtcagggtgccgttcaatgcatgcgttatctaccagcactttggcgttcgggacgtctgaaccattttcaaaaattggacacgaccttttggattttgatgcctatcagtggttgtatcgtgccactgaccagtctaatcacgttagtcgtgcttgtgagccgtagcctacaacattggcaagttgggtggcatcacttggctatcgggacattactagtgatcgctttttcggcttgtttggtattagcagcactgtatcaacgcaactgtgccatcgtgaaacaacccgttggattcatgaatgccctcaaacaaagtttaagctttcaggcattcttattgatcattagcctgacgccatacgtcgccatttatcggcagttacgcggtcaaacagcgtgggctaaaacgcgccatggtgttacgacccgcgttgcaaaatatccagatactggcttaaaacgctcatattaagatgaaggtgcatgccgatgaagtggtgctataagatatttaaaattaccgttctcacgattgcagctgccttactcgggtggatgattgtcgccaactggcaagtcaacctgaaattacacctcgcaatcagtgcttggataggcgctggtttattcgtattgttcattggtgccacgattggccttggcagctggtggttgagccgccaccaaactagctggttagttgcagcactgatggggttaactatcttaaaatttccactagttgcagggttaaagatcgacccgacctcagatttctggaattaccatacactagccgcgtttagtgcccaaggattcacctggacccaactgttacaccatggtatcgttggcaattacgtcgtttttccgcacgctttaaatatcgcgaacggctacagtttagtcgcagcttttggcggggccaacttttttgtcagccaactaatcaatattgggtgtactttagtcgatatggtcttaatttactggctagtcgcacggtggctctcacgacaattaggcatcatggctgccctcattttttactggattccagcttattggctgtacggcacgctcttaaatggtagtgaaccgttctttttcaccagcgtcctactcatgatgtatgcgcttacgcgggcattagtcccactcacgacgaccacaatcacggatcgacgactatacctagcgttagcgatcgtgatgactgtcgtggccaatatgctgaggccaatcatgggcgtctggttaattgcactgggtttgatgagtttgtgtgtcctgcttaaatctcaccacctttaccgcgttcaagtacgtcagctcctcacatacagtgcggtcgtgttaggactcatgttcacagcgactaatctcgacagctggttatatggctttaaggttgcgccagcccaagttgaaactttatacagcctggctacggggacagatgttaaaagtcacgggacctatagcccggcactacaagctaccgtcagccacgaattacgggtggcgcccacgttgacgcaagcctatccgcgaatcacacgaacgatggcgaggactttgcagactaatctcaaacaaatcaagccacagttggggtcatttgttaatgaaaaaatgcagggctttattcgtgaggattatggctatgattggagcttatataacttaagccatcatcccggtttgcttaaccgccactggttttatttagcccctatattgattacaagtgcgacggtttattggcaggtaatgctggtgattgcgttattcagtgttttaatggggctgggactgctatggcatcaacactatcttaaccactatttgctaatggcagcgcttttgttagacggtttcaccttaagcgctttaccattagaagtacagggccgctatcatattatcttgtacttaccaatccttatgttgatgacttgcgggatcgcgggggccaagctctggcggcgtcaaatcaagcagagttgagtaacagtggccatttcaagatcaatacccaaatgaatcgctagcgttcgaagctcactgaatgaaaattaaactgatgatataaaaaagattattgctgacagtagtgactgttacttcagtaataatctttttataatgtttaaaaggggacagatcgtctaatttgtactatcaaattattgtggctacggtcatagttaatagctggcactgccagtatcgttagcaaataccacggatcaattgactttaatggcccgtaatccccatttactaatgccgattgggtgctcgtcaaggtgccaggacagcccggtgatgaccactaaatgattgattgctcttcgccaacatgtcatggcaacgggtttcaagctagggcgaccatgcaacttaagcagggcgacagtcagtactatgggcgatggatgacgctgttagtggctgggggagcggttcggcgtaattacgcgggctagcaaaatcattgctatgagccgtcatgtcaatccgccaggcttcagccaaaacgtgcgttgaaatggaataggcttaaaagtagggcgaccgggtgctatttttggccgggtaggggttgtcacaaaaggttgaaatgaaccccaacgacccatttgggcgtaatatcggttcgcgtgatgacattgcgttcgtgacaacttgctacaaattacacaattttatttaccgtggtattgaaagaacccatcaccccggtaaattattcaccaaacttttgatctagcgcatgtccaacaaacatatgaggccatggcgaattactgttcgtagtctgcaataattgttgacactaaattgaatggcacaatcagtttcaataaatacgcttaattttaggactaatggtctgaaaattaacaagttgtcaagccacaattctgactaataatcgccaaaaaacagttgaaagctaggctagttgccgctaattacctgggcttcatacaaccgcaggtactcaaggatgccactcacatttatggtgttcagcccgcggcctctaatataaattacggtagactgatgtggttgccgacaagataaattagtattgtcgttagcaaaccatcgattcaataaatcggcttgataaacaattacgttctaaaagccagttttaaacccaaggtgcacagcaattcagtcgattgactaacagttatgagcaataacatcattaacacagtcaaaagctatttcatgatgcatggtggccaccttatgaatcataatcatatattcacggtaagtcacatccatatgattcagtgagttcagtagattttataaaaatgtgctataaattaatttaccacctaaaaattatcgctgtgctagcagtaaacttgatgacaattcacgcgataaaagcggtttgttgtgattatgatggcttatgtgtggattatgggtaaatctagctagggggctttttttacatttcctagtttacataatatatattatacaaagtagaatcaaaaacaaaattgctcccccacgacctgatttaggtcccctgtggtaattttttgattttaagttagctttctggtgattcagttctcagattgtcattttgtcgcaatcattttgctggctctaactgttcagaatttttcaagacgtccgcttaacttaaattattttttatgattcacaaacatcaacactaaaattagtcgattgaatttcaaccgagcatttttcgttaatttggatcaacttatctgaatcactaaaagttcaaatgttttcagactcctaaatccaattatcactagtttgcatgcacgctcataatttgctgataactaacatcgattttacggtttatttaagggacaactcttcaactaataaacgaacacgcgcttagaacgcgtctctcagcatcggtcaaatcgcttgtttttgttgtaaatttatgttttagttaaagtaagaattctaacccagaaaggatgtcctactatcaatgaccgctaaatttccgtatgctaaaagctttctcgcctcattagaaactgctggcaagcaagctagtacgattgagcaatatgaattaaccttggctgactttttcaactatgagcagcacttcaatgaaacctttgctaaggatcaattattagcagatttaactgagaatgatattcaagcttacttggccatgctccgtgaacaacgccaattcaaaacatcgacactgaacaaatgtctgtcgaatctaaacggctactttagctatttattttcacaccgaattattacaactttaccaacctttacaatcaaagggcaacccttgaccaatcgtcaacaaacaacgacctggccagagcaattggcggcatggttagcaatggatgatctgcatccatacacccgcttattcttgttactaacgaccaagggttatactgccacggagatgctaaccccagggttttatcagcagttgaatgcaattacctttacagcagtagaacaggcttttctggttaaactacgggcctatttgcagccattacagactcaaagtggtagttcggatctttttttaaagcagcgtcaacgcggaaccgacccacatatcaccctcgcggcattgcataaatacttggcgggtgatagtcaacgtttaggtgtgccattaaagccggttgcattgcgccaggacttcatgctgtggtttctcaagcaacaccggacgaccgaaccgactgagatcatgcaacaactacggttagatgaaaccagcctcgagtattaccaaaacttgctacgacaacgtgatttgcgaactttaaaagccactaaaaccgactaagtgacactgatgggctaactgctacagttagcttttttagttaaagtagctttacgttgttgcacgatctttacataactttacaaacacgtcacaagcattacgtggaatttgctagttaattaagaagccttaaaacgcctatacaacgcacctttttgcagttaaactagttttattgaatttaactaaagtattgaaaggatgatttgatgacattctatcgttggttagaaccgtttattgaacaaaatggtccgttcgcgccagccgcttgttatgcgcactcagattttgattttcctttgactagtaatgttcatgaattatctgattatattacttacttaaatattcgtgactcagtcaaaaaatcattttattcagcattggacgcgtaccaagcaagttaacaatcataattgaactcaaaaaccaacctactagcccagcgacgattgctgtggttgcaggttggtttattcgtgtttttagccttatttttatcgagatgagactcaaacgatacgaagatcgcaaatctgagccattttcaacgcttaatcaccatctagcttattgccaatgttgcttaataaacgcctcacgaccacccatttcttcgatttgataacggaatggattgcgtcgataaaagtcttggtgctcggcttctgcgggataaaatggcttcgcatcttcaatggttgtcacaatcggctcagcaaacttaccgctagctgcaagtgcatctcttgaagcagttgcagttcgacgttgagcttcactattaacaaaaattactggtcgataactgtcaccacggtcctgaaattggccagaagcatcggttggatcagtctgacgccagtaaatttcgaccaagtcagcataactgattacatctgggtcaaaagtgattttaaccgcttcagtatgcccagtcgtgtggctggcaacttgttcatacgtcggattagcgacggtaccaccagtgtaacctgaaatgactgacttgatcccgggctgttgatcaaacggtttgaccatgcaccagaaacagccaccagcaaatattgcagtctctgtcatctaaattcctcccgtttattaactcaattatttaaataaactctgatactgaccataaccagccttttcaaggtcggcaactggaatgaacttcagtgctgctgaattaatacaataacgaagcccgccacgatctcgtggcccatctggaaagacgtgacctaaatgtgagtttgcttgtgtgctagtcacttctgttcgatgcatgccaaacgactcgtcacggtgttcgttaagattagtctgatcgattggtttagtgaaggatggccacccacaacccgcatcatatttgtcacgcgagctaaagagtgcttgaccactaactacatcaacgtaaataccttcctggtaaaagttatcatactcaccgctaaatggccgttcggtcgctgcctcttgagtaacggcgtattgttcaggcgttagacgctgtcgtaattcaccttgctgtttatccattactatcagtccttccataattgagttgtgtacaatctaattacagtatttatcataccccaatctagctagaatgcaaaaaagaagctccaacaagtggtagcttctttttaaattaatctgtaaattaagcgttgaaggcgtccgttaattgagggacaacttgcttcttacgtgaaacgacacctggtaagcttaaccggttgttagcaatcgtcttaccaaaggctttttcaacaggttccgttgggttaccaacgactaataattccgagttactatctaagatattagtagccaagattaagaataaatcatagctgtcactcgcattttcgtcttttgcagcagcttctaaagcagcttgacgcttgaaaacatcatccaagtcaactgtattgatttgcgcaacgcgcacggtcttgccagccatttcaaatgacttcgcatcggcatcgattaattccttttcagtcttgctgtcaaggttagtgcccgctttaagcattgctaaaccatacgtttcataatcaatatcagcaattttagctaagtctttaacaactgccacgtcagtttccgttgtggttggggactttaagagtaatgtatctgaaatgattgcagataacattaatccagctaacttggctggaatttcaatgtcattttctttgaacaacttgtaaatgacagtgctgcagcaaccaagtggttcagcccggtagaataatggttgggccgtgtcaaaaccagcaattcgatgatgatcaaccacgtgactaacagttacgtcagcaatgtcactcacactttgttgaggttcgttatgatcaacaagcataacactgtcaacttcatcactggccttagtaatcacccgtagtgctggttcatcgaagtaatccaaaacaaattgagtttcttcgtttggttcgcctaatgcaactgcttcagtgtccgctcccatcttattttcgtagtatgagaacgccttagccgccacgattgcgtcggtatcaggattttgatgtccaaaaactaattccttactcattagcacaaaactcccttaaaacttatttttgattaatcttttgtaaccgtgaaatataatcttcggtccgtaagtaggcatcaaattcatcaaggaaattcttgattcgcggaatttggtccttatctttacggaagacaaaatttaagtcaaacttgatggctggttcaaatgacaacgtgtggagcttatcagttgccggattagccaccataaatgaatttggcaacgccgtgttagtattagttgctgccacaaagcgataaatctgttgtggcgtcgtaaaccgtgcgactgccgttggcaaatcagccaactggttcttataagattccttaaccacttgatccaagtaatagttttcaggatacgtcacccatggattgaacgtcgtatctttgaacttgatgcgcttcttcttcgctaacttctcgtcacccgaaatgaatagcaattcgtcttggataatcttcttagactggtatggcttccagttcttgatactttcatcaggtaggtacatgactgccaaatcaatccgattattttctaatcgttcccaaatctctttacgcgtcagcatgtgcaacgaaataataacatttggattggcctcgtaatacttaatggcaaaatcctcaaatacatggtcttcaattgaagctagcacgccaatattgattgttccttgagtagcactagttgtctgctggatttcatcagttgccttgttcaatacactataaatactgtgggttgcgttaagcattgtgtaaccggcgtcagagagacgtaactttttcccaacggaataaaataaaggggcaccaacggtacgctctagttttttgatctgttgggtcaatgctggttgcgtaattcctaaaatttgagctgcctgtgtgtaattcatagtttcagctagttgcaagaaatacgttaacgttttcgatgagaaaatactttcttgagttgtcttcatgaattttacctgatcctttcttcttatcgccatcttatgatatctataattttatacaagattcaaagtgaaagcaagcggttgttattggtaaataaagattaactaattcataatcttttaccctgttataatattatcttaatcgaatgcccgttaacgtgcaagtattcgcattggaaactataccgttagtgggatcggatggatctgcatagaaacaggttccccttcagtatcagtatcaactacaaaagagccattagaataacgcgcactagtaggatgatcatcattcaagatcgaatggtgcttaccacgatcagtcagcacatcaagtgcaaccccatttgcgtcactagcaactaagacataatcaacgacccggtgtggattgtttttcaactcccgtaagacttgaacgccccgccgtgcacgacttgtcacgggtaaatctgccaccttcatcttcttgaatgaaccccgttgcgtaatcatggcaatcaaatcatcatctgcggcgattgttgcccgtacaatggcatcgtcgcgcagatccatagatttcacgccgaccgccttcgcaccaatcgttgggacctcgcttaaatcataacgaaggccatacccatgttgcgttatcagaatcagggttcccgttggtgcagctggtaagtattcgactgttacaacggttgcatcgtctgacttcattttgatgaactggctagcccgagtcttataagttcgacccggcgtgtaatcagcaaaagccgtttgtttgatatagccatcactagttgccactaagaattttccggtagctttaaggttctcaaaagaatagacccacgtgatgcgctcgttttcagccagcccaatcgtctgagaaatgtgctcaccggtatctttccatttggcgtcagcaatttcataaatcggccggtaaatgagatggcccatgttggtgaacatcattaaatgatctaacgtgctatttttagctagatagatcggataatcctcatctttaagcccgttatcatcgggctcagacgctgaataagagcgtaagctggttcgcttgatataaccatcatggctaatcataacaatgacgtcttcttgtggaatcacgacctcggtcttgacctttaattcttgaatttcattttgaatctcagtcaaacggctcgttggataggctttttgaacggcctttagttcgcgccgtaaaactttatcgagttctttaggctctgccagaatcagctgataggttgcgatagccttggccagttcagctgattctttttctagctgcgtcacatcggtattggttaaccgataaagttgcattgtcacgatggcttcagcttgaatctcagagaaatcgaattgactgaccaagttctgtttggcgttcttcttatccttgctaccacgaatcgttttaattacttggtcgaggatggacatcgccttgattaatccttgaacgatgtgttggcgatccatagccttctgtaagttaaattgggtccgacgggttacaacgtcccgttgatgttccaagtaggccgttagaatcgttttcagcccaacgtgttcgggccgttgatgataaatggcgaccatattgaagttataagtaatttgtagatcggtatttttgagtaagtaagtcagaataccttctgcattgacgtcacgcttcagttcaatcaccactgataatccctgacggtcactttcatcacgaacttcggcgataccttcgatcttcttcagaatgcgaatttcatcaatttttttcaccaattgcgccttgttaacttcataagggatctctgaaacttcaatctgtgatttattccccttaagcggtacgatcttggttcgcgaacgcacgacgatacgcccacggccagtttcataggcttgcttgatacctgctaagccttgaatgatccccccagttggaaaatcggggcccttgacaaagtccatcaaatcttcaagcgttgccttagggtgattcatcaggaataaaatcgcatcaatgacttcactcaagttatgcggcggaatttccgttgcataaccggctgaaatccccgttgccccgttaactaataagttcggaaagcgggccggtaaaacagttggttcgtactccgtatcatcaaaatttaggaccatatcgacagtctttttatcaatgtcttgaagcatttcaccagcgattttgctcaaacgtgcctcggtataccgcatggcggcagccggatcaccgtccatggaaccattattcccgtgcatttcaatcagcggttcccgtaacttccagtcctgactaagacgaaccattgcttcataaatcgaagaatcaccatggggatgaaaattacccatgacgtttccgactgatttagcggacttacggaacgctttgtcaaaggtgttgccatcctgattcatggcgtataagattcgtcgttgtactggcttcaagccatcacggatgtctggcaaggcccgttcttgaataatatatttagaataacggccgaagcggtcgcccatgacgtcttcaagggttagttcttgaatttttggttgttcagttgccattttacgaccccctctattgttttagctgttgtgccaattcttcgtcggcttgctcatgtgcggatgagacggcctcgttatctagtaacgacccgtcttcgtccaaattaaagtggacgttactttcgatccattttcgacgaggttcaactttgtcacccattaacgttgtgacccgtttttctgctaaggcagcgtcatcgattcgaactcggactaaggtccgtttttcaggatccatggttgtttcccatagctgttccgcgttcatttcgccaagtcccttgtagcgctggagtgcatagcccttaccaaatgacttggtcttgagcgttaactcttcgtcagtccatgcatattccgtccgtaactgcttgttctgctttttttgtaatcgatacagcggtggcaacgcaatgtagattttaccagcgtcaatcattggccgcatgtacttataaaagaatgtcagtaagagaatttgaatatgggcaccatcggtatcggcatcggtcataataatgatcttgtcataattactggccttaatatcaaattcaggaccaacacccgcaccaattgtgtaaatcatggtattaatttcttcattcttgacaatatcagctaatttggccttttcggtattcaacaccttaccacgtaatggcaaaattgcttgaaactttcgatcacgcccctgtttagctgaaccaccggccgaatccccttcgactaagaataattcattcttcttagcgtctttagactgcgctggcgttaattttccagaaagtaaccgttcctgcttatgacgccgcttaccgtttcggctttcatcacgggccttacgggcagcctcacgagcctgccgagctttggtggatttgcgaatcagcatttgagcaaattcaccattttccatcaagaagaattgaagttgttcactcacaatattatcaacaatcgttcgtgcttcgggtgttccgagcttttccttagtttgaccttcaaattgtaagagattttccggtactcgtaatgaaataacagcggataacccttcacggacatcggagccttccaaatttttatccttgtccttcaataggccaaccttgcgagcatattcattgaacgctttcgtccaggcactgcggaaccctacttcatgagtcccaccgtctggcgttcgcacgttattgacgaatgacaacaagttttccgaatagccatcgttgtactgcgcagcgacctcaacttcgacaccttccttagtgccgtcaaagaacataatatccccgagggtgtccttatcttcattgaggtaactgacaaacgccttgataccatcttcgtaatggaagaccagctcttgttgttgattttcccgttcgtcagtcagcgtgattttgacgcctttcagtaagaatgcagattcacgcaaccgttcagccaacgtttgaaaattataaaccgtcgttgtaaagatactagcgtccggcttaaaagtcattgtcgttccagttggcttattagtcttccctttcttttcaagggtaccgacgggatgacccccatctttgaaatgttcaacgtagcggtagccatcacggacgatggttaccgtcaattcggacgacaatgcgttaacgacgctcgcaccgaccccatgcagcccaccagaagtcttataaccaccctggccgaacttaccaccagcatgcaaaaccgtgaggataacttcaggtgttggaataccggaagcatgcattccaactggcatcccacgaccatgatcgacaacggtgatgctgttatcggcgtgaataatcacgttgatttctttaccatagccagctaaggcttcatcaacggcattatcgacaatttcataaactaagtgatggagtccgcggccgtctgtagaaccgatatacattccgggacgtttccgaacggcttctaatccttcaagtacttggattgaagaatcatcatattttgggcttttcttggccattctcacaactccttttatctttaaaaatctacctcaactaggtgcggctttcaggtaaccgtaataaaatagtcctaaaagccccaacctgtcaaggtacaattatgttaatttctaattgtcacttgtggctcttcatctgttagcatacacgttaacaattaaaatagcaaacacacgttcgcgtctaaaactatcttttaaaaattaagccacttactagcttacctcatgttgattctaagcgccagttcaatgaataaacttattactggtcacgaccagttcttaaaatgcgtgattaatttgacagttagcgctttaaaggccctaaccacccgcttttaggcacataataattatcaaaaaatcattttattttcataatttgacacgcaatcatcattttttaaactaattaatccccacaatcttaaaaagaatgctaaaatattgagtgattctattgcaggaggaaccaactttgaaaataataattatgctgatcatcgcctacttaattggcgcgattccttcgggtgtcattattggcaagtttttctttcacactgatattcgtcaagcaggtagcggtaatatcggaactaccaacacgtaccgggtcctaggcccgaccgctgggacaattgtcatggtgatggatattctaaaaggcaccatcgcagcactacaaccgaccttgctatttcatatgaataaccggtataccttattgattggactagcagctattttaggacatactttctcaatttacatcggctttaaaggtggtaaggccgttgccacgagtgctgggatcttattggcctacaactgggagttcttcttaattgctagtgccatcatgttattattggtttacacgaccagtatggtcagtgttgctagtatgacggcttttccaatcgtcacgttgattgcaattttttactatcaggattggttgctatcactcgtggcctttgcattgaccctcttcatcttctatcggcaccgcagtaatattgcacgtatcaaaaacgggaccgaatcattggtacacttcggacttggttggcgacgtcagcaacgggctaaccgcaaataattatgttactttcaagaccatttcattactgagtggtctttttatttaggaacgggtaagctttggtgctgggtttgtattttttgtttctagttaaagtaagataatacaattctttattttgctatcttttcagaccacaataaaaaccggtcaaacctgtcgaccggtttcactaaaccacagtattttagttagaaaaagctaatcgcatatttagcatcaaacgtctggttcgctgcaagccggttaatgcccatcttatggcttaattgaccgtcgctatcaacgttatccgcaatgccccaccatggctctaagcacacgaacggcgcttctgcggggtatggtgaccacatgccgacgtatggtgcatcttcaatcgtcatcgctaccccatgatcatccagatcagtgtccaacattaacgtcgtctcgtgatgattcaaatccaaaatcagggcatcgtccttaaacaaatcccggctaagtgctaatggcttggtcaggtcgaagtcatccgcatttgccgcatcgttcaacggtgcctgtaatggaatatgcgcgtagacctttcgtggtgccacagtaaccttataatcagctagtgtgcccgccggatcagcgagtggtacgttaaatgctgggtgcccaccaacagaaaataacagctcttgattagctggattatgcacattgtagttaacggtcaattcatgatccgtcaacgtataaatcaaacgtaatcgaaacgcgtacggatacatctcccgcgtcgcacgactatcggtcaattcaaatgttgcttgtgtggccgtttggttgacgaccgtaaagtcattgtcgcgggcaaaaccatgttgtcccatgtgataagcctgaccagcaacagtatactggtcatcctttaaacgaccaacgattggaaaaagcacgggtgcgtgccggccccaaaaagttttgtcggcctgccacatgtactcaataccgtcactcgacttgacactacttaattccgccccagcttcattgatcaaaacggtgaggtactcattctttaattcgactgtcatccgcgtaaacgcccccttgataaattttataagatgtaacgactaagatccttatcctgtgcaatgttaccgattcgctcgttgacatagctttcagtgattgtgacttcgcccatttccatgtcaggaccttcgtatagcaattcttccaagagcttttccaaaatggtgtgcaaacgacgggcgccgatattttgtgtctcatggttgaccttataggcaatcgtggcaatcgcttcgatagcttcaatcgtgaacgtcactttaatgttgtccgtaccgatcaaggcgatatactgcttaatcaacgcattcttaggttccgtcaaaatcttaacaaagtcatccttgcttaaatcgtctaattcgactcgaattggaaaacggccttgcaattcagcaatcagatcactaggtttactttccgcaaaggccccggaagcgataaacagaatgtgatcagtattgatgggaccatattttgttgaaatttgcgacccctcaacgattggcagaatatctcgttgaaccccttcacgtgaaacttcaccggaaccttgctgaccacccttagtaatcttatcaatttcatcgataaaaataatcccggtattttcagcacggacaatcgcatcatgataaatatcagcgttattgactaacttttcggattcttcccggactaaaatttctcgggcctctgagactggcattgtccgttggatccgcttcttgggcattaaggcacctaaactatcaccaagatcaatacccatttgaccaagcatgttattattacccgcggcggcttgctgggggtcatccatctcgatggtaacctctgagttttctaagcgccccgttttcaactgatcggcaactgataatcgttgattacgaacttcatcggtcacttcttcgttacttgaatcgtcaacgttgggggtctggccgttttgcatctggctaaacatgttcatcatgttttggaactcgttaccattgttcttagcctgcttcttttgggctggtactaataatttgacgagccgtttgtcagcagcctgcaccgcttgtgcccgcacaccagaataagcctgttgtttttccatctcgatagccacgtccactaagtcacgaaccatggattcaacatcgcgaccaacatagccgacttccgtaaacttagttgcttcaaccttcacaaacggggcgtgcacaatcttagccaaccgccgggcaatttcggtcttcccgaccccggttggtccgatcatcagcatatttttgggggtaatttcttcctgcatttcagcagaaagttccatccgccgataacgattacgtagcgcgattgccaccgcttttttagcttggttttgaccaataacataattatcaagcgcggccacaatttgtttcggtgtcttattgatttcttccataagcgtttcctcctacattacaacgtttctgagatcacattatgattggtaaagatatcaatgtcgccggcaatatggattgccgcttcagcgacttccttggcactcatatccttggcatgcagctgcattgcgcgagctgcggctaaggcaaaattaccaccagaaccaatggctaagacgtcgttatccggcgtgattacttcaccactcccagaaacaagtaacatgtcatctttgttcatgacgatcaacaaagcttccaatttctgtaacgcctggtcactgcgccattcctgggcaagctcaacggctgcccgttgtaaattaccagaaaattcgttgagtttcttttcaaaacgatcttcaaggttaaacgcatccgcgacactcccggcaaaacctacgacgacctgatcattataaatccgccgaactttatgggctgtccctttcattacgactttttcacccatcgtgacctgaccatcaccggccatggcgttatggccgttttggcgaacggcgcaaatggtagttgcttcaaatttcgttgtcatgttcagtctcctttgtcgattcccgcgttgcccgtgggaaaaattgacgataatcttgttgtaaatgttcctttgtcacgtgcgcataaatttgcgtcgttgacaaacttgtatgacctaacagctcctgcacggtccgtaaatcggcaccattattcagcatctgcgttgcaaacgtgtgccggagcatgtggggatgaatatcagccgttaaactacttttcttaacgatttgattcaagacatattcgattccgccgccagtaatggggccgccgtgacgattaataaacaccgtttggtgcgtttgaccatacttggccatcacgggctgccggcagacggtttcgtaatgctgaagcgcggtagccgcgtaccgaccaaacgggacgtaacgttccttatcgcccttcccacgaatcaacatcatttttaggtcgtaatcaacgtcggctaattgtagatcgacacactcactcagccgaatcccagtaccatacaggacttctaataacgccgcgttccgggcccccatcacgctatcatccgcatagacggtttgaaataatacgtccagctccttttgatagaaaaaacggggtaagcgcgccgcgtgttttttgagttggacgtacacgaagggattcaatttagctaaatcattcttaaccaaaaagttatagaacgaccgcaagcttgaaactttccgagcaattgaatttcgggtcaagtgccggtcatataaatgacttaaatagacgttaacgtccaaccggtcaacttcagtatacgctttcgcgccgccatttgccgttaagaaatcattaaaagcttgaatgtcttcccgataagcagcagcggtctcttccgaatactgtcgttcaacccgaatgtactttaaaaagagggttaaataatccgtttccatgcaaaaacctccatacgttgctactttagcaaagtatggaggaaaacacaattatgcaccctgtcaatggggcgatattttagttgttaacggtcaacgtttcatctttaaaagtcgtcaggtcagccaaggcccgttcagaaatcgccgtattacgttcacgcttatcccgaatgcgctgtttgagttttggcataatgccaaagttggcgttcatgggctggaagttgctagcgctcgtatgcgtgatatagtgggccatcgcccccatcatcgtgtccgttggaaaaacgaccggttctaaaccaagtgctaagcgcgctgcgttggttccagcaacgatgccactcgccgcactttcaatatagccttcgacacccgtcatttggcccgcaaaaaataaatcgggccgttgctgtgtctgataagttggcgttaatagtttcggtgacttcataaaagtattacgatgcatgacgccataacggacaaattcaacgttctccagacccggaatcagtgaaaagacccgtttttgttcgccccacttaagatgagtttggaagccgacaatattatatagatcaccagcggcatcatcttggcgcaactgaacgaccgcaaagggttgtttgcccgtcttcggatcttcaaggcccactggtttaagtgggccaaatagcatcgtttggcgcccacgttgtgccatcacttcgatcggcatgcagccttcaaagacatctgaattttcaaaatcatgcgcttcggccatttcggcgtgaatcaacgcgtcatagaaaacgtcaaattcggcttccgacattgggcagttcagataggccgcttcaccacggtcatagcgtgatttgagatacaccttatccatgtcgatcgaatctttcgttaaaatcggtgcggccgcatcaaaaaagtgtaagtcatcttcgtcgttaaacgcttgaatcgatttcgctaaggacgccgccgttaatggtccagtcgctacgatcgtaatgccatctgggagactagtaatttcttcattaataatttcaacattaggtaacgcggtgattgcagccgtgatttctgcagagaacgtatcccgatcaacggctagcgcaccaccagctgggacagcgtggtgttcagccgcttgcatcacgatcgaatccatctgccgcatttcggcctttagtaggcccgccgcgttggctaattggttcgcccgcagtgagttcgtacacactaattcagcaaattgcgccgtgtgatgggcgggagtcattttgttgggccgcatttcatacagccggacattgacgcccatattagcaatatgccaagcggcctctgagccggctaaaccggcgccaattacgtttactgttggtattgatgccatccagaattcctcttttcttgttgtcataccattgatagtattgttgtcatcatacctgagaaactagcagaagacaactaatggcatcagcaaatcctgcaatgacatgtccaccgtcaagcttaaagcgaacattaatttaaacgggcgtttattttcccgataaaacacttgttaatcagtttaaattacgaattttatcaacgtatttccaaaaattgtacgcattatttgacaatgcacaaaaaaagatcatccctagatgacctttttttcatttatttttgaacgttttcggtataatcgccattcggacaaagcacttgcttgccacctttgaccttcttttcgaccaggtaatggccatccttcgggcaatcacggccaaccggtttatcccaagagacaaagtcacaatctgggaagcgggaacaaccataaaaaatccggttcttcttcgatttccgctcaatgacctggcccttcttacattgcggacaaacgacaccaatttctttaacgatcggcttcgtattacgacaatccgggaaacgggagcaggcaaagaatttgccgtaacggcccatcttcacaaccattggcgcgccacaaatatcacaattgaagcccgctaattcgtctttgatttggatcttctccatactttcctcagccgttgcgacttctttagaaaacggcttgtagaaactatcgacgactttaacccagttttccttaccttcttcagtcgcatccaactgttcttctaaactggcagtaaagccgacattaacgacatccgggaagtattcctgaataatatcgttaacgatctcgccgagttcagtcggcacaaaccggcgcgcttctaatttgacgtagtagcgccgctgaatcgtatccagggttggtgcgtacgttgacggccgccccacaccattttcttccaatgctttgatgaggttggcttcagagtaacgtgcgggtggctgggtgaagtgttgttgcggatcagtcttcgataacttgaccacatcaccttcacttaaatctggtaagacgttattcttttccgtcttatcgtagatcttcgtaaaaccagcaaacttcgtcttcgacccgttcgcccggaattggacgtcattttggtcgatcgtgaccgccattgtgtcaagtacttcgggcgtcatctgactagccacaaaccgtgaccagatcagctggtataaccggaattgatccttcgtcaagtagtctttgatgctagctggtgtccggaagacggatgagggtcggattgcttcatgggcatcctgagcgccttctggtaacttgcccttgacaggtttggtggccgcatattctgcgccgtattctttatgcaagaattgtgacgcttcgtgcttcgcaatcgacgaaatccgcgtcgagtcagtccgcatataagtgattaagccgacgctaccttccttaccaccaacattgatgccttcatataattgttgtgctgccatcatggtcttacgcgtccggaaattcaacttccggttggcatcctgttgcatggtagaggttgtaaatggcggcgccgggaaccgtttacgttcttttttgacgactttgacgacattaaaatcgccattccggtctaattggcccaagattttttgcaccgcatcgttgtcatccaacggttgcttcttaccatgggttccataaaaacttgccatgaatttggaacgacccttttgaaattcactatcgatcgtccaatactcttggggtttgaacgctttaatttcattttcacgttgaatgatcaaatctagcgcgatcgattgcacccgaccggccgataacccctttttgacctttttccacaataatggactaattgagtaacccactaaccggtccaaaattcgccgggcctgttgggcatccactaggtccatatcaattgaacgcggttccttaaaagcgtttttgaccgtatccttggtgatttcattgaagacgacccggtttttatccttagggtcaagtcctaataaataggataagtgccaagcaatggcttccccttcacggtccgggtcagatgcgaggtacacggctttggcttttttagcctctttccgcaatcctttgatcacatcacccttaccgcgaatcgagatatagtgcggttcgtagtcgttatccacgtcgacacccatcttgctcttcggtaaatcccgaatatggcccagactagcgacgactttataagaacgacctaaatatttttcaatcgtttttgctttagatggtgattccacgatcaccaattttttagcgggtgttttgcttttccgcttggtagcagttttagttgcggtcttccgctttgccgccggtttggctttagttgtacttgcagccactcgatcagctccttacaggtttcattatcattattataaatatcagtttaagaaatccctgtaatcatatttcaaaaatttcgtgttgtcaaatttttggtaaaaactcttctattatatgtcgcgaatttaagactggtttggcccccgcaacgatcaattgattgcacccaactgaaaatggtgcatcaattggtccaggtaccgccagaacgttgcgattgttttgtaacgcgatattagcagtgatcagactcccagaatgggcctgcgcctcgaccacgataaccgtttggcacagcccggcaataatccggttacgagcaacgaagtggtatggttccggacccacccccagcgggtactcactgattagtaaaccgacctgactaatttgctgctgtaggtcacggtgttgacgggggtaactaatatccagcccggtcccaatcaccccgattgtcggtaagttaaaacgaagggcggtccgatgtgcaaaaccatcggctcccttcgctagtccactgacaatggtcaactttgccgttgctaacggtgccaataattgcgtcgtgacccgttccgcatacgatgtggcctgccgagcaccaacaaccgcaagttgacgtgtcgttagtaacgcacgctgcccgcgcaaaaacaacactaatggtggttgataggcttctaataaggccggtgggtaatcatcatccaagattgttaaaatatcaagctgcgcatggcgttttagtcgctgttgaaacgccatactttgccaatcagcggtaaaacgcccctgctgactagcagttaaatgggccaacttacctaatcggcggggatcagtgacgaccgtctgaacctgccgacagtgttgtaacacgcgtaccatcccggcatacccgatgccgtgcgctaaatgtaatcgaatcaataaacttcttaattgcatgttatcacgactccttaagttcgcccttgttgacattagtcgtcaacggaacggcttctttaaagagtagttacggatttagacccgcttagcatttcgaaccggtgaaaaagattggcgatgaatcggcgtagcgccgagactggccaacccggccaaatgcttagcagtcccgtagcccatattatcagcaaagtcgtacccgggatacacttgatcatacattgtcattaagtgatcccggacgactttggcgacaatactagccgccgagatgctcgcgcttttcgcatcgcccttgattagacgggtctgttcaattggtaccggcacctgcatcgcatcaactagtaaacgtgttggccggacggacaggttacggacggcttgggccattgcgactcgggtcgcctcataaatgtttaattgatcaatttgttgggcatccgcaacgccgattcccacggcgaccgcttcttctaggatccgtggcatcagggccgcccgtttcttagcggttaattgctttgaatcattgacttctagcaaatcaaaatgatcgtccaagactacagcggcagttacgactggtccagctaacgggccgcgaccaacttcatcgatcccagcaacgtattgtccgccgtgggcccaaaaatcccgttctaaacgcatatgttgattaaaacgtgtcactaacgccgcctgtttttcagcttgtcgcaaatagtgttgataagcctgttgcacgcccttgcgaggatcggcttgagccgcggctagaagcgataccgttggttggtcagccagtagccgtttaaaatccgcaatcgttcgttcaggcatcgggttgatcccccgttaagtcgagcgtaaaacgaccgagccggcccttgcgaatatctaagaggaaggccacgcagaaacgttcccagtcatcgcgcatccccgcatttttcgtcatcgcaatcagtaattccggatttggtaaggttaactgctcagccgtcaaatgataacgatcgactaagcgtgccgcgtagtgctgcttgaagaagtccaaggcaaacaaagcgacgtcatcgttaggatagatattttccttaatcgcacccgtgacggccagcttggtaccaacgacttggtcttcaaacttcggccataaaatccctggggtgtcgagtaattccaatttattggacgctttgagccactgttggcccttggtaacgcccggacgatcaccgactttggcaatttttttattgacaatatggtttaataaggtcgatttaccaacgttggggataccgacacaaactgcgcggattggccgattagtaatgccacgggccgcaatttttgctaacttgtcagctaacatgtcactagccgcttgcgtcatttgtttaccaatcgtacggctacgtgaatcgaccgcgatcgcaacttgaccctggtcttcgtaatacttgacccagtcagctgtcgcttggggatctgccaagtccttcttggtcataattaagaggtgtggtttttgttggaccgttttttcaatttctggattccgggaagccactgggatccgggcgtcgaccaattcaaaaacaatatcaactaaatgtaaattgtcctgaatttgatgaatcgccttggccatgtgacctgggtaccattgaatatttgccattacgttgtgctcctttttctcgtggcgcgaatgccttcaaactttgatcattgttaaaattctttaacggcactggctgtcaagccgatgctgctagctccagtggcgacatgcttaagtgctgtgcaccaaccgccactaatgcattcattcaacgaaatcgttggtcgctatgccgcccatgaactaaaacaccggacgcttgctagtccaggactggcatgatgcagcaatctatattttaccatgtttacaccgaccatgctttgaaaccgaccattgatctgctgcccaatacttccacacgttaatttagctaaccggaacatcgaccccattttattggctgcaagcttgcggtagctgtcaattagctcgttagtccaagcacatcgcataaccgtccttaacgttaacgtccaccgatacgatcatacacacagttcacctactacaactgcaaataagcgcgacgtcacagccttcatcatcaagatggccgcaacatcgcgcttgtttgattgtcgtttgatagccgtcagctaattaactgacgtgacttaatcccagaatttagccgcaatcttttgtccctgatcaatctttgcccactgctgagccgccgttaactcgttgcctgagtcacacgaagcgaagccgcattgatgagataaatataactggttcttattcaaaatttgactagcttgcgtcagtaaccgtaacgcgcgatcttcatcatctaaggtattggtcttactggataacaggcccaagacgacttccacattcggccggtcctcaagtaccttgagcgctgaaagatcaccggcgcggtcatcgtcccattcaaggaagaaacggtcgtagtgttggtcatgcaggaatttcttagcaatcgtattgtaactgccttctgcaaagtgccgactttcataattaccacgacaattatgcgtccaaactttcaaccctaattgatggccaaaatcaactaactcattattggtgttgacggctacatcagctaattcttggagactgccatttccagcaccaaagggactttgctgattatcactggcaaacacttcccacaagcagtcatcgaattggatgattttgccacccgcagcttgataatccgttaagaattctttatacgccccgagtaagcctgcatgcaagtcatcaacagttttgtaaatctggtcagggccatatagcttatcgatgtatccaaactcaacaaaggcgtgtgcgggactccagatcgttaatttaacgtcattaccatcggcttgtgacttaagttgctgataaatatcaataaaatgatgatgcttgccagaaagtggtgctgtgatttcaatgccaatatctttacgtgtttcaaaatcactgccgtcatgatcgcgaaaattataaccttcatccgcaataaaccgccgaacaccactaaacccccaaataaaatccaaatgccacattgacttcgtatattcgccatccgttagcacatcaatcccatgcgccttttcggtggcaatcaccgtcttcactgccgctgtttcggcagcctggtagcccggcaaagcctcataaaatgggtattgaatatcgtcacgatgttcgatttgatttttataagtaagtaaactagccgggcgtaagagtgagccgaccaattggaaatgtgtttttgtcataatgtaatcatcctccgtgtctgtcttaatgagtttattataacaatctgattaaaaaatagataagactgattgcattgatgatataataggcaatacctataacctaaataatttattcaatcacaccagctacaatcatgcgttaattagatactgaaaccagacatttctcaggaggtgcacttaatgcgtattcaacaattgcgctacttagaaaaaattgccacgactggctcgatcaacgaggcggccaaacagttatttatcagccaaccctcattatcccaagcaatgaaagaactcgaaaaggaatatcaagtacagctgttttatcgtcataaaacggggatcactttgacggatacgggccgtgaattcattaactattctcgcagtgtcctcgaccaagttaatttactcaacgaacattttggtcagggaaccgttcgcaagcgtatctttagtgtctctgcgcaacactatgcgtttgtcgtgaacgcctttgtcgaattagtcaaggaaattggtggcgatacctatcagttcacattacgcgagactgaaacggccaacgtgctcaatgacgttcagactttgaaaagcgagctcggcgtcatttatcttaataagttcaatcagaccgtgcttagccgtttaattgctgacaaagacttaagcttcgtaccgctattcgaggctcgcccgcatgttttcgtcggtcgtgataacccattaacgcacaagcaagaactgactttggatgacctacgagactatccctacctctcttatgagcaaggcgatacgagttccttttattttgcagaagaaatcctcagtacgctacctcataaaaagcatatccgcatcagtgatcgggcaacgatcttcaacttgatggtgggtttaaacggctatacgatcagttcaggcatcatcagcagtgaactcaatgacgaaaaaattgtggcgattccactaaaagtggatgatgcaatgacccttggatacctgcgccataagaaaatcgaattgagcgctacggcccagcgctatttgacactattgaaacagcacattcaaggatatggctttgacgtttttaataataattgactgatcgacacatgacgtgactgaattcattttttgttaacaacatacagtggcgggttgttttttgcaatttgatcaaggctttaatgtccaaaccgcaatcgccttcactaaagcaggacacctaaaccatttaaacatcatatatatcctttttcaaaacccccgctgagtatggattaactcagcggggatatcagtttttttatcttaatttattgatgagatttcaacacactcaaaattcaatcaatcttgttcataataatatgcatttaaagtgtatgttttaataggggtaatctgtaattcatatttttcaactaaatcagctaactcctgaccatcaattagtgttaccgtattatttccctgcatcgccttagctttagctcggttagtgaaatgactagttgtcacaaagataccatattcagcattaaaactatccatgacgcccttaaatttatcaatttcaggttcggatacctggtcctgcgtataccgtttgcactgtattgccacccggctagtacgaaactcgtcggatttaaaatagccaaagccatcgataccgtgatcagctgaacgtaccacaccacgatttttatcaatggtcacacccatttttgaaatcaatgctcgcgaaaagttttcaaactttccagaattgaatttttttaaacattcaattaaatcactcttccattgtgattcatctgcatcttgtcgcgactctggatcatcgattacgaccagatcctcatccctatctgccaacttgtcatcagattcctgcattgctgttaatttccgatgtactctttcacgtgtcttttgattccaatagttcgtaactagttgggtttgttcagaggtcggataatttgataattcagcagttctgccgatacttgtcagtgaaatttcctttccccattccatggaactaatatagccaactgtaagtagattttttaacccaaagttgaaatcgtataggaagggattatacgctcttccggtccgtgcactgactttagtatcatagacatcctcatacttcagattaacatattcatttgtagcaattgtctggcgtattatttttcgtgaggctgttccaccaagttcccgtagtgctaaaacgattgccttctctacattccaacgcttataactcatctcaaatgccaactttcaaatttaatgccaactattttttgacacagcaaactgtcaatattcggcttcaaaatttattctatcatgtttgaattagtcttgcgttgtgcgtttccccatctaaccaactaagatcacgaaaaaatacgacattcaggttgaatgccacattttagtttggtttagctacttgtttgtttcaacatccaatgcatgtttggccgcaagcgcacgaccaaaatcagtttcatcaaaatgatcaatgatttgctgaagcgcggtcgcacttaaactggccccaaataacggactgccgggttcagtcataataccatccgccagtcggggatagctaatgggatcaaacccaagcgtctccacaaagtgggccacagttgctacggcttggggctcatcaccagctaccaatagggccttccgcgccggatcgccattaggtctggcgtcttcttgcagattatgataacccatatggttcagtgttttaaccagatggctccctttgaagtattgctggacttgttcgctggaggacgtctggggatccagaacttcttcccgtaccccgtctgtttcccaccaataattcatagcgtcaattacaagtttgccatcaagcgccgtagccgggatttgccggtaacgactcagcggcaatgctaaaataattaactcactgttggcgatgacatcctgattttccgccgcaattgcacccggaactagtgtttgaatcgttagttcaattttgcttactttgccagagcccgaaatgcgaacgtcatacccggccgccaatgccagttccgctaagacgataccaactttaccggcgccgaggattccaacgtttttgactgtcatttggtcgtcacctgcttcgcttgtaaaatagttttaacttgtggaatcacctgtgtcgcatacaattcaatcatccgttcacgttgagccgccgtttgattaccggccccgtataccaagtcaaagcgccccagccctagtgtttcaatcgtcgtcgcgatccgttgcgcaaccacggtcggcgtcccaacataaaacgacccgtatttggtttcacggtcaaattgttcgtgactcattggcgcccatccccgggtcaatccaatgcgatcaaaattagctttgatattttgataagccaccgtcaaggcctcatcctgatcatccgcaatgaatccatgtgaatgcaccgcaatcggataagctggctgattgaactttttagcggcttcatgatacagcttgatatacggtttaaatcggtccgcccgaccaccgatgattgcaatgatgactttatagccaatcttagccgcgcgaataattgattctggtgaaccaccaatcccaatgtaagtctcaagttcaccagtagctgtctttggatacacgtcttgattcgttaactaagcccgaaacttacccgaccaagtcaccggcttttccgttcgcaattggtcatatagtgcgagtttttcgttaaataggtcatcataatccgtcaaatcatagccaaataacgggaacgattcggtaaacgacccccgtcctaacatcacttgggcgcgcccattagacagaccgtctaacgttgcaaaccgttcataaactcgaaccgggtcatcggaactcagcaccgttactgctgacgctaatttgatgtgctgggtcacggcagcggtggctgctaacaccgtttccggacttgagacactgtagtctggtcggtgatgttcaccaatgccaaaaacatccagcccatactgatccgctaactgaccttcgcgcacgatttggcgcaatgactctcccgccgactgtaaactaccatccgtgttcgccacaatatccccaaatgtttctaacccaaattctagttgattaacatcaatcatcttaatgcccccattacttttgctttacttacttttagtaagtggttgatgttaatatatcgtattatctctttaaatgcaactgataggcacagcttgacagtcaccttcaatcatgattaaaacaatctgccaattggatgaattccggttcggtagtaattcagcgatacaagcatcgcacagaataaaaagaggtattcaattagaatacctctccgtaagttgttccgaaccaatcatcattgcaaaaatcaagtttgcacatgctatctagctctgggcctgccgttgcgtctcatgacgttgtgcccataagttgatcactaaagcgacgatcattaatccgaacgcaacaatcatgatattttgtagtccagtgtgtaagatgccacgcatcatcggcactaggtgcgctggtagccggcccgcccgactagcatcacttaactggttcatcatcgccatggtgattttaccatccgatcgtgccaccccactagtcagagcttggttcatgattagcccaaagatagccgtggtaaacgtctggctgagcatccgaatcaaataactaaacgaagtcgcaactggaatgtcacgttgatcagcgtctacttggaccttaacctgcagctcattaaagcaggccccattgccccaaccttcaaagaagccagctaagagtaagacccagtatggaagcttaacaccgccaatcatcaatggaacgaaggtcagcgtcaaaatgataatattgatcgtcaagacgcgatggggcgtcaagtgccgccgcatgcggggaactgattcactacccccaaaattagcaaaagcacttggaatctgcgtggctcccccaattaacgctgacgtccctagcaagccctgagcccacatcggactgtacgtcaaaaaggcaacgaacgcgccccaaataagcacaaataagacgaaatcgaccactaacggcgcgttcttaaacaggcggcccggaataaccgggtccacagcgcgacgttccacgatggttaaactgcccaacacaatgagcgcccccacgatcacgatcgcgacaatccataacgacaccatgccgatcagttcaataccaccaagcaaactgatgatcccaaccgccatcaataacgcccctgcacgatccattggttgcaagttatgttcccgcttaggttcttgatagaagatttgtaacagcacggctgagacaatcccaattggtacgttgaggtaaaagatccagtgccaagaccacacatcgacaatcacaccaccgaccatggggccaataatcgttgccatactaaagcaagccgagactagtcccagtgcccgcattcgatcacgcggattcttaaaaatgtccgcatacatgatgtaaggtaaggaaatcatccccccgttgccgagacccgcaacaccccgagcaataatcaaaaaccagatgttgggtgctaatccttgtagtaaggagccgacaataaagagtgccgtcgtcatttgataagctcgcttattaccaaagcgctcacccatttttgaccagatcaaggtcgaaactgccgttcctagtaagaaaacagcgacgatccacgccattaaccgtagaccgtgtaaatccgcaataattgctggtagcgccgtattgacattcgtactatcgataccagccataacgttcgatagtaacagggcgccctgaacaaaataaatggcccgtcgattcacaacaaaacttctttctataattgctaaacatctcgccagtcgttcagctaaaagttacctcaatccaacccgttgaaattcactatttcatactgatcaattaacgcacaatttctagtataccgctttacccccaccgcaaggcaagtctaaatcttgatttaaattcatgatgaacaagactttccactgccgatttataaagccacccgtgacaagccatttttgagcctaattcgtagatccacctccatcttgtcaaagcttcgttgacggtaccgcattaaaattccgcaactaaaaaggcataaccgaaagccatgcggatttcggttacgccttttaaaatatacgaatcagctttgaactaatttgtcttttcaatcaatttcattgctgcatcgtaagcccgatcattatcactgatcttattagctaattcagtctcgatcttagtcagtgtctgtttatcgaccttgccattgaccgttaacttggcatgcttttgatactgcttgaccgcactggtggttgaatcaccaaagtagccattaacggttcctttaaagtaacctaaggcttgcaagtacttctggaacgtcttgacattgctattgaccttgtcagcttgtaaatcactgaccttgctaataaccgtcaagcttgcataactcggctcatcagctttaacatcaggtgtcaagcccttcttgttgatccaagtgccgtttggtgtcagccacttcgcgaccgtgatcttcatctcagtcttatcattaaaagtcgtcaccgtttgaacggtccccttaccatatgactgtgacccgaccagtttaacacctgccgattgatgcaaggctgcggagaagatttcagctgccgaagcactcccaccatcaattaagacggtcgttggcttcgtttctttaaagccaccatcatacttcttggacgccgtgtatttttcggtcgaaccatcgcgtgcttggacctgcatgatcgtcttaccattcttcaagaagattgaggccatcttcaaggcagccgtcatcaacccgccaggattaccacgcatatcgatgactaacttcttggcccccttcttatcgagtgccttcaacgccgtcttaaattccttagcagtattcgtcgagaaggtcgataccgtaatataaccgatcttcttatcgccaccgactaacttataatcaacggtcgtcactggaatcttagcccgcttcaaacttacggtaaaggtttgaccactgcgttcaatcgtcaatttgaccgtcgtaccgatcttaccacgcatcatgctaacggcttgtgtcaaggtcttaccggccactgacttgccattgaccgccttaataatgtccttcggtttcaaaccagctttcttagctggcgtaccagcaattggtgaaataatttgaacatagttgccagatttttgaacctgggcaccaattccagaaaacgaactgtcgatcgtgtcattcaagctttccgtctcgctcttgtccatgtactcggaaaatttatcacctaacgaattgaccatgccgttaatggcaccgttggccaacttattcgcattgaccggtttgtagtaattctcattgatcgtttcataaactgattcgatctttttcattgctttactagtctgctgcatactgctgagctgggcattgacttgccgaccaatcagccagtacgtcccacccaccccaatgcctaatgcgacgacaatggaaataatataggtccatagaccaacgcgtcgcttgggccggggcactttttttatgtgcggattagtttgtttgggttcctctggcataccgaacgtcctctttcctacaaattaatttaagcttcacttgccaaataggcttgccacgcgtcatcaaagaccgtcatcgttggcaaataaccagcgttcaattccaaatattgtgagagttcgtgaaaatctttactctgctttggaaacgattgatccaaaaacgcattattggcaaattcggcaatggcatcggtactgtctgggttccgttgcgtcatcaagaatgtataaaatgttttatgcatgaattcactccttagtcactagtttttggaatatgcatttcgaacttgaactgattattcttcaaatcaagcttatctacactataacgaacatcatgtttaccaactaatttattcaagtagaggtcgattgtcttcttcttggcattcaacttgacccacttaggtgtcttgtaattattattaatataattaatcacaaagctgattggcaaggacatcgtcccgaccgataaattggttgctttcaacgaaatattgccgttatcgatgacacttggttgcatcgtgatcacaaacgacacgttctgacccagtacctgcgtcgttccgagcaaataagcgccggtagaccggaccacgaagcgatatttcatgtcttggcccttttgtagatcattcaaataataactcgcaagggcgtttaattgttttcgattcattgtaatcggcacactagccgcatccgtattgcttgcagccgtcaaactagtgctttcgctaggcgatcgtaagacctgggtgccgacgtaagcaccggtgccgacaatcaacgcaatcaagacaacggcgacccatttccaaacattgattggaccgtttgtcttcggatttttaggtgctgatgcctgcttgtttcgttgtgcttcccgcatctcattacctccctattttttgattaaccacgcatcatgggccatcatggtctgatacagtttggttgtaaacacacgatacccccgcttattgggatggaaattatcagcagtcgaaatcaaatcattcgtcttgttttctgtctctaaagcgccagtaatggcctttgagctggttaagctagttaaggtcgtggcactcgctgctttcttcaacttgcgaatctgggctgccgtcttgtactggccgtgtgacatggtccaattgatatccataaaatacgtgtgcttgtattgactaaccgtcgtctgtgtctgatcattccactggctaatgtagtgcgtgatcgacgtcacatttggaaagttcacataaattggattatagatgctaaagacaaaaactgacgcagtgccattcaaactttgtaatttattaaataatttagttagtttattcgcatataaagtttgcgctttagcaaccgtcgcgttatttttggccgtattgttagaagttagggacccttcgagcgtttgcaagaggtcgttaccgccaaccgtcacagtaatcacatccgccttggcaattttctgttgtaacactttcgacttattaatgcgtgctaaaatctggtcactccgatcaccggacttaccagcattcgtggtcgtcaccttcagcttttgcttagtcgtcaacgtttttttgatctgaccaacgtagccaccctcggactcatcgccgaccccttcggttaaggagtcaccgaccgcgaccaagttgattttcgcctgttggggcgtcttcttggcagtggtctttttagtcgttgttggggtagtcgtcgccgattcattttgcggatgcagcagataattgaccccgaaaaacaccccgaccgctaacaccgccaccactaaaatgattttgatggtttctttaactttggacattggcatccaacctttcttcaccgttgagcagtccatttaatcagagctaactcatctttgaacaataaaatggtcaccatcccctgttgggacgatcaccatttgccattagtgctcgtagacaagtcgcctgtgggacaccgctcactttacgctggcgcttgcgtatgatattccacggcaaacgcacccgggccaccatgggtcgcaataattggcaccgttggttgaacactgatcttgagacttggtaaagccgcttgtaggcgcgcccgatattcttccacgcgctccgtggcgccaacgtgagagattgcaacttcggcgacgttcggcgttgcaataatatcgtcgagaaccttatcaaaaaacttattaatcgccttaacaccgcgccccttcatcttcacatctagggtgccgtcatcaacttccaaggcaatcttaacattcagtagcgtactgattgcccccgtcagacgactgattcgaccaccagcaacgaggttattcagggtcattacgcccatgaatagctttgtatgggcctgagtcgcatgaatctgatcgatgaccgcctgtttgtcagcaccactctgggctaacttagcagcagtcaaaacttgaaaggccatcgcacggtcggtcgtccgagcgtcgatcacggtgacatcggtcttcgtaatcgaagccgcttgttccgccgtgtgcactgttcctgaaatggcttcgagcatattgatacaaatcacactcgcgccatccgcacctaacttatcaaacgtttcaatgaacgttccgagtgccggttggctcgtctttggtaaagatttagccgttgccatcttgtcaataaattcttcacgcgtaatcgtttcatcttccacgtaaatggtgccatcgatcatgacagtcaacggaatcacggtaatatcgtatttttttacctcggcatccgtcaaatttgccgaagaatcggtcacaatcttgattttcgtcatactttgccacgctttcttatacttgtaacgtttaaacgatcgttacaataaaattaatgctttcagtatagcagaaatctgcctgagtttcacggttgccactgaattaacgacggcggaaatcatcaaattcgtacggatattgatttttctcatccaccgtcccaatttgttggctcaccagctgccactgcgtgtaatccacggccggcatccaagtatcaccatcaaaccttgcgttgatacgcgtccgatataaataatcggccaccggtaacacggcttcaaacaccaccgcaccaccaatgacaaaaatcggttcatccggatgggcagccgcgagtgtttggatcgccgacacatctgctagttgatggacttccggtggcaactttaaatcagactgacgtgagagcacccaattggtccgccgtgggagcgggcgtttaaagcccgcaaaagtcttgcgccccatcacgacatggtgtccggtcgtcagcgctttgaaccgctgcatatctgctggtaaatgccagggaagctggccctggttgccaatcaggccattttgatcttctgcccatatcaatgcaatcattgcggcctcctaaatcgcgaccggcgctttgattgccggtgcgggatcataaccactgagcttgatgtcactcatttggtaatcaaaaatactgtcatgagccccacttaaagtcagctggggtgctggccgaggttgccgggtcaactgcgttttaacttgttccacatggttagtataaatgtgcgcgtcacccaacgtatgcacgaactcgcccactgctaggcccgtctccttagcaatcagatgtgttagtaacgcataactcgcaatattgaatggcacacctaggaagacatcgcctgaacgttggtagagttggcaagagagcttaccatccgcgacatagaattgaaacagagtatgacacggtggtaacgccatgttcggcacatcttctggattccaagcggaaacgattaaccgccgcgaatccggatgcgtcttgatcatttcaatcacattggcaatttgatcgatcgtctttccctgacgcgtttgccagtgacgccattgcgcaccgtaaacgtcacccaaattaccatacttggccgcaaacgcgtcgtctgtcaagatctggtcatcaaaggtctgcatctgagcttgataaatcggcgcaaagtcaggatcatctagccggcggtgttcaaaattcgtcatatcagggccgtcataatcggcactcgtaacccaatttttgaacgcccattcgtcccagatatggttgtgatgttgcaataaatactgaatattcgtatcaccatgcaaaaaccatagtaattcgctcttgatcagtccaaagggaacttttttggtcgtcaataacgggaagccttgactcaggtcaaagcgcatctggtaaccaaacacactgtatgttcccgtgccggtacggtcatccttatacgtgccgtgttctaaaatggtgcgcgcgagttgtaaataactatcttctaacatgcgatcatcctttcaggcttctgcatactggctgaggtagtcccagcgatccatcttctcatcaatcgtttgttccgtcttagtcaattctttttgcaaatcagccaacttgccataatcactggcattggcagccatcgccgcttcgatctcactcttatggctatccaattgctcgataaccccttcgatcttgtcgtattcgagctgttccgcgtaagtcagcttgactttggctttcttggccaatggtgcggtcgagtcatccgtgaccggcttagccgtagtttttgtcgcagtggccttggccgcgtctttttgatccttcaaataactggagaaacggccagaatagcgttcaatatgcccctgaccatcaaaaatcagtagtttcgtgccgaccttgtccaaaaaatagcggtcatgggaaacagtgatgacggtcccggcaaaatcatcgaggtagttctccaacaccgttaacgtaccaatatccaaatcattagtcggttcgtccaataagaggacgttcggctgttgcatcaacaacttcagtaagtatagccggcgctgttcgcccccagataacttgcgaatcagcgtgccgtgcatcgaacgtgggaacagaaactcttctagtaactcagtcactgaaacatgctcgccctgcttattcaagaccgtctcaccgacatcttgcaagtaattaatgatgcgcttgtcgcccggaatcggttcggtctgttgagtataataggccatcttgacggtctcaccgatcgtcacggtcccactatcaagtggcagtcgacccgcaatcacattcaataaactagatttcccggcaccgttgattccagtgataccgatgcggtcattggcttggatcaacatcgaaaagtgatccaggatggtttgccgatcaaactgcaagctcgcgtcctttaactcgatcactttcttacccaaacgctgctgaccgagcgaaatatcaacatcgttatcaacttggagcgtattcaaattatccttcaaatcattgaaccgattgatgcgcccctgttgcttcgtgctacgcgcgggtgctcccgcacgcatccaagccagttcctttttgtacagctgctgttgcttatgttcagctaacacgtcacgggcgacccgttcggctttcgcttgcacgaaatcttggtaatttcccgtatacttatgcagctcgccaaatgacaattcaaacatctggttggcgacttgatccaagaaataccggtcatgggtcacgacaatcaaagcacccttataactagctaaatagctttctaaccactcaattgagtcaaaatcaagatggttggtcggttcgtctagtaataaaagatccggtgattgaatcaacacttgcgccaggcccacccgcttctgttggccccccgacatctgactgacggtctgcgtcaggtcggtaatgtgcagttgtgtcaaaatcgttttgacatcactttcagccgtccaagcatcttcttggttcattcgatcctcagcggccacgtaagctttttgggtcgcttggtcttcgggatgatcagcataagcggccaacgtttgctcgtagtggcgaatcgttcgaaagacttgctgactaccggccaaaacggcatcaatgactgtcagattctggtcaagttccggcttttgctttaaataaccaatcgtataatttttgggcatcaccagttgaccggcttccggtgccgtaatcccggctaatacgtctaataaattcgttttcccggacccgttaacgccaatgacaccaatccggtcatgttcattcacaataaatgaaatatcgtgaaataacgtcttctcaccataagttcgggtcagattttctgctcttaaagtttgcattgttacgatccaccctttttttacatcattaagttctatcttagctagaatcggcttaaaacacaactgacaaacgcgcaaacgttaatatttcctaacgatcatcgattcgattgggtcgtgagtcacaaaaaaactcctgaggctcactcggccccaagagttgtttggcaacaccttattagttatgatcaccataaacatcaaagacggtccgttcatcatcaacgactaagtgtaattttccatcgctggctaatgagctcgtctgataaatgttgtcgataccatccgcatcccgtggcttgaatggcaagtaaatttgttcactaccacgttcgtcgccaaacaggatgtcaattttttcaatgtcttgataatgcgtcacccgttcaaacatcccacttgtcacggatgatagttgggtcgtgtccggatcgatcgcatcagcgtcaggtttaaattcagccttaaatgatttacaaggatgaatgatggtcatatggccacccttaattcgaccgtaactcgtcgttacccggccgatccacaggtcagagatatcttgatgatgaactgtccaagtgtcaccattccgaaaatgaaatttcaatgcttctaatgctcgttccattcaaatcacctcattgaattagtttcactttaatcgtaacagattcatagaaaatatcaatggttttttgaatccgctaccatccttgcaaaatcaagcaaagcatcctgctgatttgggacctgtttcatcaccacggcctgtaagcaagccgctagaatttgacccatcattggcccaggcgtcaccaatttagctttcaataaatcgccaccgttaatggccaattcatgcttgtcatggattggtaagctagcataagcttgcaccaattgtgcttggtcctggccaaagcctaaaatcgtagccacctgattagccgttttcagcgcctctaagcccgtataaaagttctcctgcgcagttaactgaccgttgtgttttaacgccatcagcgctttaatagcggccgtcacgtgattaatcagctcattgctcgtcttccacgtctttaacaactggcgaacagccgcttcgtcagtccgttgcatggtccagctaagcaaggtccaagtactttcaatactcggcaaatgccaagctggaagtgccattaactgccgcaacatcgcttcttgatcagccattgcgggcatataacgatacaagtcagtggtcagcaagccggtcaaaccagcaactgggtgctgccccatcagcagcttctcccactcgacacgcgtccgttccacggcaattttcgccaacaacgccgcattatcggcaatcgcttgttcggtctgcgattcaatggtaaagcctaactgacttgcaaaccgaacggcacgcatcatccgcagcgcatcttcgtgaaaccgttcttcagccactccaacggcgcgtaagattccttgttccatatctgctaacccgtcaaacagatcaatcacttcaccgttagcagtcatggctaaggcgttgattgtgaaatcccggcgcttcaggtcctctttcaatgatcggacgaacgtaacctgatcagggcggcgaaaatcttggtaaccagattcagtccgaaacgtcgtcgtttcataaccattgccgtgatctaaaatcatcaccgttccgtgctcgattcccgtatcaaccgtccgtttaaataattgtttgacctcagccggaaacgcgctggtcgcaatatcgacgtcatgtaggggcttccccaaaatcgtatcgcgaacacacccaccaacaaagtacgcctcatagccggccgcttcgatcgtctcaataatcggcttagctgcttgaaactcagctggcaactgcgtcaaaatcatagtaagtgctccaaaccaacaaagagttcgtgatactggttaactttttcaaccgccactttgacaccagtcataaatgagatccggtcaaaggaatcttggcgaatcgttaacccttcaccagggccgccaaacatgacctcttcgtgcgccactagtccaggtaaccgaaccgcgtgaatccgcatcccttcatattcggcaccacgtgcgccaggtagagtttcagttgcgtcaggattaccttgttcctttggttgccgaacttcagcaatcttcttagcagtactgatagcagtaccacttggcgagtcaatcttatcgtcatgatgcatctcgataatttcaacatctgggaagtacttcgctgcttgttgggcaaattgcatgagtaagacggcactgatcccaaagttaggcgcaatgaggccgcccacttgcttgtcctttgctaatttttgcaactcggcaacttgttcatcggtcatcccagtagtcccaataacaggcgaaataccatggttaagtgcaaactttgcattttcataaacggcggttggaatcgtaaagtcgatccagaccgtggcatccgtcttaatttggtctaaatcatgaaaagctggcacgtcttgacccttaaagcggtcgtcctcacctagattttgttctccactgcgcgcgtcatagaccccaaccaattcaaaatcaggattatcaatgaccatctgagcagccgtactacccatccgacccttatagccggcaacaattacttttaccacaataaattcctcctcaagattaagctaattatattttagcagacaattgccaaattaggcaggagaatcctcgccgaacctgtttaaactgttaaactacccccattttgttcgtacccaatgactaaaacggtcccgctaattaacttgctactttgtgagacgagccacgtccgtcctataacactgatatgaataaaaaatagtgtctgactcaaagcgtagtcccgctcggtcgaacactatttgcttatatatttcggccgtcaacaacacctggtgacgctaaattaacgtgtcaatcgtcgctaacaccccatcatgattattgtcatgtgacgtaaggtacgtagccatctctttgacaggtgcaatcgcattttgcatcgcaaaactgtaatcggcctcccgtagcatttcaagatcattaccgttatcaccgaacgcggccgtttgactagggacaacgtgccaatgctgctggagataagcaagcccggttgccttgttaacatgtggtggaatgacgtcaagcccattaccaccgctgacagttgcacgtaaccggccagcaaattgctgattgatcaaagcggcgtgcgcatcagcatccgtggcttgccaactaaaagtcgctttatagatatggtcatcaattgctgatagcgatggcaccacttgcagccggctcaaatagtaccgcatgatcggactgtcatcttggggccgaatatatgccccttgcttgccggagaccgagatctcagcaccagctagtgctggttcagtcgccacgtaaactaacagttcctgataaagcgccggctcaatcaggctttcagccaacacgttgccgtgattatcaatgactaacccgccattttcagccacatacgtcaattcaccattgatcccgtcaaaaacatcaatacaatgttgcagctgattgccgctcgccacaacaaagtgctggccctgagcattcatttgatccaactgggcctgaaaccgatggtgatcaaactgatggtcgtctctcaaaaacgtgccatctaaatcggtggcaataatagctactttcacgatagtaaacgcctcacttaaatttggtatacgttcattttaccaaaattgaaagtggtttcaataactttagaaatgaagcctctcagcaaatggtgaagaactaaaggcctagtagccctgatcctcgtagtcttctagcatcgcaaccatttcaccatcatctggttcaatcgttagataattccgcaacgctgccacggcactgtcggccattcctgcttcgcggaagaaataaattgctggcttaaggaaatccttgttatgttcaaagaacggataagccgcttcgtaattatccttagccgcctgaaaatgatcgagccggtcattagagattgccaagttccagtagaactgcggatcaaactcattactttgcaaatattgatctaacaagtcgatattgtcttgataacgttcccgctgaactaacaaattagacagttccaataccgtagtcaagttatcagggtcaatactcaagccttcccgcaaatacttttcagctaattcctgatcgtctaatttcaaggctaagcgggcagtttgcaagtacagctgctcattgtactggtcgaccgctaaaccttcttgtaaggtcaataacgccttgtccagttgatgaagttgctcttgggcctgggccaagtatgggtacagggacgcatactgattgtcttgttcccgcagtttgtcgaagatatcaacagctttctgaggttcgtttaattgcaaataagtgaagcctaattcaaactggctgtccggcgtgagcttggcaggcttgatttgttctaaataacccaccgcctgctcaaagcgcccggactcagcataagccacccctagtcgttcaactaagttaactttagagatctctagttgtccctgcttgatcaagtccaagtagaagcgagtcgcctgaccgtagttacgaatcaagaagtaaaattctgcgagcgcaaattcgacaactggttcgtccggtgccagctgataggcttccttgagtttttgctcactgacttcaaataactcttgggtctggtatagatcggcctcaactaacaacgcttgaacgtatgccggtgagtctggcttaacttgttgtaaatagtcgagtgccaggtccgtatcgtcctcatcgatggcaatatcagccagacttgtccgtaagtcgtcctcatccggatacttagccagtaacttcttataagtccgttccgcttgctttaaaaagcccaaaccgtacaattcttcagccagactatacagcgtctggtcatcatccttacgtaaggcccatgcaaagtgctttttggccgtgtcaatttgcccgtttgatagtgctgcgagcattttttctgaataactcattacacccatcctttaaaccactaagaaacgacttcatttagtcgccatggtttcatcatttatttcaatagtcagcctgatatcgtcacatgggataccagctgttaatcacttgaactgacagtctatcataccgcagacgacagcaaaaaagccagtataacggtcgctatactggctttcatgtttgcatttcattaactgatatgcattatttaactgcgtcctttaaagctttccctggcttaaatgcaggtactttgcttgcaggaatttggatttcgtcaccagtttgtgggttacggcccttacgagctgcacgttcacgtacttcaaagttaccaaatccgatcagttgaactttttcaccctttgcaagagtgtcttggattgatgcaaagactgcgtcaactgcagcagttgcgtctttcttcgttaagttagttgccgcagcaacgttgttaactaattcagctttgtttgccatgtttgattcacctccccgttacagagtgaaggatcgccgtgctttttaacatcgttgatccagatgatcatttttgagtggtccaaaaatgagagaaacgataacaagcatcatttcttcatcaaagatagcataggaatgctgtaatagcaagcttttttagccttttcagcgaaaatagcgcaaaaagatgataatcgtttacatcaatcaaataatgtgctaaaatgctgattttacgcgctttagcctacttacgtcgccgttcgatcatgtggatcggcgtaccactaaaatcaaaggcattccgaatttgattttcaaggaagcgttcatatgaaaagtgcatcatatcagggtcattcacgaagaccacaaaagttgggggttgaatcgccacctgagtggcatagtaaacccgtagccgcttaccattgtcactcggtgtcggattcatcgcaatcgcatccataataacgtcatttaaaacggacgactgaatccgccgcatatggttcatattgactttcttaatcaacgcgggtagttgctccaaacgttgattagtcttagcagagacaaaaataatcggcgcatagctcaagtaaacgaactgatcacgaatatatgcttcgaattcttgcatggtgtggttgtctttcttaaccagatcccacttattgaccacgatgataatacccttacccgcttcatgcgcataaccagcaacccgcttatcctgctcacgaatgccttcttcaccattgatgacaaagagtgccacgtcactattatcgattgccttgagcgcacgcataacgctataacgctcggtattttcgtaaacttttccttttttacggataccggccgtatcgaccatcacaaaccggtcaccatcctgatcagtaaacttggtatcaatggcatcccgggttgtcccggccacgtcagaaacgatgacccggtcttcacccagcaaggcgttgacaattgatgacttacccacgttcgggcggccaatcaaactgaaacgaatcgtccccggttcgtcctccccacttttttcaggaaagtttttgataacagcatcgagcaagtccccaagtccgagtccatgcgcacctgagatagggtacggatcgccaaagccaagggaataaaagtcatagacttcactccgaagttcagggttatcgactttattaacacccagcacgaccggtttgttcgaccggtacaagatttgggcaacgtgttcatcagcgtccgtgacgccttctttgatgctaactaaataaataatgacatcagcttcatcgattgcaatttcggcttgctgtgtgatctgtttaatgaatggggcatcttcgatatcgatcccacccgtatcgatcaaactgaattcttgaccaagccattcactgttggcgtaaatccggtcacgggtcacacccggtgtatcttcaacaatcgagatccgatcacccgcaatccgattaaaaatcgtggatttaccaacgtttggtcgcccaacaatggcgacgactggttttgccatattaattcctcctttaccctcgtagcgtcaggttcctgctacgagtctcaaattaattggtaacaccaactaatctgttcctaaaaaaatatccttcaaggcaagcttgaagggtatttttaatcaatcaatgattagttttcatcattgttgctttcagcattcttcaattcgtcaccgatcaaatcacctaaagtgaaaccagttgattcttcaggagcattagccgttgaacgttcgctagcagtccggttgtcccggttgttgttacgacgacggttattgttactccgacgttctggttgactttcgttgtcatcgtcagcagtttgtggcttttcttccaaagctttaattgataaagctaaccgcttttcgtctggacgaacgtctaagactttgactttgatttcttgaccaacttttaagacatcgtttggtgttgcaatgtgttggtgtgagatttgtgaaatgtgaactaacccttcaacaccagggaagacttccacaaaggcaccaaaactcgtcaaacgcttaactttaccatcaagtacagccccttgtggtgctttttcttcaataccatcccaaggttctggtaaggttgctttgattgataatgaaacccgttcgcggtcagcatcaacggataaaatcttaaccgtgacttcttgaccaaccttcaatacatcagcaggcttttcaacccgttcgtatgagatttctgaaacgtgaaccaaaccatcaattccgccgaggtcaacaaaggcaccgaagttcgtcaaacgagcaactttaccttcaacgacatcaccagcttgtaaggtcttcaaagcttcttcacgctgtgcttcgcgttgcttttcaacaacggcacggtgtgacaagatcaagcgattttcgctaggttcaatttcaataatcttaagttcaagttcttggcctttataggcatttaagtcttcaacataatgatcatcaatcattgaggcagggatgaagccacgaacaccagcgtcaacgactaacccgcccttaacaacttgcgttaccggagctttaatcgtatgacctgcttcgtattctttttcaacatcgtcccaaactttgcgagcttctaaccgacgatgtgacagtaaataactgccgttttccttgtcgctgccaattcgagaaatgacaaccaagtctaatacatcaccgactttagcggcttcgttgacatcgtcaacccgttgtgttgagagttccttcaaaggaacgaccccttcaacaccggtaccttggataccaacaattacttgtttgtcgtcgtcgattgctaagacttcacccttaacaacgtcaccgacgtttacttcttcaacgctgtttaaagcgtctaaaagttcatttttctcttggctgttttcgttttcactcatgcaaatttcctcctgtcaacaataactctaacctatatcatagctgaaaatgcaatgaaaagctagctaaaagcattaagttaatgcaattagattgttgaactttgtttttttgtaataattttggcaatggcagcaacaacttcatcgattgacattggcgtcgtatcaacaagtgtggcgtccgttgcttgtgttaatggtgacactttacgcgttgaatctttgtggtcacgtaattcaatctcagcctgtagctgagccaagggcgtgtcgatccctttttttacattttcggcgtatcgacgcttagcccgttcagccgctgaagcaactaaaaagatcttaacttcagcatttggcaataccgttgtcccgatatcacgaccgtccatcacgatcccacctgcattggccatctctcgctgttgctcagttaaaatcgtacgcacctgtggtaacgccgcaatcgtcgagacgttattcgtcacgtctggttggcgtatcgccgccgtaatatcttcctgattagcaaaaaccagttgatccggctcgccgggtttaaaactgatcttgagcgacttcattgccgtaatcacagccgcttcgtctgctaaatcaacgtgctgttgcattgcccagtacgtgactgcccgatacatggcaccagtatccacataaatatagccaaaccgttttgcaacgagtttggctacggtactcttgccagctgaagccggaccatcgatggccacctgtaatgcttgcttagccattaactaacccctcacaatctgaaaaaatcgtgtattaacggacacgtaaccgttgaccagccgaaatcgttgcatcagatgataacccatttaattccaatagcttatccactgagattccagcattcgtagcgacccgatagaccccttgaccggcttctaccgtgacgtacttagtccctgaagatgattctgaggagctactactactgctagcgctgctgtcgtcagtactcgcactttcttccgagctggcagcagtagaactagcagccttggaactggcagctttagagctagccaaggctaggctactacttttagcagccgcctttttcgacgatgcggccgccttcttcttgctagcagcagtcgatgacttactggcagcaacactggccgatgacttcttcgagctcgaactagcaacttgttcagtctgttgcggattattaagcgaattctttttcaccaagaaataaccaattggtgccaaagcaagcaacaatattagtacgactaacacggtcgttagcgtagagttgctactgtcttgttttcgtttttgagttcgcgataaattgcccgagtcatcccgatcgtcttcaaaagttttgtcccacggcttatccgcttgggatttgtcattatcatttttttgactcatagggtgttcctcctcaaaaaactttcaaccaatattgtaacataacccggaatcgatttctttaagaatttggtaaaaacaattgagctaagtgctgatcccacgacattatcgtggctgttgactcatcatgcgtcgccatcaaccctaacgcagccagcggtagtggttcaccagccaactgacaacactgatctgtatgggtaacagctggctcaccaaagtaagttaacatcacggtccgatgacaagttgtcgtttggacgtaacccatgagcgcccgcaattcacgttccttagctgcttggcgatcagcaaaaatcgttgccacggtcgttgggggagttccttgtagccagtatgactgcaaaaccttactacgatcatcagtcggtggctgctgcgcttgataacggctataatcttgctgaatttcattgggagtcgcagccgtcaattcgttcaaattccgcaccaggttttcgtcacctggtgcgtacaacataatcgccatcgcctgctgaccatcacgacctgcgcgcccaatttcttgaacgtagtcggccaaagtcgtcggtaaatgatagtggatcactaagcgaatatcagctttgttgatacccattccaaaagcagatgtagcacagatcacatccaattgtcctgccatgaactgctgctggatcttgaaacggtcatcggtcgctaagccggcatgataagccgcgacccttaacgtggttgtcgttcgtagccattccgctatcaaatcagtttgccgcttggaagtaaagtaaacgatgactggtccgcgcgcactcgtcactaaatgttgcaaggtcgcgcgtttactagcttcatcattgacctgttcgactgctaagtaaatattaggacgattaaccgaatataagacttgctgggcatctggaacggttaattgtgtcaaaatatcttgtcgaacgcgttgtgtagccgttgccgtgagcattagcgttgtcggtgcctgtaaccgttgtcgaatttgacccaggcgacggtagtcagggcgaaaatctggtccccaagttgaaatgcagtgggcctcgtcgataactaataacgccagttgcacttgcatcagcgctgtttgaataatgtcttgacccaacatttccggcgaaatgaacaagaatttaagctgtcctaaatgattcagcagatactggcgagcaccataatctagttgggaggtcaaagcagcaacttgcttttcgccttgatagtttaagcgagccacctgatcttgcatcaaggaaatcagcggtgaaaccaccacaactagcccgggtagtgcggtcccgacgagttgatagatcaatgatttgccggtcccagttggtaacactgccaagacatcttgacctgctaataatttctgaatgacggctagctgcccggggcgaaattcatcgaagccatatttcgttttcaacagctcatataattcatcttctgacatgctgacacctcataatctgaaatagccgaaattcaaaaaaatctagcgtgggtagcgcagcttgggcctcttggaatgaccagtttgcaatgtcggactgggctgcaaagatggtggtcaactgctgagttaattcatgattcaacaccatttcaaacggaaaatcaggcgaccaaatcgccacctccaacaagtgctcccgtaccgtactcatctttaagtgccgcgtctgcgcaattgctgcaagttgctgggtcttcaagaaagcttggtaagtttgctcagcgctttgactgatggcactcgcttgagtgagcactgacaacaactgggcaaatggatcacgcgggtgtcgctgaatccaagcaatccattggcatatcacgtccgtgtgcatcaagctcgcctcccagggttgccgacctaattgtgccgctaattgctcattagtcagtcccggttcttgataccccgttatgccttgaacaaacaccgttggtaactctgggtctgccaaactcgtcaagaaggcagtcaaggccgcatgaatttgctcgccaagttccaccttcgactgctgacgtaaccattgtttgacctgggcctgaatccccggatcagtcgtcaccggatagtaatggcgattatgatgtacgagttcggaaacgacttgtagggctagctgactgacgattctaaatcggcggacatcagtggtttgaaacacttcaaaattttggggcatgtataaagtctgccggagtttggcttgccgttgttcccccgtctgcgttaattgccagcatcccgtggccgtactcgtcaattgaccgttttcagtcaaagccgcagttgctgccatgaaatcttccaagggaacctcgtggcaactgtcgagcaaatccaagtagccggcagttaaccccgcaaaaagcgtggagaccgtacggcgaccgcgcaagacattgaataggccctttgctcgtcgcggcgttgtactgaataacaataaaacgtagtctgtaaacacgctaaggcctcccttaagtcttgctgttgtgattgttaattgcgcactaaatgtgccagtttttaaattaagtcgtgatcagcccaaatttacgtgcgtcagtgtcgctgacagtgacccgcgacacagcatagcgaccgacagctttttaatctttctaagccttgatcgaagcttcaaatttatcaacttactgccacattaaagctcatggataaccatccgccaaccggcagtgtgcgtctttaagaatatcacggtggcaccaatataaaaaggcagtcaccctgcagttacgcaattagtgaccacccacattattttaacgacttaaattaaattcggctcataagctgattatggttgcctaaccacttagctaatcgctgatagaccagccagaagacgttacccactagcaatcccttgatcaagttaaatggaatgactgccactaacaccactgtattcagcgacatgctgagcttcatacccattacttgcaaatagaatggcagaacaaacgttaagttagccaacgattcaatcaccaccaggccgattgtggcgaccacaatcgccacaggcatccgccacttgggattgccccgatagtaacgaagtactaatgcaaatgctaaaatcaatactgccgtacctaaaaaactagcaaaagaaccgattaagtcatagatggcaaagcccatcatggctgaatgtaggagcagtttgatgatagtgatgacaaacgcgcccccgacaccaaagagaaagagaccaatcagaattggaatatccgaaaaatcaatcttcatccatggcgctaccggtaaaatcggaaactccagtaacattaaaatatacgcaatggcaccgagtaaggctatgcccactagtcggtgtaacgttgtatgttgcataacgcaccctcctatgggtcatcttcaatgaaccgcattaccatttgttcaactaaaaaagtccgcccgatcacactaactgtcatctgggggcggacttacttgcaacgcttggcaaataagctcgatcttctttataccagactttactgtcgactttggaattgcaccaaatcactatgcacacgcataggtcgcgggttattaccgccggtcgggaatcacaccctgccctgaagatgaaccaatatttatttttacaaattcattttaacggctttcattcaaaaatgcaagcgctatcgttcaccttttaacttactaatttcaatcggcttcaatttacggtattcgcccggttgtaaactttgcaaatcgagaaccccataacgttcacgtttcaacttagtcactgggtgacccactgcagccaacatctttttcacctggtggttatgaccctcgtgaatcgttagttggaccagcgcattattcttcttgtgatcactatctaacaagttcgacttcgctggagctgtcttacggccatcgatttcaacacccaagcgcaattgcttgagatcagcattggttggtaccccttcaactttggccaaataagtttttttgacttcgtacttcggatgagttagccgattagcgagagccccatcatttgtcatgatcaacaaacctgaagtatcgtaatccaaacgtcccaccggatagattcgttccggtacgtcttcaaagaagtctaataccgttttacggcccttctcatcatgaacagttgtaacgaccccccgcggcttataaaataaataatacacgagtttttctgcattcaatggcacgccatcaacctcgacatggtcactaggttcaacctttacaccgagcgtggtgaccgtcttcccattcaccttaacgtgaccagacgtgatcaacacttctgatttacgccgcgaagcgatgcccgcttccgccattaccttttgtaatcgttctgccattattcatcctcacgttctgcttgtaatttatcctgaaatgcatttaaaaagaggtctgtctctggtgccggatgctcagcgtcacttaaagcagctaagtcaatcgctggtaagtcatccaaagactttagcccaaaataatctaagaacagttccgtcgttccgtataaaattggtcgtcccggctcacttaaacgccccgtctcagtaactagttgtcgcaaaaccagcttttgaatcgttgacccactgtgtacgccacgaatctcatcaatttcaatccgcgtcaagggttgccgatacgcaatgattgctaacacttccaacgatgcttgcgacaaactcgtggtgagtggtgcttcaaagtagcgctttaacaccggcgccaccgcggccttagttgctagccggtaagtattcgccgttgataagatcattagggcactgtctgggtcggcttgatacttcgtggccagttgtgtgagcatcgttgtaatcgccggcttagcaaaccccgtggcgtgctcgatttcggcgaccgtgatgccctcatcgccagccacaaataatagtccttcaatttgttcaatgttcgtcatgctgttcatcctgtcgtaaatataaatgaatcggactcagtggctcagcttgctgcagcgccacttgatcctgcttggttaattctaacacagccataaaggttgtcactaacatttcatcgctggcactaaccgtaaataggtcggcaaaatccagtccttgtggttgatgttgcaattgcgtcgtaatttgtgtcatccgctcatcaatgttgatggtttcagccacaaccgttttcgttagtggccgtacccgccgccgtttagccactaattgccgaaaagccgcttgcagatcatctaatgtaatccccgcagtcagcttgggcgcactcagatcagctggtactaacatcgcttcacgcgtaaaatgctgatggcgcgcctgttctttttctcgcaattcaccagcggcttcctgataaaccttgtaagccaacagttcagctacaagtgagtcacgaggatcatcgtcctcattatcttcgtccatctcatctggttcaggctgtggcaataagaaacggctcttgatcgtcatcaaagtcgcagccataaccaaataatcaccagcaatatctaattttagcgctcgcatagagtgtaagtaatccaaatactgctgcgtaattgccgcaattggaatatcataaatatccatcttgttttggcggatgaggtgcaacagcaagtcgagtggcccctcaaactccgaaatcttaatggtgattggttgttgttggttgtttgtcacgattacgctcccacgcgccaatgatcggcgccatttctaaagttcccatgacccgttgcttgggatataacgcggccaactcatccaacatttgatactggttggccgccgtccgttcctcgggtgataatgaatcgtgatgcagtagaataaagtcactgccgacttcaatgccgataataccacagaaatcgccgtcaccttgccgccatagtaatagttggtggtcttccgttgactgataccactgcatctcagtttgtagatgaattaggtccttaaaatctggaataaatgacagtagccccattgctaccttttcataatccttccgatatttaacgagcacggtattgcctcccttgactgcttgattccgcaccgcatctatgcccgcggatgatatttattataaacctcagctaggcgttttttcgaaatatgcgtataaatttgagtcgtcgaaatatcggcatgccctaaaagctcctgaacgacacgcaagtccgcaccattttctaagatgtgagtcgcaaacgagtggcgcaacgtatgcggcgtcacgtttttttcgatgccagccgccttgacttctgccttcagatttttccaaaccccttgccgacttaatttaccaccgtgattattaataaacaaatagctattccggcgtttggcagagacgagtttgggccgagccgtttttaaataacgggtaataaaatcaatggcaacatcaccgataggaatgatccgctctttatcacccttaccgattgtttgaatcaatcccaagtctaagtgcagatcatccatcgttaaattaattgtctcgctgactcgcagaccggtcgcatacatcacttctaacagagttcggtctcgtaatcctaacggggtattcaacttgggcaccgctagcaaccgttcgacctcgcgtggtgacaatacttgcggtaaatgctgcgcccgcttaggcgtgtcgatttttagcatcggatcagtatcgatagcgtgcatctgtgctaaatattgaaaaaacttacgtaaactagaaacactgtgaatgattgtatttcgcgatttaccagcctcatctagatactgtaaataattcaataggacgtaccgatcaaccacccgatagtccgtgatttgctgactcatcaagtattcgctaaacgtagtcaggtcctgagaataactcttaatcgtattctcaactaacccccgttcaacacgcaaaaaatgcaggtaatcagcaagctggtcctgcattttttgatcaatcgtcggcttgctcatccgcattttccagtaacttgatctcgcctggttgttgactgatcaagcgttgcttcaagagattacccacagcgcgcttaaattgtgatttgctgataccaaagtaattccgaatatcatcgggatcactcttatcccaaaatggtagcgcgtggtcagcttgatgttgcaatgctgctaataacatttgggcatcatcgccaatttcttcgtatccccgcggcttcaaggacaaattcaattcaccatcgcgcaagaaaccaatgacccgcgccttgacgtgttgccccatgcgtggttcctgttcacgttctgacggatgaacaaagcccagatgattgtcatctgtaataaccgacgtaccggccatcttcaaacgaaaaacggtcgccatggtatccgtattcttaacttgagcccggtcatatggcttggcaattgcttcaaaatccgtcaattctgccagcgtcgcccatagccgttgcttattgtcacgggctaacttaacgtataaacgatcatcttttttaggccatagtcgactgatggtcggtaattcgtctaatgacaccaccaagtccttatttggtaaaccaacatcgacaaagacacccagatcatgccgcgtccggacaaccgttccccacacaaagtgatcaaacgaaatttccgggacgaaccgcgtcatctgcagatgatggtcttcattctcataaacaaaaccttcgtaaagcccgccaatgtgcaatggcttctctggttcagttttatcgacccacaacgtctgtccatcaatctgtacgaagcatgcttcatcgttttcatcggttaccttcgccgtaaccactgttccaataatactatccatgtgataactcctctaatatatccgtctataaatatcaacggatggttcttttaaattactgtaagctcaaatgcaagacttgaataatgcaataggttataccagccgcaataattggcccggccgcgattcccttgagcaaaacaacacccataatggtcccgaatactaatgccacggtaatctctggtgtcgctgacaaaagcccgacaccgtgaaatgagagcactgaaaccaacactccacatgcaaccgcaatccagccaactggcgacttaaacgcatgccaaaggtcccgaaatccaatctgaccagtcgcaatcggaattaaaattgcgacggtaatcaccgtcacaccccaattgattcccttctgaccaatcgtcgtcagcaatttactcgtattaggaatcaatttgataagcaacacaaccacggtcgcaatttgtaaggactgattttttcctaaccatgccaccactaaaatcgctaataaaaataaccaactttccatacgacacctcacgtgttatcaattgtaactgaaaatggcccgaattacgaggggtgttggtcgttactcaccaatttcactatccccccctgatcaataaccgattcctgttctttaatttaggcgggaacagggttaaaaggtgccaaatcgtttggattccagctcgtcagcaaggttcgtcctattccgacttacggggctgggtgacaattgccggaacgtagccgacgtcgatttgagctcacgcagcaacccactgcgcaatctcaaatacgagtcttattctaggccggaagcaacccacttccagccaagaataatttggctactgagcattgtcacccaacccctccagtcggtaagccagtcgaatggctgatgaacgaccacctaacttgtcgctgaacgggtttactacttagaattttgaacatgcgttaatgctgtctcaattgttttggacacctcagtactaatacggtggaattagaaataatcgtacaatcacaattatattatcaaactaactgttgtatgataaaatcgctgttttaaaatagcaacatctaattcgttcaatgctgggtccacccatgtcggccattcgcatactatcacgactggaaggcgtttcggccaatgctcagcggtgaaattccacttagtaagcgtttttggcttggttagtggaagaccagtatttaagacgtggtcttcggcttaaatctgtgtccaccgcgttccagcaattggccgaaatgcctggaagtcggtataggacgccgctagctaagtaaatttccgctaagtagatctttttccagcgggcttaagctggatcatttgacgttgacgatttggcaccttttaaccatgtttcatactaatttaactgggagtgaagcactttatgtaatataaaaagccgccgcaaagcgacgacttttcaatatcaaattagatttgatcttaaagggcgtttgaagcaccgcggtatacaaggccacgacgtgaatcaactgtgatcaattgaccatcagcaataacactagtagcgtccttaacaccaacgataacaggaattcccattgagataccaacaacagcagcgtgtgaagttaaaccaccgttttcaacaactaaagcactagacttttcgattgctggtaagtagtctttgtcagtcgtcttagtaactaagacgccaccttcaacggccttgtcgatagcttcttgagcagacgttgcgattacggctttaccgataaccgtttcatcaccgacaccttgaccatcagctaacttagaaccaattaattggatcttcatgatgttagtcgtaccgcgttcgccaactggcacaccggcagtgatcaagattaagtcgccttccttggcaaagccaagttcaacagccttagaagcagctaaatcaaacatgtcatcagtggtttctggtttttcagccacgattggttgaacaccccagttaaccattaagccacgttgcgtccgttcgtcaaaagtgattgctaagatatcagcatttggacggtacttcgaaatcatcttagcagtgtagccagattcagtcgcagcaacaatcgtcttaatgttcaagttcttagctgcccgagcaatcgcaataccgattgtttcagtaacactagtcttgtcgaaacggtttaattgtaacgtaccgttttcagccaaagtgttttcagccttttcgtcaatcttagccatcatggcaacagattcaacagggtaaagaccgttagcactttcaccagaaagcatcgttgcgtcagtaccatcaaagacagcgttggcaacgtcagaagcttcggcacgagtaggacgtgggttttcttgcattgagtctaacatttgagtagccgtaataacaggcatacctaaagcattacacttcttgattaaactcttttgtaccaatggcacattttcagcaggaatttcaacacccatgtcaccacgagcaaccatcaaaccatcacaaaccttaagaatttcatcggcgttgtcgataccttcttgtgattcgatcttagggaagatttgaacgtgttccatgtgcttttcttcaagtaattcacgaatgtctaagacatcttgtggcttacgaacgaatgaagcagcgatgtagttgatttcatgatccaaaccaaagcgaatatcacttgagtctttttcagtgatcccaggtaagttgattgaaacgccaggagcgttaacacccttacgtgagcctaaaacgccggcgttttgaacagttgtaaccaattcgcggttagcttcgtccttttcgtcgatcttcatatctaataaaccatcatcaaagaggacatggccacctacatgaacatcatcatagaggttcttgtaagtaacggcaatcttatcatgggtcgtatctaatgaatcatccatggtgatacgaaccttgtcaccgatcttgtattcagattttccgttagcttgaacggtcgtccgaatttcagcacccttagtatcaagcatgataccaacggtcttacccgtaatcttttctgcttcgtgaactttgtttaagcgatctaaatgttcttcatgatcaccatgtgaaaagttaaagcggaaaatatttgcgccggcttcgattaatttaacaatagtgtcagtatcggtgctggcaggaccaagtgttgaaacaatcttggtttttttcataagaaaaatctctcccttgaaagtttttataaaaagacattaacgtcatttttatcaaattaaaataagaactaacatgccatgattacttgaatgaaatttcttcattcaacttatctaatgacacttcaacgtcatgcttagattcaaataaatctaagatgttgtggttgactaattggttgttttgaatcccaaccgctaagccacccttgccggcaagcaagagttccacagcgtaggcacccatcttgctggccatgacacggtctttagcagttggattcccaccacgttgcatatgagcaatggtattcccacgagcatcaaagtcaccatattcggataacttctcaacaaactcctgggcacccatcacaccttcggctaacacgatcaagttgctccgatgaccattggcccggttatgcttaatcttgttggcgatttcttccatgtcccaatcaacttcggggaccacaatagcagtcgcgccgattgaaacaccggaccataaggctacgtcaccagcgccacgacccataacttccacaacgaaagtacggtcatgactatgagccgtatcataaatccggtcaagggcttgcacgttggtgttgacagcagtgtcaaaaccaattgtgaagtccgtgtaaggaatatcattatcgatcgtccctggaagaccaatcgtgttgtagccgtgttccgttaagcgcaatgcgccatggtaagaaccgtcgccaccgataacaactaaagcatcaatcccaaaccgcttcaattgttcgatcccttttaattgaccttcttcatgggcaaattctggataacgtgcggagtatagtaaagttccgccgcgttgaatcacaccatctaagtcggctgcttctattttgtgaatgtcaccggcaactaatccagcaaagccgtaattgatgccgtatgcttccaacccttcagccattgctttaccagcaactgcacgaacggccgcattcataccaggagcgtcgccgccactggttaaaataccaatgcgtttcattttttcacctcaggcaataaattgagttcgtaactccataagtgattctaacacttttcacgtggattgtctgttattttctaaaattaaatgcgttaaaaaacgccgtcgtatcaagggatagcgttcttcatcaccacattatcgcgacctaataaggttgtaagcgctccaaccaaatctggattttctgcgacccaatactgtgaatttagttcaaccgttcgatgtgctgctaccgagtaaattagaactggattaggacctcgatattgacttaagatccttaaaatttccttttgcacagtcgccgttgcttgctcaggttgcaaccgcaaaaagagttggccggttggtttgggtaattgttccgccaactgccaggtgtttacgatcacttgcaaatcccgctgttgctcgaccttaccagtaattaacacgattgcttctggtttcaattccgcctgaatccgttgataggtgttgggaaaaatcgtcaagtcaatttcgccggacaaatcacttcccgttgcaaatgccattggttgaccacgtttggtccgaatcgttcggaccttagtaatatagaccagtatttgtgccggttgttcactcgtgagcgtgctgactaattgcgtatgtcgttgttgcgcgagccaatcatacgtttccacagggtgccctgaaacgtacacaccaagatactccgcttctttggccaatcgctcacctaacgaaagctccggctgttttttgatcttaggggctaatgattcaaataaactcatactgccaccggctaactcggcacttgacatcaattcaggcacactggtcagtagctctgcacggttcaaaccaaagtggtcaaaagcccccgcatagatcagtgcatccatcaaatcggctttgagccacttcgcgtcaatccgttgcatgaactgctgaagacttttaaacggtccgttcgcctgccgctcgtctaacacactcgcaataaagtcacggcgcaaccctttgattgagctgagtccaaacacaatggcttgaccattccaatcaaagtattgaccgctccgattaatatccgggggaataatcgccacttggtgctgacgagcttccgctagatactgtttcagcttcgttccattgcccaacacagaattcatcaatgaggtaaagaacgctccggaataatggactttcaagtaagcaagttcaaaagccatcttactgtaggcaatcgcgtgtgagcggttgaaaccatagttcgcaaattgttcaatatattgataaacctgtgtcgcaactgcttcggaataaccattctgttgtgcaccagcgataaattgttgccgcattttatcaatcacagcacgttttttcttgctcatcgcccgccgcaataagtcggcttcacctagtgtaaaaccgcccatgaccgcggcgacttgcatgacttgttcttgatagaccagaataccgtacgttggtcctaagatgggcgcaagttgttccgccggataactgaccggttcttggccttgtttgcgggcaataaaatggtcgatattttccatgggccccggccggtaaagtgcattgaccgcggcgaccaattcaaagttatccgggtgcagacgccgtaacacgtttcgaattcccgccgattcaaattggaagactccggtcgtgtcgcccgcctgaaataatttcagggtcgctggatcgttcaaatcgattttagtaatagccagtggcctgccagtttgacgctgcacataatgtagcgcacttgccatcaaagacaaattccgtaatcctaagaaatccatctttaacaaaccaaccgcttcaacagtgtccttagtatactgggtcatcatcatagtttcactacctgcttgtagtggtacgatctgaattaatggtttttggcttaataccaccccggccgcgtgtgttgaataatgtcgtggcaacccttccaaacggcgagctgtttcaaataataatttatttttagatgaatcagcaacgaggttttgtaaccgttgtgagccctggtaggcctggtcaagtgtaatatgcaattggtttgggattgcggcactccagtcactcatctcgtaagttgagaggccaaacacacggccaacatcgcgcaatgcttgctttgctgccaaggtcccaaacgtaatgatttgtgcgacgcggtcatgaccatacttatcatgaacataattaagtacctgttcacggcgattatctggaatatccaagtcaatatctggcatattcgcccgtttagcgttcaagaaacgttcaaatagcaagtcatattttaagggatcgacatccgtaatattgagtgcataagcaactaatgagcctgctgcagaacctcgcccaggtccagttgtaatctgggcctcatgcgcaaaattcatgacatcccacacgatcaaaaagtaatcatcaaagcccatctgatcgatcacggtcagttcgtgatccaaacggtcctggtaagcctgctgatcaaccgacggcgttattgccgccaatcgctccgttagaccagccgtgcataactgccgtaaataaacattcgctggttgtccagcgggcgttggaaattgcggcaactgtggctgttgaaattgtaattcaacttgacactgtgccgcaatttcggccgtagccgccaccgccgtcgtcaatcccagttgctcatagtcagccgttacggtgttggccggccgtaagtagtgactgccttcgataccttgtaacgattcgggctgttcgatctgttggccccgatcgattgctcgcaaaactgaaacggcaaagtaatcctttgcttggacatagtcgactggatctaacgcaactaccggcaattgatgctgttgcgcaaaggccgtcattgttgttcgcaatgcaggggcctgatccaaagaaatccctaagtaaaggctagcagagtcgaccgcctgcctcagcgtggtaatccaatcagcagctcgctcagcggtgttttgtaacaacagcgcagctagttcactgtctttagccggggttaagaccattaaatggttcaaataaggtaatacggctgttagcgacaatcctgcatccgtcgccgtctgcttcatcgtcgacaaccgcatcaagttttgatagccagcttgatctttcgcaagcacgaccagactaaacgtttgcgccgttagttcacgtcctaataagttcaatgttattcccaatatcggggtaatttctgcctggcgacaggcattataaaaatcaacaataccgtacatgatatcaacgtctgttaaagccaacgtggaatacccctgttgcttggcagtttggactagctcactaactgtactagtgctgtgaagtaaactaaaagtactcaatacttgcaatggaacatattgcgccactatcgccgccccctttcataaaatatcagctttcaactcgcatcgaaaacgtaacatccgatcagctacgtcaagcccgctcccaattgatgggtaaacaaagaatttaccagtctattcaatgccagttgatgaccaatcttgtcctcagatatattcgttactattcattataccaaacagttgttctaagcggcagttttaagtcatcagataacgtgcacggttatgtttactagggtttcaccgccgtctcgtcgtaattatatcagcctaattaaagccttaatatcccgttattacctaattgctttttcctgtcggtgtgttaaaataattttcattgggaggtgtcggaaaatgatgagacaacttacgattatcttttggagtgtcctcttcggtgaagtcatcggctatatcggtggcgccctcgaacaactctcctataatcctggtgaaattggcatcgttgccgcaatttttgcgctaatcgtggtcaacagcatcacttatattactaatcattcccaacccgctaaaggttcagataataagtaattaaaaacaaccagaggctttgcttcgcttagtctcagcacaacaaaaaaagacgagtatcccgattgcggttactcgtctttttttgttgtgtgcttgacgcgccagccaactagaatgctggtacatacccgaccctaacattcagattaatgacgcttacgatccatcacttgctttgagcatttgcagcgttttggcatatttctgctttgcgcgttgtgctgctgcccaaaatgccaaatcggccgctgataaagaaccacgttgtacattaatttttcgattcattttttgcatactggtcaaaccttttacgatcgtcgtccatgttcgcttactcctcgattttggagtagcttaacacgacagcgtcggcggtaacaactcttttctcagtatgaggttaaacgcacgggcgcaaggtccccctcgtccgaagctaagcgcggctaccatcatcataaaccaaagatagctgcctcacacctacacgatcaagccatccagaatcataggctcaaccaagtcacaataataatccgcctaaaaaaagctggaccgtgagcatcgcaaggtgctcacggtccagtttttattggcccaattatcgtcactgaaacgcattatcacgcgttcaaatcagtgattacgcttatgccggctgggtcgattggttttcgaagactaagtgatcgtccatcaaattaatggcgactgtcgattttggtgccacgcgccccgcaatgatctcttttgccagcggtgtttcgacgtgattcgtgataaagcgccggagcggccgggcaccgtatgccggttcatacccctgcttagcgatccacttcttcgcttcgtcagaaattttcagtgtaatctcacgatcttggagacgggcagacaaccgatcaatcaatttcaccacaatttcctcaattgcgcccaattgtagtggcgtgaacataatgatgtcatcgattcggttcaaaaattccggtttgaatcgactttgaaccagctgcataacctgttgatgggtgtcggccgacaagtgaccctggtcatcaacccccgccagtagcaactctgatcctaagttcgacgtcataatcaagatggtatttttgaagtcgacggtccgtccttgaccatccgtcaaccgaccgtcatccaatacttgtaacaagatgttaaacacatctggatgcgccttttcaatttcatcgaataacacgatcgagtacggattacgccggacagcttcggtcaactgaccgccttcttcgtaaccaacgtagcccggtgccgccccgaccaatcgcgaaacggactctttctccatatattcactcatatcgatccgaaccatatgatcatcggcgtcaaacaaattctcagccaatgctttcgctaattccgtcttaccaaccccagttgggcctaaaaacataaaagaacccaggggacgattaggatcttgcaaaccggcccgcgaacgtaatacggcatccgaaacggcatcgaccgccgcatcctgaccaaccactcgttcatgcaaatggtccgccaagtgtaataatttctcccgctcaccggcaaccagtttggctactgggattcctgtcatccgggaaaccacgtttgcaatctgatctggcgtgacggattcctcaactaaccaatcttcatgatgatcattggcttccatggccttcaactcttgttccagcttgggaatcgtcccgtgctgcaacttagctgcttgttccagatcataattattttcagcattttccaagtcgtgcttagctttgtctaacgccgactttttgtcgcttaacgcttggaggctcttcttttcactgtcccagcgttcggataaagcccgctgtttttcttttgcgctggcgagttctttttgcacatccgctagccgtttaacggaggcatcgtcagtttcattctttaaggcggcttcctcgacctctaaacgcattaattgtcggttgacttggtctaattccgttgggttggagttcatttcgacccggatttcagcagaagcctcatctactaaatctaaggccttatctggcaagtaacgatccgtaatataacgatcagataacttggcagcggccactaaggcgttatcatgaatccgaacaccatgatggatttcaaagcgttcctttaagccacgtaaaatactgattgtatcttcaacactcggttcagcaaccaatactttttggaaccgccgctcgagtgccttgtccttttccatgtactgacgatattcatctaacgtcgtggccccgatcaaatgaagttctccccgcgccaacattggtttcaacaagttaccggcgtccatactgccttctgtcttaccagcaccaacgatattatggatttcatcgatgaacatgatgatctgcccatcgctcttcttgatttccttgaggacggctttgagtcgttcttcaaattcaccacgatacttcgccccggcaatcagagaccccatatctagcgagaacaacgtcttatcttttaagttctccggcacatcaccacgaacaattcgttgtgctagaccttccacgatggccgttttcccaactcccggttcaccaatcaagacaggattgtttttcgtctttcgtgacaagatccgaataacgtccagaatctcttcgtcccggccaattactggatcttgattcccctggcgcgcctgtttaaccaagtcgacgccgtacttttccaaagcttgatactgatcttcctgattacgtgacgtgacccgttgacccccgcgaatacgatcaacggcattcttgacttgtcctgccgtgatgccttgctgattcaagtatttggtcaactgatcaccagtttgatccatcagcgctaaagccaaagtgtcggtcgcaaggtaatcatcacctaacgctttgcgcttagcatcggcagcctgcatcagcgtagctagactactgctcatactgccaccgtactgaacgttaccaccgctaacaacggcaatgtcatccagctcacggtcgagctctgtttgtaattggtctaaatcagcgccggcctcactaaagatctgccgaaccagttcgcctggttgcgttaaaaatttaaatagatggggcaccccaatttcttgatggcgccgtgtttgtgcgatttgttgtgcctgttgtaaggcttgttgtaaactttctgtaaattgttctggattcatatttacgtacctcctcaaaaacggtagcaaaaaggcagccgtcatagctgccaatttttgtttgacctttattgactattagagtataacccgtaaggtcaaacaaggtcaaggatttagtcctggtcataattatcctgaacgatttgtaagacaacgtccacggcttgggccatcacttgttctgaaacgtattcaaaccgaccgtgcatgttctcaccaccagcaaacaagtttggtgtcggcaagcccataaatgagatcttggagccatccgtcccaccacgaaccggataaatggctggcgtgataccgagcttgagcatggcttgtttggccaattcaacgacccgcatatctttttcaatgatttcgcgcatattgtaatactggtccttcatgtcgaccttgatccaggccacaccgtcagccaaattcagccgatccgcaattgccataaataaccgtttacgtgcttcgaacttatcgcggtcatgatcacgaataatgtaagtcatcttagcgctgtcaacggtcccgtctaaactaagcaagaagaagaacccttcacggccttccgtgtgttccgggacatcatgtgcgggtaacgccgattgaaaatcaacggctaactgcaaggcgttgaccatcttatccttagcttcccctggatgaacgttgacacctgtaatcgtcaccgtcgcttgggccgcgttgaacgtttcatactccagttcaccaagcggaccaccatcgacggtgtaggcataatcggcgccaaaggcaggcacattaaagtgatcagcaccagtcccaatttcttcatcgggaccaaaagctaaccgaatcttgccatgtttgatctcaggatgggccaacaaatattccgcagcactaatgatttcagcaacgccagacttatcatcagctccaagcagcgtggttccatcagttgtgatcagcgtgtgaccagcatagttctttaagtttgggaagaccgccggatccagcacatagtccccgtttccgagcttaataactgattcaccgtcataattgtcaacaatttgtggattgacattttccgcgttaaagtcagccgtatcaatatgtgaaataaagccaagagttttaacagctttgtcactattcgcaggaatcgtcgcaaaaacgtacgcactttgcgcatcctgttcaacatcgctcaagcctaaatcagtgagcttactcattaattgctttaaaaaggccgtttcacgtggtgacgaaggaattgtcgttgattcctcatctgaacgactattaattttgacaaaggttaaaaaatctgaaattaagtttggatattttgacatatgataacttcctttccttattaaagttcatgattaacttagatgaaggtaaacggatcagtattcagctgagacgccacaatctcgattggccagccagcttgtacacgccactgatcaaacagcttagtgagttgtgacttacaaatactctcgatatggtggcctggatcaatgaccgtcaacccggctgccagcatatcatgaccggtgtgataatagacatccccggtcacgtaagcttgtgcacctgctcgcaacgcttggggatagaacttaccaccatcgccgcccaggacggccacacgggtaatccgttgtcggggatcggcactgactagtcgcaggccgctgacaccaaatacttgtttacactgttcggcaaatgcctgcgctgataacggtgtcggcaaatcaccgactcggcccatataatactgatgaccgccagacaacagttgcacgacctggtaatcccacgtgtcagcggctaagtcattaatgcccgctaccgcagttggaatctgatcggctagtaagtcgacgctgaactgttcacccgagttgacagcgtaacgatctagcgtggcacccacggtattcgttaagtattcctgtaccgtttcaacttgattggtcggtaccgttaaagtcaacttaacagcctgtgcacgatacccaggaaccaatccctgcacattttgcaagtctaaggccgccgcaagccaatcgttcattccgccctcagcacagtccagattcgtatgggccgcgtacaccaagatgtggtgagctgcaagttctgcatacattgctttctgaggatcctgataatcaagattgttggccggtcgaaacatgacgggatgatgagcaaaaatcatgtcagcaccgatcgtgatggcttcttggacaacttccggccgcacatccagggtaactaacaccttgtggatatcctgatgaggatcgccgatttgtaatccggtgggatcatgctcccacttcaacttgagtggcgcaaatttttcaaaacgcgcaattaattcacttgcttgcatccgtcaagactccttcaatcaatttgattttagcgtgagccagcgctaactgttcctctggtatcactttagcccgttgcatttgcgcaaccgccgcatttactcgttgtaactcacgttgccacttagcgataaacaccggcgacttctcagctagcagaaacgggccaaacatctgttcagccgtcgtatacgtcacctgatgatcaacccgatcagcacaaagaatctcataagtatggccatcttcagctagaattcgttcagctacaatttgaaactgattggccgccagccattcccgcacggtcgcttcaccaacattaggctcgagtaccaaccgttgaacaccggcgagctgggtcggcccctgttcaagaatatggcgaatcaaagggccccccatcccggcaatcgtgaccgtatcaatacgatcagctggttcaatcgcagcaagaccgtcagctagacgggccactaagcaatccgttaaccccagcttttgaatctcatgacgcgcattttcaaagggcccccggacgacttcaccagctacaccataactaatttgatgatttaatgcgagattagctggcaaataagcgtgatctgacccaatatcggccacgcgggcgcccggctgaacgaaagcgccaaccgttgctaatcgttttgataattgttttgcatccacatacagttcccctttaattcgggaagatttacccacacgactaacttttagtggttgtggtcaaatccacccggttcaattgttttaattattcagtttaactaaccacgcacgtcactcgctatccttagtatgcaccaaaatcgaaacgtgctggtcgttgaattacgggtcggctctttatcagaaatacccaacgaggttcaactaagatcatggcgatacccaatggcctggaagttagcagtctgaacaaaggtcgcacactagattagacctttgttggccaatcatctttgaccttaaaaaccaacgcatttcaatggtgattcaggatagcacccgtatcaccgtacgttactaatcatattttaccatgcttcactgtgaatacgcattcagctggttaaattttcctgaaaattcctaagctttgttcaaactaactaaaattctattaatgcaagtttggatgacaggcagacgtgccataatatggctaatgtcgactggcaagcgacatattatctaatgagagaaagtttgattaaccatgcgaaaacgtcttttaacgacgtcgccatttttgactggcctaaaattattagctattctgccgccggtaggtatcggatggctgatttatttaagccggtggcaatggctggcgttactcaaacatccacgacaattcagtcggcacgacccgttgctagggtttatcgtcctattaatgggcatcacgacgctcaatctcaatcaccacgattatcgtagtgttattctgtctgtcctaatgctttttgtattgggcaatctttggttgttgtgtcgtgagtccacgcagtcgattgcttggcacgagcttcgtaaatttatcatccaatttggcttgtatattacaattagtggttttgctttccactggcttaaccaagtattgacattaccaacgtggctgaagttcatgctgggtgacctattatggggctatgctgctaatcagaatcgcttgttcgggtccgcctataatccaaatgatgcctgctgtttattattgattgccctcggcttactattgacacagttaagtcatggaagtgttcaccccttcacgcgctggccgctcataaactggtttttggtcggcttactttgtgtgggcgtttatcaaaccaaatcgcgcacagggctcatgatcatgattgccattctgatcatgacgacttaccagctttgccgtcaccatcgcattttggttacaacaatcttgattgctggcagtttaattgtctggcacgttttccctagaagtgcttcgaccatcaccgcacttcaaagtcgcttgacgatttggcacaacagcttcaccgttttcaaacaggccccgtacctcggcgtgacgtattttggctttgcgcggcactatttgcaactgacgggaacctacgtcccacacgcccacgatattttgctcatgctactagcttcttttggtatcctaggcggtgccggctttatttacttagtcctcagcagtggctggcacttaaccaaatattggcaccagtatcgtacgccgaatttgcgttactttatgatgactttgcccatcattctagcctatggattgacagacttcgttttatcttctatgcaagtattgattattattttgctcattatcgcttgttggcaccacgaacaacaattgcagccaatcattggccctcgcaagtatcagtctccacttatctgacacttttcatcaccatcaatttcgaacgggcagtaattccccatttcaaaaatagtgtgcgctgccggtcattaagccgcaacacacactatttttagcgtaccgttaaccaaatcggcgatatgccaacacagttaacggcataaaaatcacaataataaggaaaccacttaacagtacaccaaatgcatcgggcccccaatggccagtccgcaaaattgtgcgtatcgcggtaattgttagactgaccggattcaatcggacaattgtttgcaacaaatgtggtaacgtcttagtcggaataaaggcgttagataaaaaggtcagcactaaaataatgatcattgacagactgccaatcagggccgcatttttgaccattaaaccaactaaagcaaagacccatgaaagcgaccatccaacaaatactgccagcagtaaaacgccgatcaatactagcggactaacaataggtcgccagcccatcataaaagctgtcaccagtgccatcaagccagaaataagcaatcggaaaacatcccccactaactgaccggctaacggtacgatcggtgaaatcggtagcgtcttgaagcggtcaaacacccccgcgttaatgtcttcacgtaattgctgtccggatcccgatgctgcattcaaaatactttgaatcaaaataccggtaactagcattggtaaataggcctggacactgcccgcaatggccccaccaaacaagtaaccgaataatagggtaaaaataattggttgtatcaccacgtcactaacattatctggattatgccacatttttaataagttccgatgcgtcattgtcaaaacatgacttaactctgctggttgtttgatttccatcgctttgtcctcctctaatttgtgcccacggtcagtttaaaaaacacatcatcgagcgatggcgcgtgcatcgcaaagttactgaccgtgatttgagcagcttgtaaccgcatcagaatttcagtgaccggcgtcaagctagcggtatccaacggcactgttagggtccgttccgcaacacggacatcttgaccgagcatggcttgtaagatatccttagccggtgtgacggccgtcgtcgcactgacttccaattcaagctcttgaccccctactgtttgtttcaaagcggtgggcgtcccactggcgactaactggccatgatctatgagcgcaatgtggtcggctaactggtcggcttcttctaagtactgagtcgttagcaccacagtcgaaccatcggccactagttgacgaatcgcttgccacatctgcgctcttgtccgcggatccaagcccgtggtcggttcatcgagaaaaagaatggccggtttaccaatcaagctaaccgccaaatctaatcgtcgccgcatcccgccagaaaatgtggccaaaacgtgatccgcagaatgcttcaaatcaaaatccgtcagtaattccatcgctcgatgcttcgccgccgcacggcttaaaccattcaagcgcccaaaaatctgcaagttttcccgcgcactcaggtcctgatcgatactagcggtttgaccggtcaaaccaaactgctggcgaacgcgtcgggcttgcgacaatgaatcaaagccattgactaagattttcccagcatcttgtcgcaatagggtcgtcatcatcctgatgaccgtcgttttacccgcaccattaggacccaataagccaaaaatttcaccccgttggacttgcagtgacaagtcttgaacggcgactttcgttccaaatcgcttctgaacatgtgtcatttgaatcatcatttcttcatccaagttaaaacctcccacaaatcaatcaggtgccctgactaaatatatgttaaggccccctgactaaattgtcaacgactaattattgaccatcaatctaaaaatcaactaaccttaacgtaccgcataccaaagaatgttgtatacttaagaaaagaacgaatggaatgatcaatcgtgacaacgaatattaaggcggaactagtcgccggaaaattggccgagtacgaacaattaagcaaaatttatgatgacattgtcaagcaggcccgtccaagaataactgttgaaggtcagggcaagattctactagcactagccgatgaggaccacctctcacaaaaacagttggcaagtcgccttggcatgtcgccgcaatcaacgagcgagttcgtctataaacttgtcaatcgtcagctggtcactttatccaagtccaccaaagatcgccgcgtcaaccttgtgaacttaacggctgctggtcgcaaagagattgcatccgcagcccaggaggtccccccatttgtcaacacgctttctgacgacgagctcgatcaactggcacccttgttaaccaaaattaccaccgcgatgtatgcggatattgacgctgccaacccgactttgggcgttaagtttcacaaattatttgctagtcggtacttgaaacagtttaaaaagtaaatcatatgccacctgcccgtcatttttagatgacctcttgctccgaattaaccctgaatcagtatttggctctaaacaaacttaaaggcggaccaattcagttacgaattggttcgcctttagtgattatttaacttttaacaggaatcatagtttaccatttataatcaattgggtcctgtaagccccggccagtcgctttgtccaacataatgcgttgttcaaagtgcgccacatttcgtttagtctccttgaccatatccggattgactgaaacatagtcgatgccgctttgaatcaggaagttagtaaactctgggtactctgatggtgcttgaccacaaatcgaaaccgtcttgccatctttatgggctgtcttaatcaggtgccgaatcgctcgtttaacggccaagttccgctcatcaaagaggtgagccaccgtatcattattacgatcacaacccagaatcaacattgcaaggtcattcgaaccgatcgaatagccatcaacgaattgattgaattggtcggccaaaataatgttggttgggatttcagccatcatatagactttgaagtcagcactccgagctaggccttcatcgcgcataatggtcgttactttttgtgcttcgtcaacggttcgtacgaatggaatcatgacatttaaattcttcaacccaaattcgttccgaactttcttgaccgcagccagttccaacttgaatgcctcgatatacttggaatcatagtaccgagatgcaccccgccaacccagtaaatcagctggttcatgcggctcgtatttgtcgccaccctttaaattacgatattcgctcgacttaaagtctgagaagcgtaggacgactggccgtggtgccattgcccgaacaaccttcgcgataccatccgccagcatattgaccaccttttcagggtgaccctgctcgatcaagtatagtggatgttcatgaataaaggttgtccataggaactcttcgcgcattaagccgattccatcagctggtaaacttgaatatttgtcagccaaatcaggatcacccaaattcatcatcacgcccgtagcagttggagcaaagctctcggccgcaaccacctgaccagcaaccgccgtagcaccactctttggcttcaacatgctagcgactttaccttgataaacaaccccgttcttagcatcgaccgttacgacatcgccggtcttcaagacgtcggttgccgcgacttccttacttttagtgccgacaatacatggaatctgcatctcacgagaaacgatcgcagcgtgacaagtcatgccaccgttattagtcacgatcgctgcagctttcttcattgccggtacccaatctggtgatgtcattaacgtcactaacacttcgccttgcttaaactgatcaatgtctttcggattatcaatgacatgcacgaccccactggctaagcccggactagctggtaacccccggacgataactttggcatccgcctcatccacaacatcttcatcgtcagctgcatctttgtgcttattacgctgtgaccaaactgtttctggccgcgcttgaacgatccatagccggttggtattcgtgtccaaagcgtattccatgtccatataacaaccgtaatgccgttcgatttctttagcgtagccggccaattcaatgacttgcgcatctgttaatactggctgaccctgtaattcatcggggacggactcttccttagtcccgccacccggtaaccgcattaattggacaggttgtttgataatattcttttcaacgattttcattgattgtttatcgataacaaagtgatccggcgtaactttgcccaacacaatatattcacccaaaccataaatggcatcgatcacgatcttggaagcatccccatccgctacattgacggagaacatgatcccggaagccttagaaaagaccatcatttgaatcgccgctgagagggccactttttcgtgtggaaaatgctgtttgtgccgataatatgtcgcgcgatccgtgaacagtgacgagtaacattgttgaacccgattaacgacatcggcagcacctttaatatttaagtaagattcttgttggccggcaaatgaagcgtttggtaagtcttccgcagtcgctgaagagcgaatcgccacgaacggatcagtttgccccattttcttagcgagatccgcataggcttgttcaatatcagccgccagatctgcgggcattgtcgcattcacgatcaagttacgaatttgttcgcacgcagtatgcaattcatcagaattttcataatcctgaatgctggctaacaaatcattgaccttatcattcaatcccgtctgggtcatgaagtactgatacgcccgggcggtggttgcaaagccatatgggactggaacatccatcgatgacgtcatttcacccagtgaagacgacttaccgcccactaggttcacatcttcgcggtgtaattcatcaaaccataaaacgtttgccgtatcacgactactcataagattacctccctatgttcctgcacttgaatatcatcattatcaaacttaagttctgtaagcgtttacattaaccatttatattgtagttcatttttacacaaagtaaaacccattttcattattttatcggcaaaatatagttggtgatgttgactggttacgcccgttaaagttcaacacaggcttgaaagaaaaggcatttaatggggacatgttttcaaatcaactcggattataatgataaactgtaaggccaactaattaacgaacttatttcacaatatacgaaatcaactcattgtggacgacgcaacccagtgtttatcacaaaaacgcaagcacttcaactggcagttgcatccctttccagccttccagcgctcctgctaattcatacgcgtcaaagcctgcggatagtagcacgagtaacgccgtcttgcctagggttgttccccccgtccaatcgtacacgacataggtcttcgccggatccagttcactgattctggttgccagatccttggcaggcatcgcgattgcacccttgatttgatctttcttcacttgggccggtgcattccgaacatctaagacgacgtacttgcccgtcgcattttgcatatcggctaaaacggtgtgatgatcgatgtataagcttaaatatgttgttaacaattcaattttcttgtcattcataattaattgcctcactttttaattgttgggtgccttgcttgattttatccaataagcctttaaactgctgctgctcttgaaccgtaaacgacgcaaaaattgttgtaaccgccttaaaattggccggtaaaaattgcgtcaaaacactactaccggcggcggtcaaatgaatggcaaccgtccgcttatcatcttgtggatgctgcttttccacccagcctcgcttttgcaagccgaccagtaacttgctcacagtcgcccgagcagaccctagctttgtggctaactccgacggcaatagcgtgtgatcagtttcattttccagcaacattaaaataataaacttggattctgaaagttgatattgatcgagtaattgttcataggtggcttgcatggttcgaaatgtccactgaaaatccagaaaagccaacacctgctcagcatccgccgagctacttgctttgcccagtgtcaattgcactcgctgtttatctggtcgatcacgaaacgaaaagtcaggcattgaaatccttctttctaaagttaattagccggctaactacttttagaagtatacacgctttttcatcatcgtcaacccttaaatcggactagctgttattcgaaacactcaccatccaaataaccctagccatcaagcaccacgacatttttcgtttaaactgatgcagattgaaatcaatagattagcgtgcacgactcaacagaaaataagcagtcagttgtgaaacctcccaacactcatgaaccctgcgcacaccaggtccagtacaattgacactcaccataatcgcatatgctatactgatgatcacgatacctattgatttggaggagtaccctaatgcacaaattagctattttggtgatgacaattggccttgcacttgctggttgtacgacccaaacattcgctccagtgaagcatcatcggtccgtcaaagcgacgacccaaaaagtgattcaagcaccaaccaaaacatggacttttgatcaagccgttagttccagccaaacaaaacacggcgtcgccagcaatttagacatttccgtggttgacaaaactactgcccaatcaagctggaccactagtaacggccaatttttgtccgccggcgtcaaacatcgtcaagtttcgtacgccaaatggcaccatgatcagcaacgccatatcatgaaaagttaccgacaccggctgcatcacatgtcagttagtcagatcaacgcggttttgaaaaagctcggtgcctcaatccagattaacaaactgactgacttgatttacttggaatccggcaatcacaccgatccgttaccagtcaacaccgcctttgctgctaaggggcaccacctctacgctgtcaacattcaatattcagatactgaacaggcaacgaccattgaacggggccgcgctttcactgatactagtgccaaggcggcgcctaaacacgtcaacgtagcgaatttgaatggtacctggattgctgccgaaactacgactagcgctagcgatacaggcaagttgctgatcaaagatggctatctatatcagcatcgttatgatagttatgaacgatctgctatccaggacctcagtcactattcattaggctcactgaatcaaaacgtgacctatgcggccttcaaaaccgatgcagcccacgctggctatcaattaacacataccgccgttgccagtggtgatagtaccggtatgttatatctcatcatcaacgctaataaaatcattcgtatcaatcagcagattgttacgacctatacgaaaaccagtgccgtcgtcgctgctaacgacctaccgaaaacagacgttgatttatttaagcaaatggatcaaaaaaaagctggtgaagtcgccacgacgattacggtaaaggccggtcccgcgcaagttggcatgaccaatagtattaactatctaaccgaccccaatgctggtcaaattacagagacaatcgtggtcaactaacaaccaaacaaccaggcgcttcatttgaaaaattatcaggtagtcacttatcaaaaacgctacttcataaagcgcgcagcaaaagccctgttgacctaattcccacatcaaaataagcacgttgtaaaaccacactctggtgatttttacaacgtgcttattttgtcatcgaacatctgcacagcatcaataattttatgattaacacagtaacgcaatttcaatttcacgacacctcaagccgattcagaaagtggtctggtcaacttacatcccagtatgacacgacaattgtcccgctttaatcatgaagaatacgactaattacaaggttagcccctaatcatgctcgtattcacgtttaagtcgcatccatcctgcatgcagaccaaaagccgttgtaaaggacaataaccaggtcaaaccataacacagcgcaatgctcagccagggagccttgaccatcaaagtacgaccaaaaccacgccacaacaattcagaccagaaaacattcgctaagtatgccttataggccataccagcaaagaaatgtacaaatttgctaaaaggacgttgacgacaagcttgaatctcacacaacgccgccaacaggccgatgactgctagcgcataccccgtcattgatggtttgtaatacggggcgttgcgcaaattaaccgggaagccgtaactgaacagttcccaattagtccagatcaggccaactaaccatagaccaagtaatcccggccaccacttgttaagcatgcgctgaaaggtatctcgaaacacccaagctaacatgccatagaacccgaaaatctggaaactgataaaaagccggtccagtaaataccaatcacggctgtgaggaccatggaaaacttgttggtcataaaaccacaaccaaagaacggcgaccagtgttgtaccgccaaatacgatccagccgcgtcgaggtcgagactgacaccaacggccaagcgcccagaataacggcattaatatgataaattgtagcatcatggtgttataccacagatgaggcgctgcattaccattaacgaactgccagaaaaatccccgccagtcatgatactggctaccttgctgcaattgtggcatcaagattaagtagatcatggtccaccaaatcgttggaataaacagcgcatgccattgctggcgcaaatagtcggtataggtcaacgcggtctgattaagcgtcaaacgcgtcgtcgtatagagaatgccaaaaataaaggccggtgccgtatacttgaccagattataaacaacaccaatcccagtttgcgtggcaatcgacggcccacttgccaatgcgtctgtgagaattggctgggccatcaccgcagtacaggcccctagtttgaggtaatcgccaacgtcagtgacctccatcgacggactagaaatcatcgtcactgctaccacctcttcgaatttttaccagatcaaccgatggtcaaccttaaacccagtctaatagattcccatgggattacaagtacacttcgcgaacattaccagctaatgattgtattttttgatacgattccaactgctttacctttcaagcaaaccatacacttaagcgaccatttaggcaaaaaaatcgcgtcagaccagtcagcattagccgatttacggtcagacacgatcgtgatttctttattatagattcctttacagatttcaatccggtggtctaagccccacatgcaagtactaggctgagcagtatccaaccaccagattactcagcgttttggtccaacaacacaatgacctttccaaaactgtctgccgcttgcaaataagcatgggccgccggtacctgattaaagttaaaaatccgagcgggggcgaccgacacatgatatgctgcgatgaagtcaaataaatcttgcaacaatgtctgagaaacatcgccagaggaaaagcccgctaaataacacccattcggaatatcactaatcgggtcaaaatcaggaacggtccacagcccacctaattcgcccgtcatatttacaatgccgccttcgttgagatgcgacaatgaatctttgacactgagcggaccaatcaagtcgatgattttatcaaaatgagccgttgcggctggtaaacgagcgctatccggagcgacaatgacctcatcaaagccagcatcaatcaattgttggcgcttaactagccgccgagtagtcccggccacatggatctttggattataagccttgatcagatttaaatcggcaattccaaccccactagtagctgctcgaatcagcacccggtccgtcgctttaagctgcaaagacttaaaaatgccataggccgtgtagtaggtctcaggggttgccaccaatgaggcaatcgatagattcgttttgatcggataaacctgctcgttcggtaataatacgtattcggcataactaccatcatatgcccgacccatctcacccatgattgaaaccacacgttgcccagacgtgaatgttgctggcgcactggtctcatcgaccacaccaactacttcgattccgagcactcgtgggaactgcacgctcggtgacttgccttcccgcgtaaagatttctgagtggttgataccaaaacctaaaacttttacccgggtccaccccggtttgacgttcggttcaggaagtgtcgttaattgtaacgcttctggtccacctagttggttcacgacgtatgcttgcaactttgctacctccgttcgtttttaatgccaatttaacgatagctgagattcacgcttttcgcaattaattaatcccctgcggaatatcagcattgcaatcatttagtcaatcgtcgccagaggtcgccggccaccgtcaaaccgataccagtcattaacactaattacgatcactattaaagttagccagccactaatagccggcactccccaaccactgctagctaatccgatggtcaacagacagttcaagccgatggtcaacccaactgcgcgactaggccgtccccgccaaaatggaccactagtacgagtcatcaagattgttaacattgcactaaatatgagatagacgtaaagactagtgctcaactgaccagcagacaaccccaaaccatgcagccagactatcaaaccaacacccacagctgtccacccagtcgctaggaaccccgcaattttgcttaagcggggcatatcccactgttcgggacgatggcgaatgattgtgcgatcagtgccaaggaccaatgttactaaatcattcagaatagccactaataccatcgcattcagcgacaatggcacgtaatctagccataaatagccgattgttaaaagcacggtcagttcgaccgtccgagtgaatttggtaattgtccaagtcagcatccgctggtagacgcgatgaccactgtctaaaatcgtcagaatatttgccaaaccacccgttaacaggacgaacttagcacttcgtttggctaaatcagtggcattgtcaacggcaatcccaacctccgactgctttaatgctggcgcatcattaacaccgtcgcccgtcatccccaccacgtaacccgcgcgctgcatagctttgacaattgccaatttgttctctggaacaacttcggcaatcccagcaacttgcgctaacggtcgcgagtgcgttttaaaggtctggtaggaaaccacttggccctttaatccaaccgcatcagccacagcctgtgctgtttttaaattatcgcctgtcagcataatcgttttaacgccccggtgttgaatcctttttaaggccgccgcactatctgggcgcggttgatcttgcaaaatcaacacaccttgtaaaacattattaatcatgaccgccactgaacggccccgggtcaaatccagttggttgattgctaaagccggttgctgtgcggttaactcgtacaaacgactaagtgcaccaatacgtacccgcacaactgttggcgcttcaccaactagcgcttcggcataaccaacacttgcatcaaatggcttaaattcctgctgtggcagccgtttcaactgatagcgatgagcaaagttcacaattgcttgatccaccacgctaggatgtcgcgaatcggtcgcgctagctgctaaccgcaacaattgctgatctgatctggccgacaaatttttaaactgcacgacttgcggctgatttgtcgttatcgttcccgttttgtcaacaagtaataaattcaaattggcagcttcctgaatacccgttaattcactgaccagaatccgctgctggctaagttcacgggcttctaccgaatttgcaactgcaaaacttgacggcatggcaatcggaatcgtcgcaatgaacagcatcgctagaaacggtaacatctgaatcatgtctgcatggcgaattaacgctattccaacaatgatgagtgctaaagcactgtctaacaatgccaagtaaccaataattttacccaataatcgttgtaaatgaccaggcgcattgttttgattaatcaaactgactgtttttccagcccgactatgacttccagtcgccagtacgcgtgctaaagtttccccggctaccaccattgtgcctgcaaaggccgtttcacccggcgtatggctaactgcaacggattcaccggttattgagctttcatccgtatgaattggattcgttaacacacgaatatcagctgggattacactccctacctgtaaactaatcagatcacccacaactaaagccttcgcatcaatcaactgccaatgaccagcacgacgtaccgaactggttggcgtcaattgatgcgccagctcctgtaaaaccagggccgcacgtcgcgattgaattgcaccattgacggctgcaaagaccagcattaacgcaataaagccagcctgaatttctttacccaaaacaacttcaataactaaagctccctccaaaatccatgccgatggttcccatagacgactgactacggccttaaaaaagttaaacgttggttctgggacatcattaaatccatctgccgctagtttagcggctgcttgttgctccgttaaatcttcaatcatgtctgcacctcgaatttgacaagcaccactggcaacctaactgtcgaatcaggtttatcacaaataattagtcaaacatcacgttatttgggaagtgtgccaaccgagcaccatcagtacctaattcttcctcaattcgcaataattgattatatttttcaatgcgttcagagcgggctggcgcaccagcttttagttgagccgcattggtggccactgtgaaatcagcgacgaaagtatcaccagtttcgccagatcggtgtgacatcatcgtggcataaccatttttgcgagctagccgaatcgcggccaaagtttcggtaacggtcccgatttgatttaatttaattaaaatattgttagccatcccccgctgaattgcttgccgaattaattgcggattagtgcagaccggatcatcagccacaatttgaagctggtcaccatgagcagctgtaaagcttgcaaagttatcccagtcctcttccccgtatgggtcctcaattgaaacgatttctggaaacttcgctaataactgcagataataatcaccaagggctgccggcgtgtacgttttgccctcaaagtcataattgtgggtcgttcgattataaaaatacgatgccgccgcgtcaaaagcaatcgcaatttctttaccaggtgtataaccagctttaataatcgcatcatgtaatatttgcaaggcttcttctgagtttttaagatcaggcgcaaagccaccctcatcacctaaaccagtcgtgtacccggcatcttcgataacttttttcaaagtatgataagtattcacgatcttttcaaaaccgtcccgaaaactggttcgttcgaccggtgtaatcatgaattcttgaatatcaatgccattatctgcatgctccccaccattgatcacgttatgaaatgtttggggtagctctaaatcagtgccacctaagtaacgataaagcggctgctgtaatgcgtttgccgccgctcgtgccgttgccattgaaacacccaaaatagcattcgcacccagacgcgctttgttgggcgtaccatctaggtcaatcatgatttgatcaatatgggcttggttaaacgggtcagcaccatgtaaagcatgattaatgaccgtattaacattattaacagccttaagaacacctttacctgctaaacgatcaccaccatcgcgtaattcaactgcctctttttctccagtcgaagctcccgatggtacttccgcgcgtcctagcgtcccatctgacaaaataacgtcagcctcaactgttggattacctcgtgaatcaaaaatttcgcgagcctttaccgtttcaataacttgtttttccatatcaatctctccttcttaaccaaaaagaaaagacgcctactgtctgaaaaacaaacagtagacgtcatcaaattgattatcaattattatgtggcgaacgtcatcgccgattaacttttgaacaactaaagattacaccttctcaaaacaatgtcaatctttttataacatttttatcgttgaccagcttgacgcgtcttcattgccaatatcatggtccccaattcaatcagcactaaaatcagcaacaaccccaaggccatggttgatcctaacgctgtccgatgcgcactcgttccagtcgtctgtacttgaactaacgtgataacggcggacacgactgaagtcccaatggcccctgcaaactgctgcatggtattgaacacggcattgccatcagcttgatgctcagctgacaactgctgtaagccactcgtcatcgtattacccatggttaagccaataccaatcattaataaaatgtaaatggctaaaatccaaccgcctgacaggtgcatccccaacaccgtaaacagtgccatggcaataaccaaaattgttgaacccgttaggactggtttggctgcacccagactgtctagaatacgtccacctagtggggcaaaaacagccccgattgccgcgccaggtagtacaaataagccagctaacaaagcactcttgccgttcactaactggatgtagttgggcaatatgaaggccaacccgagggcacagatttgaaccaaaaagtacgccattaagtgcaaatcataagattttgtggtaaaaatcgccagattgattagcggttgtgccgctcgacgtgtgcggataacgaaccccacaagaccaatcagaccgaccactagccaagccacaaaaatcagtggttgcgtggtaatcgtggctaacttgctaaatccaattgtaaagccaacgaataagaggacgatcatcagccaaccgaccacatcaaatccaactttaactgtcggctgggcttgtcgaatcgcatacagccctaacacaagtgaaatcacgagtaccgggattagcaatacgaaaatccaatgccaatccatccaactaacgatcaagcccccaaaagtcggccccagtgctggggcgattgcggtaatcagcgtgccaattcccatcaaggtccctttctgccgtgctggtgcccaatcaataataatattaaacattaacggtaaagcaatcccagttcccattccctgaatgattcgtccagtgactaaaacgggaaaactggtcgcggtcgcgtcaacgaccaatcccagtataaacaataaattggctgtcacaaacagcgttttagtgcgaaaacggcgtttcagaaacgccgaaattggcacaataattgcgactactaacaagtaagccgtggtcatccactggaccgtcgccgtattgagtgcaaattctcgcatcaacttagggaaagtgatattcatcgcagtctccacgatcactccgcaaaatgaaagtaatccggcagccacgattgcaagaatcaatttgaggtcaacacgtttttccatacttaaaatcagctccttaacctatagttcgaatacgaactaattaactattttagcacactatttcaaaattttaagccctattttaattgactttttaacaattagttcttataattcactttagttagaatacgaaccataatatcattaaggagtcctcccatgcaagattcattagggatcatgattaagaaagcgaacaatgcattagccagggactcagaccattatgcaaaatcactgggactaactggcatgcaaatcagtacgatcaactttattgccaacaatgaacagcatcacgacctcttccaacgggacttagaattagagttcaatattcgtaaagcaacctgttccagcctcgtttccaaaatggaagccgctgatttactcattcgtgtgccagcaaaggacgatggtcgctacaaacgactactcctaacacccaaggcccgccaattagccaccaagatcgaacgtttctttgaaaccagtgaacaacgaatggcgacaattttaggggtaaataccgccgaaacttacgaagccctgcgacaaattgccgttgctttttcaacaccgacccatgcacctgaaaattggtactaaccattcaaagacccgctgacagtcactgactgctagcgggtctttgattttacgatcaatcaacaccgattactcggccaaaaaacgtgtaaacagctgttgataaattgcaataaagtcataaaacatctgttttggtaaactttcattgacctgatgttgggtcatattacccggtccataaaccgcaaagggaaaatcggctggttgacgcttagccaaattagaagcatcggtaattcccggacttgagacaacgacaacatcgcggccagcatagggcttgccaatggcctgcactaactttactaaccgattatcagccgtggttgcaattggtgactcattcatgatagcggtcatcttaatgtcagcaccttgctgattatacgctgcgatcaggtccgttaatttttgggtcacttggtcattatcgtattccggaatcgtccgcacattaacgagtgcagtcgctaaatcgggtaacgaatttacttggtccccaccgtttaacacgtcaatgttaaatctgaccggtcccacctcgcctgccggaatcgtttcaaaatagtcattggcttcattgagtaatttaatcagcgggactaaagcattatagccgcgttcgggtgtcgaactgtgtaccgccttacccttagacgtcaattttaagtcataagaccccttctgctcagccgctgttccataaaccgttgaaggttcagcaatcagtaaaccagctgcatcttgcatcgccccttgttgataaaaggcagctgagccagcttcaccaacttcttcgcccattgtcgccaacaagcgaatggtgccatgtttagggccaccttgctgctgaatattgatcatcgcagcgactaatgcgactaaaccagccttcatatccgtgacgccccgaccaaataactgaccggatttttctactaaggtgaaaggatcggtgtcccacgccgccaggtcacctgccgcaaccacatccatatgaccggaaaccgctaaaacaggctgcccatgaccaatctctgcaactagatttgcacgatcaccggtaatggggtaaatcttagctgaaatatcatacttcgccaacagggcttgcaaatattttgcgaccgtcaactcatggtcgttaactgatggaatcttaatcacatccgctagaatcttaagcgctgcatcgtcttcaatcgttcgcatattttgccaccaactttcttatgataatttcagtctaacacttctgaaccttctattttacccaatagcctctgctacgttatcaaattttgttgaaattaatatcttagttatcaatcatcatgttcgtgtcaaaattgaggttcgccccgttgtctgatcattaaaatattcatactgaactagttcggcatacgacccagcaatgttgaccacattcgtatagccgcgctgaagtaacgcgcggaccatattgtaacttcgctgtccagtctggcaatgaatataaactggctgattggtcggaatttccactaagcgctgccgaaactgactcagtggaatattatgagcgcccttgatgtgcccatcagcgtactcttgtggttcacgggcatcgatgataaacgcccccgccaagaccagctgtcgaacctgcgtcaccgcaacctgcttaaattcatcattcaggacgttttccgccaccaagccaaccatgttgacgacatttttggcggtactgacccatggcgaataacataattcaacatctgtcaggtcactgactcgaccgtgcatcgtgattagactagcgataatatcaatcggtttgtcaacgtccgattgaccaatggcctgcgcgcccaaaatctcaccggtcggataactgaatatcaacttaagaaagacggctgttgtccctggcatcacgctgacccgattctgtggtgccaccgttgcgaaccgataatcaagttgctggtgatcacactcagtagcgttcaggcccgttgacgccacgtttaacgtaaagatgtgaagaacctgcgatccgatcacaccctgatactgtggcgtccgcccgtataaatgatccaccatgtgtcgggcctgcatttgtgcgggaaatgccaatgctagccgcgtagattgacgtgtaagccgattagtcacttcaatggcatcacccaccgcataaatgtcggccacggacgtctggtaacgatgatcaaccttgataccaccggtcacgcctaacgcacaacccgcttgaaccgctaattcagttactggtgtaaccccaattgccacaatcactaactggctggtcacggcgcgtcccgaggcgagctgcacttgtgttgcaccaatggccgtcacttgttcttgcagtatcacctgcacaccgtaatcgtatagttccttgtgtactagctgagcaaactcgtcatccaaagtgcccaagacgtgttcggcagcctcaatgattgtgatctgatagccagcctgttgtaaattctcagccatctctagtccgataaagccgccgccaacaatcgtcacatcatgaacgtgttgttcagtcagatacgcttgaatcgttcggacatcttgaacattgcggaccgttttaacattgggccggtcgattcccgcaatcactgcgggtagtatcggtcgagcaccaggtgaaagaatcagtgtatcatatgggacgatcgtcgttgctacctgtccttgccgtttgatcatcactgtcttagcctgcgcatcaatggcgacaaccgttgtattcacttgaacgtcaatattgtactgttgctcgaattgcatcggtgtctttaaaatcacgtcatcgggctggtcaatcacatcactgaatgtgtacggtaaggcacaattggaaaatgagacatccggccccttttcaaaaattgtaatctgggcgaactcgtccaatcgacgcacgcgggccgccgccgaagcaccaccaccaacgccaccaacaatgaccacttttttcacttccatctgaaccatcctttcgtaggtatgctgtagccctgccactaattagcttaattttaagggtttcaaggcgtaaccacaacatcaacgccgattaattcaaccgttttcattaattgacgtcattggctttctatttaagctaaaataagttagtatgtgtttaacacttaaaaaagcttaaggtgatcaattatgaaccaaaaaacacgcttaacattgattcttgatgaattaaaaaaccacccatcactgagtttaaaagacattatgcaattaacggggacttcacgcgacactgcccggcgcgatattgtcaaactcgcagctcataatttggctgaacgaaactacggcggcattagtcggccgaatacgtttaataagctagatcaatacctggaccgggatgatgacttactgcaaactaaacgagccctggcccacactgccagttcgtatttactaaatgatgcgttattatttctagatatctcaaccaccgttgcctgtctaccacaatatctccagtccaaggaccccggcatgatcgttacgaattcccttgacattgctgaccaggcattacgacatagcaattttcaaacgcgtatcctgggtggcacattagatgcacaacaacggtgtgttcaaggcgctgacagcattctagcactacacaaatttcgatttacgaccacggtcttgagttgcgctgggttgaccgcagacggcgtttattacgcttacgaatctgatattgctttaaaggaaacgttacgcgcccaaagcgaccggctagtgctgttgtttgaccacaccaaggtgaacgtcagccacaacttcaacttgctagctctcagtgattttgattactttgtgactgatcagccactaccggataacctagctactaagattgcacctgataaacttatttacctttagaggaggatcattaacatgccatcttcactattaaccactcaacgggcaatgttagctctgattcaaagtggcttagcctacacgactgacccgttcgacaaagatcgctatcaaaagttacaaaccttattgattcaacaaatggccgccacttccaacatatcaactgctgacttaacgactgctctgactcaggattccggctacatcacccccaaaatcgacgtccgcggcttgatacgccatggtaatcagctactactcgttcaagatattaaaacgaaactatgggccttaccaggcggctttgctgacgtgggctacacgccgactgaaaatgtgcaacgcgaggtgtgggaagagactggccgtcacgtcgcggttcaggggctcatcaccgtttttgacactgctctacgtgtcgatattccccaaccatttcagtattataaattggtctttgcttgtgaaattactgatggccaatttgagcctaacattgaggtcgcccaaacagcctactttacgctcgacaacttgccaccgttgtcccaaaaccggacaaccgaagaacagttggcacagctaatggcatcttccactaccatcacagtcgactaaatgactgctgaagcgccaaaaacatcccgactagcctgtctgctagccgggatgtttttgtttctttatgacgtctttcaatcaagttaggccgctattggcatcaacaattatgaaaaagagcgtcggattaacattaatttacatcaacctagtaattaccattttcacaatatggtggactttaagtcccctatcattacatatccaccaatccaactaaggtttgttgaaaattcagtcgccgaatatgccggggaatgaattggcgaatatcatcatcattaaagcctacttgcaatttattacgaccaacaataattggccgccgcaacaactggggttgttcgcataacagccggagcgtctcattgaatgacatatctggcagcttatcagcaattgcgggataactttgtgaacgggtagaaataatatcttccaatccattctcagttaggcacagaatttgttttaactcactaacagtaggggctgcgctactaaagttcttctcctcaaatgcaatatcatgatcccggaaccattggcgggcctttcgcgatgagttacatcctgcttgcgtaaacaatttaatcataattatttcgcctccttgattagtgtttttattatgataattataacttttttattattgtagcaggttattcataactttgtaaagacctgaacgaagtaatcgtaaaaaattcattgttttttcatatttattattgtttaaataatataaatgttatacgaatcaccgttgattttcatgctgatcaaacgcacgcagcaagcgtgacgccagcaaataggccacttcgtacttcaccgttaactgccacaagaacggcccaagctgatcgtgtgccggggttaaattcgttagtaaattcaggtaacgttgcttctcggccagcgtacaccgctttttaaaatagccccagacgtgctgataagccgttgtcaacgtggctttagttggcgtaatttgttcggcttctgctaataattgttggtagcgttcctgttttgcagctgaccaatcattgtgccgagctaattgtcggatggcattataatgctgctgtgagtgtgccatgacccagtacttttggtaagcccaatcttgttgccattgtgacattgctcccatctcctcaatcttttgatgaatttacaaatattgtaccgtctggctcagaaaaatagaaccaatttacattagtacactggtaacagtcgtaagttttgaaacttagcacaaaaatggcgatagcccagttacctgttggtgcaacttagctatcgccatcaaaacttatattttatgagtactactgttgtcaattcaagttaatcagccagaactgatgttacttttcgcctggccgagctgagatcatgagctcacgttgcggataatcttgtggatgttccaacatatcggtgatcaatgtcgccaatgagaatagactaagtggcccaccgctaacagcatttccagctggttcaacaattaactgatccgcttcatcattgtacttgaaaaaatgacaggctagcaatgtatagtccaaatcactattcctgataactgcagccccggccttttgccccgccacataggtcgtctcaacttcacgactaaacccaaactcgcggcgggctaaggtgtacattgcttctgaaatctgatcgtagttgatttgaaactgggtcgtccaaaatagccgtttgaccccaactgcatccatcgcttgcaccaatgccgtggcaaactgcgccgcgtgggtaatgcccaccgttgagaatacgacgtcaatccctcgcagcgcgcgttttaaatcatcaacattgctcgcatccccgattaactgcgtggctaacgagacatcatgctcatgccggtgatgatccaacaaagtcacgtggtgctgcggcatcacggccactcgacgatacacttcataccccaatttacccgttccaataatcaaaatattcattactgatcacgtcctcacatcactcgctaatttattcgtagcaacggccggaccacgaatgacgccaacagcgcatatccacaccctatggttaatcagttcggtcgcttaaggcttattataccggttccaagatgataattcggtcattatttaaacttaattgtgattcgatgactgattagccttattttgaataacagggtcaatgacagccaccggtcagccctgagtacggatagctattaataactttgaaataaactaatgtcctaccattttatcttggccaggatgaccaaggcccaaagacaatttattatgcccgcagttggctatgaaaaaagcaccgctaagtttggggtaggaaccgatcctaaacttagcgatgcgacttaactctgttcgcgattgctgcgccaactaacgatcaattaccagtttagccgcgagagctcatccatcattgctgaacgccgcggatattgttgctgccaatcatgtacaatcgcctgcacggtcgatttaccagccgggtaagcgagcatccgttccaatatgccaactaattgttgatacttccgccgagttccagtagtagtagccattttccgaacttcatgatcatatttcgctaacagcagatctgaaaaacgtggtttcaataacggctcataggtccgtaaatcccagagtccgtccgcggccacgaccgcttttaatagcgggttcaataagttttcttgcacatacagtggtttcaaatcgacattggaattcttcgcgatcgccgtcaacagttgctcgcgaatcgccggccaatccgtggtcgggtaactctgcttcaactctgaaaatagcatctcatccgctggcgcatattcagtcaacaattgccataattcctgacgatacaattgctgttcacctaattgctgataagcgtcctttagttggcgactaagttccgctaacatgctgggatcgtccgtgaccaactttttaccatcctttagcaattggaccgcgtgcgcctcatcttgatgttgaagacagaactggctataaaacaagcgaacttgcggtatcgccaagttagcgccacaaaatttaataatttgcttatcaggcacatgagccgcagacatcatttgtaaatagtgctttagccatttttttatctgccagtcatagtcccagagatccgggtgtttttgcaccgcacggaaccgcttagcggtatacaccagctttgcatcaataaacgctggcgtcttgaaatatgtgaataataaatcgtcaagcgtatcttcaataatattcaacgacttcgttaattgtttgcataaccaatcaaacacctgctgctgcacatccgcgtcggcttttgttaagacagcttcccacaagtcgtcactagcactcatgatcatcataatctcaccatcggaatcatcaatgtcgacgtggtcgattttaagcatcagatgcgctaagatttgaaataccaaaccatactcgccgtgatcgaccaacggctgcacctcttcttttaggaaagttaaggcctcatcaccgaaatccgtcgccgcgtcataatcgataaagccaccgccatccgcgtttgtgtcaaataaatcatcaacactcgcgagatattcaggtaaatctgtcacaacattagtctcacccatgaccgtccggaacagctggacgagatgcttgtcatgggccaacaccacactcaaaaagtcccggacttgccgatcagtagcccgctcaaccagcttagtggcagtctgttcaagactgtcgcaactagttggtgctttggaaactggatgttgactggcaggtttgtcagccgccgtcgcttggtacaaaacggccgccatgtgcttacaatacggatgactattggcatacggacactcacacgcgccatcgtgaaagtcaccattagcgagagtgattaccacgccatagtcctgcgtgcccgtaaccgttgccgtaatttgtgttttggtccgctttaaatcagtgacatacccctgtaagtaataatcgtacccacgttcagcgattgccgttggaaaatagtcttcccagtccatattgtcactcccgttaactcgtttgtccttaactatactatggtatgacaaattgagtaagacccggcaagcattttctcacaataaaactcaataccgaccctcatttagcatacgccgtgtcatacctttatctgttgaccctaaaaagcttgttttttcaccgtggtttgtggctcattggccgcaccaatccagtgaattctcactgtttaactttccgaccattgccagtgagacgccgttttatcgaaattagttaaattccagttttgtttttttactggcgctataactaataacgccaaataaaatgccttttctatctacgacgacccttacaatatgaagtttatactaataaagcaattgtacaacatcgtatagtcataatttaggcgccaaattaatcccaataaaaaacgctataagatttcacaatcaggcttaatcactaaagcaaaataccactttaaatggacagaaatgtgactgacttatactacgcgccaaatatcaaattaagggtgtctgataattgatgaatttctttgcttgatgggaagtcatttgtttgtaagtaatatcttatcatccctaacatcatgccaccaataacatttatttccaaatctgactttgtatgtgtgagagctgcctgtaaatgattacttaaaatatctttaagaccatccattagttgcatcttagcttgtggaattgtcattattgcgtttattggtctgctccaacacatcagtaattgtctaagttccggttctaattgaccaactgcgttacttaagccaattccttgatttatgagtaatcgcttctttttcaatgtctcatcaagccacgttagaatatcttgtagtattgcgtctgtcagtgcaaatttgtcctcataatgtaaatagaaagttttacgactaatcatagatttgagtgcaatatccttgacagtaacgttgtcaaatccattctctatgactaggtcaacaaatgatttgatgataacgtcgtcagtttttttcattctaaaatccgtcatatcgattcctccattaccagttttgccaattctgtaaccttatggctcatatggctgccatttgtagccttaagacacaaatcatattaatttgaccatgtttttcatttcaaaattaatataaactacccgtagcataaaaaagggggtagtgaaaatgttcaacgtgtttaagagaaaaagcatctggatcagcatgttagtcgccactatattaatcggattatttgccttcgcacaagttggagctaggagcacagttaaggttcgtcatttaccattagcgttagtagtaaacgataaaggaaaagatgctaagaatgttgttaagaaattacggaaagagagccataagaaaagcgctgaaattaaatgggtcaatgtaacccacacgagtgaactcactaaaggctttgcatccggaaaatactacggggctgttgtcattcattcgggatttactaaagctatcaatcagcaaacagactatttaaaaggtaaaatcataactcagaagctagctgccctggtagttaaaacgccaatggctgctaagacggccccattccaacaacaaaaagccttagcaaattcattaaccaagaagacccccgaacaagcaaaaatctctttatacgtcagtcaaggaagtaatatgacggttgcaactattttgactactgcacttccaaagatgactgatcatctaaatcagaagatttctaacgaatatataaccgttgcaaataagtcaggactaacactatctcctcaggactggtctaaattgcaaacaccaattcacacaactcttatcaaacgcaataaagtttcaactaaagaaataagtggtatggcgccattcttagtaaccatcttctgttggctcggtagtcttattgctagtttactgaactggcgagaccatagtaagaatgagaagaaacgtactgatggccgcctctcattaactagtgtcacaagtcaattaatttcgggtatcgcaattgtcactgcgattgctgtatcagtttacttcttcacaaaagtttgctattctgtgccaattcatgatccaaaacaattcctactgatgattggtggtatatcatttgttttctatctactgcagtcagctgtactcgatttgcttggactaaaaggatggccattactacttattatctggataggttcaatggcagtcattactttcattccgcaaatgctgagtcccttctatcataattatgtttatgatattacgccaattcgctttgcctatgatcttattcttaaccaaatgtatattacagatgcattaatcactggaccttcaatgttgagcttgctgtacattggtatagcttcaatttttgccatgtatgcatctaccctcattaagaaacgaaaaaaagacagcttagcataagacgtacggcttctttaaacctcctgaacccagaaaagacgaatttaaaacatgaatagtggttaaatcaggtggtgtgtccagcatatccctgatttgccactatttaattcaataaatgataatttatctttccaaaaagattttgatgaaagatgaaaggagataaagcaaatgccacaagaacaatatcaactaactgatgctaaattggtaaaacagctatttgatttaattgagactggacaagcacttgaaagtattactgtcacagaactttgcttaaagtcaggagtatctagaaaaactttttatcgtcattattcatccacacaaaaagtcattgagggctttttggataattctgcaaatgactttatcgaaatattgaaagaaacaccaatactttgtttaaatgattttatcgacgctcttttcaaattttggcttggcaacaaaaatcgattacaagttttacaaaattccgactttttctcatacacattacatcggttaactgcactcaaactgttggacattgtcaacttaaccgaaaattctgattggcaacatctcacttcaacccagcaattcaatttttttaatttttgtgctggtggtttatggcgtgtcttaaatactcaaagcatatctatttctgatcttgatacaagtttaattacatcactctttcaacccaaaaattaatacaaaacaactattgtttattggtacaactaagtttgattctggaacagatttgattatctttcttaatttcacactctgctaaaaagaatctacccaatttttttaaattaaaaacgctaatcctgattacgtcgcctggatatataatttttttaaacttcgcactttcaatcgatgtcaaaagtagaaaaagatatcaatatagtagtagatcataaatattcaaattcattatttaccctctttggtttaaacagttcggcatttaaaataatagagtagcgttcaaatcaagaagatgaacgctactctttttatgctagccccagcataagtgatgagttaattccaccgaatgctgccgacgtgctcaaggcaaatcagaccttcttatgtctgttgctcacgttaacacgcgaaatttgacagttttgtcaggtttgttgagccctatatttgtgggcaccagctaattcatgaccacttcaaccactcctgtaggctccaccatgtgtcctgtaaatttcttagtagaactggttaacggtattcttttaatacagcccgaaaccaatttgacagttttgctgccagcaactgtagccatgcgcctcattctaaaatgacagtctataaattcaatcccctcaatttttccaattcacttctttaaataccatacccttcagtgtccatctgtgcccctttagtatggtctgaaaattttaacgggtctgcaaaagtcacccttctgtcaatttctttgaaagtattaggaacaacaatcattctttctcgttcaaaaggatccatgtaaaacgtgtatcgcacgtatcacacatcatggtattttcttttaatacagataccaaaacgtagctaccgcatattgacctagaatatcttcccgcatgcactgtctgtaagcttttgcatagctacgtttatttgagaagttatgcttattcatctgcttaccttcttgcaagatatgaattattgactagaactgcacttgtactttttttaaaataacataaaacagataatatccgaactatttcagaatataaattaggataagtaattaaaggaaaaagcagaaaaaatttctacttttcaatatattgttcaatggccattattatttgttggttctgtggtaagtccaaatgttccgctccaacacccgaaacagttatttgcgtataatgcttaacttgcttttggtaaatatagcgacccgccaatacgctgtacaacggaactaagccgtcattgctataactttgagtgccagctaaagaatacatatcaattgagtttggaatatattttctgtttgcaatcaagttttctaacaactcagtctcacttctaacagaagaatcgttcaaattgtacggtgcagcaatagtcataaccttttgtacagttagataatggctagtcaaattatgttcaagtgcatacgtgataatcagcccaccattcgaatggccaattaatgaaatctttcgaaattcatattgttgtgatatatattttaaggcgtattttaaccagatagcttgtttctttatatttttaaaaccatctttattatcttcaaaagcaataacaataaagggttgtctttcacctttttttattgcaccactataggaaattgtataattcttatgcactaacactcttaacaaagaatgaggtgttttttcccttttattaatgtctcttataagcggatcaaatctatattgtgtcgcattacttcctggaaccaaaactatgggttcagtaactgagtttcgttgaatcttcaaatttgaaatattctgtttagtccatttatcggacaaaaaaattaacgtcataaggaagcataataggcctattgaaataataattttttttgagattcgcaagttaatcactccgtctattatcctctagactcacaaattcaaaatttatcttttaaaagaagatctaattttcgcatgctctagattaattagtctcatctctgctttaacaaacggtaaatatataaaacaagagacaactaagcaaagaagtgctaatagtagggtcggaatgttgcccccagtggcaataaaagctttcaacagtcctggcgtaccattaggcactggataaacaggcgctgggacaatattgtactttaaaaacggataagcaatgactgtcgttactaaaggactcattataaaaggaattagataaataggcatatacatgattggaaagccaaccatcactggctctgagaagttaaaaaacgtcggtatgaacgaccaagtcaataaccttttcaaatgttgattttttcctatgatgagcacgacaattatcaatgcgagtaacatgccatcgccacccaaatgggcaaaacaagaatataacgtcgagtaagcagttggatgaacagcagcaacaggatgtgcaaatttcaaagcacgatttaaatttaccaattgcgctcgggtactaaaactaaaaagaaaatccgcattaatccccataaatttactaatacttcttagaaaaagtattagtaacactggtatcaaagagagcgtaaaatatcttgtgtaaatgcataaaagatttctgaattgtatagaaatagggaatgccttcccttatgatatttagtaaccacagaaaacatcataggaggcattccccatgaatgaacttaccacagaaattatcgctgcactagcccaaaagcaagatttggacgaagtttttcgtcaccacctcgaaattgcgattaaccagctgcttcaaaccgaattggcagag

SEQ ID NO: 5 - DNA, 192460 bp, synthetic construct
  source 1..192460: mol_type = other DNA; note = Lactobacillus plantarum PDA6 - Contig 5
ccaagaaacactaaatggcatgaccccgaaagaatttcggaatcatgccattctaaaaactgcatagctattttaattatttgaactgtctacttgactcggagcagtccccgcattagtcgtagcggtgtttttggttttattaagcttcataatccgtcaaatcagccaagaagcgttgaatcaccgcaagttctgctggtgagtagtgttcatgaaggagcgtgattgcttgatgattgcgggttgcatgcatcttatcatgatagcgggccagcttacgaccactcggcgttaagcggtagaagatctttttgtgatcatcgggttgctggaatgagccaattaagccctgcgttacgagtcgtttggctgcccgggtcacaccacctcgagtgacgccgaggttagtggctaagtcgatgcccgtttgtggaccggcctctagttcagataataaatgtaggccaacgatggaaatatccggcaacaggcggcgtagattggcttcggtgatatgctgctgtaaccatttctgttcaccagtagtggaagcacgcttggttcgaatcgttttgagctgcgttagaattgtctgttccgtggatattgacatcgattgatcccccttagatagttgtgcgtcacggcgactggttctcgtggtgattagcgtgcaattatcaattaatcattaacttttattactattattataccggttttaaaattcaccggcgagtttttctgctgctacctgtgcggcagtgatggcctgttctcgctgttctggaaattggtccaatccttcaatgaagatggttcggtaatcctgaatcccatacagttgcatcatgccacggaggtaggggtcgcctgcttcaacctggttgtgttgatcaggttggtgatagtagccacccgcagcctgaatgtgtaagacgtgtttgtcgggtaataagccgaccgggccgttgaccgtgtacttaaaagttttacgggcgactgcggttaagtctaagtattgtttgagttcggctggaagaaagtgattgtacattggattaacgaagacgatcttgtcggctgctagaaattcagctagccaggcggcgtgacggctaagtagttcagcttccactgacgttagttcttcaccgtatttttgtttacgccaagcttctaaggttgtgtcgttcaaagcgggaacgccgtcctgataaagatcgcgtgtcgtaatctcatcgttcggatgggtttgctgatacgcagttttaaaactcgctgcaacggtcagtgaaagataaaaaattccccacacattcgaaaatgcgtggggaatttaaaggatgcacgattaattttgattaaccaatgctactagcactaggttggagcgactttacgggtaaatacggtgcaacatacgtggaaacggaatggtttcgcgaacgtgatcttgcaaagtgatccaagccagaaaacgttccagacccataccgaaaccggagtgcggcaccgaaccatatttgcgtaaatcgagataccactcgtaatcctgcaagtcttgaccgctggctagtaaccgttccttcaagtagtcataatccgttgagcgttcggaaccgccgatgatttcgccgtaaccttcaggtgctaacaggtcagctgcaatgacgacatcatcgcgcgtcgggtgtgcctgcatgtaaaaggccttgattgctttgggatagtttaagacaaagactggttggtcaaagtgttctgccaaaaatgtctcttccggtgagccaaagtcgacaccccagtcgacgtcaaagccgttcgcttggagtagtgtaatagcatcgtcgtacgaaactcgcggaaatgggagcttggtgtacttttgcaacgtcgcaacatcgcggtccaaaacggccagttcgtgggggcaatggtcaatcacggcttgaacgaggtaggccaccaattgttcttggacttccagactttcatcttgatgcatccaggccatttcaggttcaagttgccagaattctgttaagtggcgacgagtcttggatttttcggcccgaaaagttggtccaaacgtgaagattttgccgaacgccattgcgccagcttcaccgtataactggccggattgtgataaataggcgtcctgaccaaagtaatcagttttgaataattcagtcgtcccttcaggagcggaaccggtcaaaatcggcgcgtcaatcttaataaaaccgcggtcattgaagaactcataaacggctcgaatgacctcgttgcgaatccgcataattgcgttgggacgcgatgaccgtagccaaagatggcgatgatccaacaggaaatcaataccatggtccttgggcgtgatcgggtagtcgtgactagtcccaaccacttcaaattgtgagatggcaagctcgtagccaaagggggaacgggtatctgcatgaatcgtgccggtgacccagaggctagtttcttgcgcgaggtcggtcagttgtgcaaaagctgtttcaccgagctcgtttttgagagctactccttgaaaagttgctgtgccatcgcgtaattgaagaaaggcaattttgccgctagaacgcttattactgagccacaccccaattttaacttgttcattgacatggtcagcggcgttgataatactaatggtttccatgatattgatcactccttcttgttggattttaaatcagattaaagtaaatgaatgttatgttcggtacattggtcgatcatggcttgtggccacaaggcagcttgtacttcaccgacatgggctttgccaagtaataacatgcagagccgtgattgaccaatcccgccaccgatcgtgtaagggacgtccgcgttcaagatcatttggtggtatggcaagctaagccgatcttcggcgtccacgtctttaagttgtttcttcattgattcagcatcgacccggattcccatacttgagatttcgatagcttggtctaatggttcataccagaagaggatatcaccgttcaacttccagtcatcatagtcgggggcgcggccatcgtgacgttcgccggaatcaagcttccagccaatttgcattaagaagacacagccgagtttcttgcaaatggcgttttcgcgttcgcgcggcgtcatgtcagggtacatgtcttcgagctcttgtgtggttaaaaagtgaatttcgtctggtaagtggtgaacggcctgtgggaacttgtaccaaacttcgtgttccatgtgcttgatcactttaaagatttgacgtaccgtggctttcaaagtttcaacggttcgttcttccttactgatcactttttcccaatcccattgatcgacgtaggcggagtggtagttgtctaaatcttcatccttacgaatagcgttcatgttcgtgtagagaccttcatgcatgtcaaaaccgtagcgctttaaagcgacccgtttccacttagcaagtgagtgaacgatttcgatttgttcatcacccatgtcttgcatagtgaaggagacaggcttttcgacaccatttaagttatcgttcagaccagttttcttttcaacgaacatcggtgctgaaagccgagataagtttagttgcttcccaaattcatcttggaacgtttcacgaatgtaacgaatggcctgttgggtttctttaacggataatttaggatcgtaatcctttggaataattaaatgcatatgcgtggtctcctttaaaataagttcagattttagttacaggataaaagaaaagagccttccatcccttgaattatcaagggacgaaagactctttcgcggtaccacccaagttgtttaccttacagtaaaccagctttaaaatagtgtacaaacatacaccaccgatggtaacgtaccggttaacggctaatcctactttaacgaggttatttcagttagcaactaagaaagtgtttttcggattagtcaagttctggtcgggtttccactcactcccgattcactggcaggttgactaatcgtactcctctttcctccgtttttatcttgtgacatttatattagcacgattctggtatttgtaaaccactaaattaaaaataaattagtttagtctcatgaattcaccataaaaatcttagctaaaaccgcaagctaacgggcttaattaatcgttcaaattataacgtaatttcattttttcagaaccggcaatgaccatatcgccgagtaatttagtttgtaacttcatcgcggtatcggccaattgttggttagccgtttcaagataggccgtgacgtcttggtggttagccaagtcagcgtcggtatcattctcgattttacggtaagcactcatggcttcgagttcgtaactattccgcatatccacgtaaaagtcgtagtcggtgtcacccaaaagggcggttgtacagcttaaccagtacatgtggttgagattaaaggtgccgtccgcatctttgtagctagctggcgtgtcattgacatttgcatagaatggtacgaccgtgttgaaggtattggcaccaaaggctaaccagtgaataccggcaacagcagcggggacgttgttgcgaatctgtaagatgtgcacatcgtggttacggttgatcccgattggccggaaaagagttttgtcagcttcagagccacttccgtaaacatcgtatttcgtgttttcaaagtgagaactcaaaacgaacttgacgtcttcgatagaaatcttacggttagcatggcagatgaatggtaagtcttgttccattggatcttgtacaacgtccggcgtgaagtatttctgaccgaaccaagcccgggggttgttgtaaaccgtatctttgattgaagcactcccaaagatatgccgcaagttgacacggtcaaagtcaggattcaagtggtaatcttcaatcaattgttcaaggtcagctgaagctaaggtatcatcagcgttaaaatcgaaatcgtcaatattcatgcggttcggagcaaccacgtaagcatcgtcaggaatacgtttagcagcccagtggtgaccaccaatggtttctaaccaccagatttcgtcttgatcagaaaaagcgataccgtttggttcgtaagtcccgtattgttcaagcagggcacctagacgagtaacgccttccttggcgctgtgaatgtatggtaatactagggtgcaaaggtcttcttcaccaattccgccggcaacgaagggatcgattcccaagatacgcgagttcgtggtgatggtttcggttgcggacatggcgatgttctcactgttgatccctgctgctggccaggtcccattggtcaagattgagttgggaattgaagtataccgtaagggattgtcaggtaagtcgacttcgaccttactaatgacggactgatagtgccggggttgatctgcgggattgaccacaactaatcgttcggggtctagggcttcgtgaccatcatcgtttcgtgaaataatggtcgagccatcgattgaggcttttttaccgacgagaatcgtggtacatgaacctttaatacgtttttccatgatattaaaacactccttttaagctattaatatcattatacgctttctgagcgggtcgcgatagaacgggcttttttgagaatataattaatcccgctaatactaaaaccggtggccgccgcaatttcacggtaagtcttgccacgtgcccgtaactggtgaacttgcgcgtggctggcatgttgtggtgtggggctaggcgtctggattgacggaaccatcgctggcaccgtagctggtagtgcgaccggtgcaggcggtgtagtgattaccggcgtttggtgagttagttcagcaagcttaaccatgactaattcagttgtctgaacatcccaaatggcgttatgctggtgtggattactgatattaaagagtgcggctaagccatttaatggcagatcatggctaccgaccttatggttgccacgattgatcaaggtattcgtataggcttgggcatcaaaaatcgtgaccgggcgactgactagctgctgttcggtgggggtcaattgctgataatactgagttagtaataatcgaatgtgtttcatgtcctgtgtctgatcccaaaaaacgagggggagttgtggctggataacttgctggataaatgcttttagaatcgtcaaggggtcgccttgtgcctcgtaagcgacggtcgttaagccagttgctgataaaccggccaactttttgtcaggtaaaaagttaggatcatcgaagtaacgattgaaaaaaagcgctgtctgcgtatgatgggaaaaaccgatggcactgagctggaagatactagcccgtaattcgggtgattcgatgatgtgccaactgacggctttagcggagccattacgacgaaagcgagtgccgaactcgcagtcgatgattacgtaagcggtcggacattcactcagttccgttggtgaaggtaggatcgtgggttggcttagtacactggccggctgcgcagggggaaactggtatcccagcgtcgccagaaattgaacggtatcctgcccgagctggttattggttactttagcgaccttcttttcagttaagacaatttctttgcgcatcacgaataaaatatgatagcgctgctgttcatcacagataatttcggtcacgttgccggcaaggctgtattctgaagcgagtgctaattgatggtccttttgaatacggtaaacgggatggttgacaaagtatagacaattcaagttatttgagatcttacgctcaagtaaggttaggttcgttggcatcatcgacaacagctcctctgatctaagtacttatattttagcggctttgtacattagctggctagtgtttgcactgcagatcgaaccatgaatttggtaatcacgaattggtgcctggtgttatagtgaccgtagagtgctagttgtgcgtcaggttggagttggtaaaataaagtcaacgcatgcttgacgatgatgcaattgatgggcgtaggttcggtcgcctttaatggcgtgacttgtaagtacaacataaaggggtccaactttaatatcttgcttttatttaaatacttaacggttagattttctgactgcatgctaatcacctcaatactagtatacgaacatacgttcttgaatgcaagcaaaataactgcgttaacaaatttattttaagatgagcactaggtgcactggactgattcgaaataatttattaaaaatcgcaacgaatcaggcaagtcacggggaaaaagctacaaaaaattgagaactcttggtatgatgaatagtagtgaatgagaggaggccgagtcatggatcgaggacgacgcgcaacgctggaagaacgaattgcgatcgtaaagtatacgctggaccattgcaacgattatcgagaagccgctaagcattttaatgtttcgtatccacaagtctatacatgggtacgaaaatatcgacaacacggcatggaaggtttggtggatcaccgtggccgacccaagcaaggctaagtcagcattgtacatataaactgtgtgggcgagtgccctttgatggccaatctgacatggtcgtttaatcgatatcggtctctttaaagtgtccgttcctataaaatcaatagggacgggcacttttcggtattttgatagttttcgtggcgcaagtgcgacttaacgtacctagtgattaccggggcgcgttcttgtcatgggccggtattctcggtagaatgagagtattaattcaaagagggagtttacgtgtgatgattgacttagcggcggcacagcaagtattaaagaccacgttcggatatgatgaattccgaccggggcaaaaagcagtgattgaacaagtgttggccggtgaaaacaccctagcgattatgccgactgggggtggtaaatcattatgttaccaaatcccagcgttactttttcaggggctgaccgtcgttgtctcaccattgatttctttaatgaaagatcaggtagacgcgttaaatgataatggcatcgcggcgacttttattaacagttcactggatttccaagagattaacgaacggctccaagaactacgggcgggggattataccttactttacgtggcacccgagcggttagattcggattactttattcaagcgctgggccggttgcccattcaactgttagcaattgatgaggcccactgtatttcacagtgggggcacgattttcgccctagttatttagcgctcagcacggcgatcgaacaattgccgacccatccgcaagttctagctttaacggcgacggcaactgagcaagttgctgcggatatttgcggccgcttagcgatcgatccacaacatgaagtgaatactggttttgcccgcgataacttggatttgacggtggtcaaggaccaagacacggaccgttacattttagattatttgaaagttaatcatggtgaagccgggattatttacgccagcacccgtaaagaagtgatgcgtctgacgagtttgttgcaaaagcatgatattaaggccacgccgtaccacgctgggctagatgatgcggttcggcggcaaaaccaagaggatttcttgtacgaccgtgttgacgtcatggtggcaaccaacgcgtttggaatgggcattgataagagtaacgtgcgttttgtgattcacgctcaggtccccggaactttggaagcttattatcaggaagccggtcgggctggccgggatgggttacctagtgaagcgattttgatttttcgaccggttgatattcaacttcagcacttctttattgatgagtcggagatggatacggagcaccgacacctggcgtatcagaagctacaggtgatgacacggtatgcgaatacccagggctgtttacaacagtttatcttgaaatactttggtgaaaaatccgcgccgtgtggtcggtgtagtaattgtactgatcagcgggagtcacaggatatcaccacggcagctcaacaagtcttatcgtgcgtcgttaggcttcattcccggttcggtaaaggggtcgtggcccaggtattgacgggcgctaataatcaacgggtccgcgaatcgaacctcaatacgttgtcgacgtacgggttgatgtccgggcagcgacagaagagtgtcgtggaactgatcgattttttgactgcgagcggttatttgcagtcggtgggtggtcagtatccaacgctgacagtctcagcgagtggagtggccgtgcttaaaggaacgaccacggtacaccgaaagacggcccaaaaggtgcagcagacggtgccagagaacagtgccctcttcgaacaattgcggacacttcggcgccaattggcggaagaacagggcgtaccaccatttgtgattttttctgaccggacgcttcattcgatgtgtgacctgatgccagaagacgacgcagctttcttaacggtcaaaggggtcgggaccagcaaacttgaaaagtatggtgaaacctttatggcgacgattcgagcggcagctcatgcggaatcagcaactagcaccgatgaggaaaccgattagatggctgattggtaaactacgagatgaaatggagtaacacgtatggaatttacttggcaacaccagggacaaccaatggcaatgaaacgattcttgacgacgcatgccatcagtatgcgaacaatcaaggcaatcaagcatggcaccggcgcgtttcttgtcaataatcaagttcaaacgggcgttattaccattcatgatggcgatattgcgggaattcaactaccagacgaggcaccggatacagcggtagtcgtcagcgaacaaccaatccaaattgagtatgaagatgctaattggctcgttcttaataaaccagccgggttaaccagcgtgccggggcctagtaatcggaccgatacgttggtcaatcgaatcaagggttatttgatagccagtcatgccagtaatcaacgaccgcacctgatcacgcggttggaccgggatacgagtggccttgtgttagttgctaaacatcgggtggcgcaggggatgctgacagagccccgaattgcggcgcaattagtgaagacgtatcaagcttggatcgaagggaccattacgccggctagtggcacaattgatcgcccgattggccgggtggctgacagtcctcggcgagtggtcactacggcgggccaacgtgccattacgacgtatcaagtggaggcggaccaattgcagcataacgtgagtcggttacggttggaacttgtgactggacggacgcatcaaattcgggttcatctaacggcgcttgggcaccccttattaggtgatacgctgtatggcggtaacttggcgtggattcaacggcaagccttacacgccgctagtttacagttctttgaccccttttcggaacagactttacactttgaggcggcattgccagctgatctgcaagccttgaatcacgactaagttcagtttaggatcagtgaccatccggatgaatggttaataaaaatcggcactgctagaatgcgttgaacattctggcagtgccgatttttggttggcaaccgtctaaaatcaagctaacgtttagcgggtaagttgcaggcccgcgttatcctgaaggctgcggtgactattgaatgaggcgctagtgcttacgactgactaagtggcgcgttatcagccgttagcgtcgcaaaagttgcctgtaattgctgtaatggtgcggttaacgtgagaaaataaatatgctcgaccccgttactacgcatatcaatgaccccagcttcacgcattaagcgtagatgatgtgaaacggcggggcgtgaaatattgaccaaggcggtaatatcagtaacgttgagaccattatcactgttccccagagcaatgataatctgacgccgaattttttcggcgaaaatattaattagtgtggcactttcaataagtgccgtttcggattgttgaaaattagccatggtgactgcgtcctttcaaattcaatttacacttaaggactaactccccccatcggcagtacgctgaattagttgttaagtgttggtatgacagctcgatgttcaagttctggtgaaatagttgcagccaagaaaactttaagtctacaagttgtcagttagactaattgttattggaacgttcgtacttatgtataattaaagcaagtcgttaatcgattgtcaaacctttttgttaaaagtaagtactattagcgggcttaacaattgttgttcgtttgataaccatatttttatgttgaaatgcgttaaaataaaaatagcttttgaatgaatgatgggagtggaaaatgtgaaagtcttaggaatattaggtgcgcatcgcgctgatggcgtgactgcccagctactgcaatccgtcttaaagggggccgcggccagcgctgacacggaactagtcaacctcaacgattatgagttgcgaccagatcacgatagtcaaccgaatgctgacttagacgcgctggaagcaaaattaatggcggcggatgtctgggtattagctgcaccaacctatttggggagcttatcgggggtaatgaaaaacttctgtgactgttttcgggggcggatcgcacggtttaattccgtgggtgaagcagtacctgatcgctttaagaacaagcattatgtgacgatcacggattgttacgcgggtggtattgaaaattatttgaccggcgtgactgacgcaacgtttaaaacacttgataaatttttgacgatgggtggtctcatcaaattacgggagattgtcgtaactaaaacgtggggtatgcaaaccatcacagctgctaagcaagcagaatgtgaacgggtcggcgcgcgggctgcacataaaaaggaaagggatgacagtacggtgaaacggtatattcaattattcttcatgattgcggtgatggcactactaacaatgggaatcgaagcggggattcaacaattgattccgctgaacaatttttgggcctactacggcgtctttgtcgtcgtcttttatgttcttttagcaatgattttacatttcttcactgttgttaaacaccggcgtcgttaagggatacggcatgtgcattcagcaacaacgacattaaaattcaattgattagcaagctgggcttggcgtcttaatcgccggaggtcagcttgttttgctataataagaacaattacgaagtaccagcgattatttcagtgtccacgcgtataattaatatggtatcgtcgaattagaaaatgaggacacttggtactggttgccaggcgtatgaaccataattaaaacatgttaaattagatgaatttttatttggcagcatgctgtgattggtttcggttttggcgcatccaagctgccggtttttgaatctaactttgtcaaaaactaatcattggtcatgcccaaaaatgtgttattgatttcaaaattaattttgttaaataaaggctgtcaatcaaggtacgaggaggaatagcatgcaagtttttggacaatttattgcaacagtcggttggctaggattggcactagtcgccagcgaactaggtgcgacgttaatccattggctcggtcagtgggtcggatttcgattaattggtgctcgaattgtccggattaccggttttcgacttcaattaagtcgggttcgtggtcattggaaattagaacgaccgctgacgcgtcatccacatatcgtggcagcaccctcggcggatgccaaacggttcaatcacgccatttattgttttggcggtggcctgttcaacttactgacggtcatgctcagtttaataactctgaatcaatttaagtttagtttcgatttatggttgtttgcgttcattatttggatctgggtcaatacgttgaaagccgcccaattattaccaatgaacttgcacggttatcccacggcgggacaggaatttcggcaggcacgcgaatcaacggcggcgatgaccgccgcgtatgtcactgcgtgtgctgcggccgttaaggttcagaccggtagtgtccgtgaccttgatgcgagtatgattgttatgccgcgcgatggtggcaatcggaattatttagtcgtccggcaagcatggttgattctggaatggggacttcaacatgggctggacacctccgaactgttagcggggttgagtcgcttggagccaagtttcaatacgttgccgccagctgatttggcgaagtatttagatgcaacattgtactggaacttggtcaccaatcatcgtgacccccagatcatagcctggtatcaagatgatggtgttcaacagttattacgtcgctaccaacctttggctcattataagttaactgccgtttatgaatggcgggtccatcagcagcccgaacaggccctagaattgattgaaaagggactaaaaattgctcagcgcctccacgatgaggaagaaattgcttggctgaaagctttacgcgttcaagtaacggcctagattaccgtagaaacttagattctgttaaagattgccagaatcgaagtttgtattggaaaatgggtggtaaactggtgaccattgaagtgaaaaaaggtgaaaatgtgaaacagcgaatcaagcaacggtgggggttgtggttaacactgctggtgattgttttaggactaatcggggttggattgacccgggttaatgcgggactttatcagcagacagttgcacaagtgacccacgtgcagactaagagtcgaagcacgacgacggatgaatttgaaaataaggatgcgacagtgacacagttggtaacggtccgggtgctcaataaggcacatcgtggtcgaacttaccagatcaagaatacgtatacgcgctcgggcgcaatggatcagacgtatcacgtccgtaatcaagttttcttacggattcctagtgatcatagtagtgcagtgacgattcaggggttaaaacgagataccgccttggcgtttgtcgcgtggttagccctagcactgctcttgttaatcatgcgtttcagtggtctgatggcctttttgagtgtcgcgctcaacgctgtactattttatgccgccattcagatcgatttagctactaatggtggccacatttacctgctctttggcgtattggccgtaatcttcgccgtgctcacactgttgctagtgctcggttttagtcgtcaaatgttagtaacattgggcgcgactgtggttggcacgggactggctgtcattattagtctgatcgtctttgcggtgacccatgagcgtggtgtgacttatgaatcgatgcagtacgtgacgcaggtgccccgaccgctatttttagtcgaaacagttctcggttcactcggagcagtcatggatgaatcaacagatattgttgcttcattgtttcaattgaaaacggagcgcccggacattgcaccacgacaagtatttaagtcgggtattcaaattggccggtctattatgggacccttgatcaacgtgctatttttgattttcatggcggatactttcgcgatgactttgctctatttccgtaacggtaatagctggggttacacttttacaatgaatatgtcgttggggatggtccaaagtttgatttctggtatcggtatcgttttagcgattccagtagccagttggttagccagtcgattgatgcctaaggcggtgatggcatgaacacgattaccgttttaggattgatcttactaggattgatgacattaattggtggtaagactggagcgacggcctttttgagtttgttatttaactttggattgttgtttttagccgttgttttgatttcatggggctttccagcaatgggggtgtcgttggtcattgggacaatcatcttggccttcacgattttctttggggaggacaacgaagtggcggccaagccagcttatattgcagcattgattgttatggtcattttagtgctgattatttttcccgttgaaaattggatcatggcgcagggctttagtttagaagatagtgaagatctggaaggtatgtcgttagccattggggtctcctttattggcgtagcagtaactgaagcaattttaagtacactaggggccattgcggaagctgctattgcgattgcggctggtctgagtgaaattctggcgcagcatccgcagttgccaactaagcgactctatatcgatggtatcagtattggtaagcagattatcgggacgacttttaataccttgtttttcggcttttttggtggcttcttggcgctatttatctggtttgcgggcttacattattccttcgggagtgttatcaataataaaatatttgttgcggaagtattaatggtattattctcgttaattggcgttatcctggtagttcccgtcacgacgtgggtgatgacgattcaacatcggcaacaaattaagcacaacgattgacgatgaccgcgggatttgctacggttgagaaaacagttgggagcgttgtgatgatggaaattcgaacggcacaaccgcaagatagtgctcaaattgcaccattgattgcgatgatttaccgtgatatggaaatgccagtcttaaaaaatgttagcgaggccgacctattggcaatgttgactgagttgtatcagcgaccggccaatttagatgggttagcgcagacttttgtggcggtcatggctcacaaaatcgtcggtgtcgcgtttgggcacttagcgaagaatgaagtcgctgtaaacgatttgttgcggacgacttcaggtcatcatgcggggtttgaggcaccactggaattaggtggtgagacccggccgaatgagtggtatttaagcatgttggcagttgatccgcaagctcagggccacggagttggtagtgccttactagaagcattaccaggactcgttggtcaactgggggccacgaaactgagtttaaacgttgatgatggcaatccccgagcagctaagttataccaccggcatggttttgtcccggatggtcagctcatgattggcacacatccgtaccagcacttggttaagcctttatcataataactgaaatatcgtggtgtgtttcttagaccacggtatttttttacgtcattatggcactgaagacttttctattgagcatgacacagttagaattaaactattgaacggattaggaaggtgaacgtgccatgcagatctatttcattcgtcacggtcgaacacaatataacttagaacaccgatttcaaggtggacgagcagattccccgctggttgctagcggaatcgatggggcaaaggccgctggtgattacttaagcaccacccaattttcagcagtatatagcagtccgcagcaacgagcgctggatacggcgaaatacattgtggctgccaatcagtggcaaccgccgattcaaatcgacgatggcttgcgtgagtttgattttggtgattgggacggcaaacaggaagcggaagtacagccgcagtcctacgcccaagttatttttactaaacctgccgaataccgaccggaactagctggcggtggcgaaagttatgcggattttgtcacccgaacgacttcgacgctacatcgtttgattgatcaagttggggtagctagcacgcaaccactattaatcgtatcgcacggtctggtgacgacgatgactgtcaaggcgttaatgggtgtccccgtagcagaattacgagcaccttttgtggtcgatgggcaagttatgaagacagtgggccacggtatcgtggataatgatagcctgacagtgttatcgacgacggataatcagcattttgaactgacgacttggaatgaaaccgggtacttgaagtaaatggctgagtaataatatgaaaaactagtattgtgatgcaacgaaatattgcagacaatactagtttttttattagttacataatgacgttactaagcaagaaagtcagttgcttctagtacccgtacacaagcgtcatgcttaatgtgccgctgagcaacggaaagatatcctgattggagatcacgatgatacaagattaattcattactattttgattagcgcacagtaagtaatgattatctttgctcaggctaaagtcacgagggaatacgccttcagttttaatttgttgaattttttccaactggcgaccattatcaagaatttgataaacggtgagtgagttgtgcccgcggtttgagacatataggaagcgttcgtcagcagataaacggatggccgctgaaccattgtgtccgacatagccttctggaatgtttgaatagtcatttaaccaagtgattcgaccagtatcgtggtcgtattcagcaactgcgacacgactggcaacttcaccgagtacgtaaatataatttgatttttgagcgatggcaatttgacgaggcccaaaaccgggtttggtatcgaagtcagtgacgagcgttaactcaccattgtccgcaacatcgtaaacaaatagtttgtcgcagccaaggccacaaacaatcaagcggccatcgggtaataggcgggtaaagtgaatatgagcgtggccttgttctacttcgggaccggagccttcaataggatagttatgctgactagtaatgtgccattgattatcaagtttaaacgtgtgcacagcgttggtattgtagttggcagcaaagataatgcgacgctgtgcgtctaggtagacgtatgaggggacggtatagctcagttcattccaaaagtaacgattagtactggcgtcataagcttcgtatgcgggtgtaacacctttctgtacgagcattttagtatcaatcagttttccttcgctttgggtggtatcgatgataccaacgccaccggtattctcattcttggtcagaacagtcactaatttatggttggacttattgctgtcgaaattgaagaatgctggattatccaacttaacatatggctcaatcgatacgattttggcttcgtctgtgtctaaagttgccacgtagataccctcagattgattgttgggtgtgtaattgtcactggtgtagccaccaattaagaatttgtctagcatgattatggcttcctttcaatctactgtaaataattgtgattttgcaatggtttccggtgtcagttcttggcctagtcctgggtgatcagggaccttgaagacgccgttttctggttgatagtcgtgaatacaagttcgacgatcattttcgttaagtgcacgttgatattgctcatgaatgacgaaattagaaatagctgcctcagtctgtagtgctgctgccgtggcaatcggactgccacaaacatgaatctgtgcattgatgtcgtaaatctctgccatatcacagatttttttagcttctgagataccgccacaaaggcataaatctggctgaacaactttaatagcacgcttctcaaataattcacgaaatccccagcgtgtaaagacccgttcaccagcggcaattgggatgttgacgtgttgagcaatttccagcgtgttgtctggatttagcggactaaccggttcttcgtaataccagatgcgtaatggttccagcaactggccaatttgaattgcagcggttgtgtcagtattggcgtgcatatcgataataatatctaaatcatcaccaccagcatcacgcattgctttcacacggtcataagtagtttgcattacttgagttgtcagcggaccagttgtgtgccagttgcccccgccatcagcttgattgctgaaaataatgggatcgaatttcagtgcatcgtatccttcattcattactttacgtgtaacttcggcatagtcctcgggagtaagtagtcgttctttttcaatgtgcgctccccaattatattgtagttggcttgcatatgttctcagatggtcgttggttttaccgcctagtagttgataaattggtgtttggtagtatttccccttaatgtcccagagtgcaatatcaattgcactgatggcagcatttacggctacgccaccagcaaggccccagtaggtcgtagtttgtaattgatgccagattttttcaatattcaagggattttccccaataatgacatgacaaaaatcttgtagcattcctaaaccaccacgccagcctttaccgtaagctagtccagcttcaccgaaaccggagataccagtatctgtatttaatcgaaggacaattggcgaccaatcttccgttgaccccttagagttaccactgaaactaggatcagtacttgggacttgcataacatcggcactgataattttcatgaaaaagcctcctatgaaattagctgatttgtaaagcgctttcaatgattagtatagatactttgtgaatcttgttacagagattaaacggacgtcaggggaactaatagttactgtaatatcgaaaaagacatcgttagaataaagttatcgatatagtctaggttgaaaatgaaggaataatggctgtgagaaatctttttttgaaagtaaaagtgaaaataatcacaaaaaatgagggtgatttgaatgccaattttaattattgcgctaggggttgcaattctagtttttctaattgttaaattgaaactgaacacatttgtttcgttggtgactgtttcgttagttgttggactattgttaggaatacccattggaaaaattaatacagttattgaagatggcattggtagtcagcttggtagtttagccattgtttttggattgggtgcaatgctgggacgtttaattgcagattctggagcggggttccggattgccatggtactaagtagaaaatttggtcgacggtgcattgaatgggcagtagtgcttgcttcattcattattggcctggcgttgttcttcgaagtcggtctggttgttctattaccgattatcttcgtgattgccaatgagttaaatattgccatgttgtatttagcgattcctatggccgctgctttgaatgttgcgcatgccttcttgccaccgcatccggcgcctgttgcaattgcttcaatttttaatgtgcctttaggccatgtgttagcattaggtgtactagcagcaataccaacggtcatcgtcgctggaccactgtacaatcatttcttgcatcgtatttatccaactgtttatcgagtgaaaagtgttagtaaagttatgggacagtatcattctttcgagttagcggagacacctaattttggtgttagtgtcgttacagcaacaatgccaatcatcttaattgttgttgcaacgatttcaaagtacctgttgccatcgagcagtgcgattagccgaattgtccagtttattggttcaccggataatgccatgttaattgcgctattgtgtgcagtttatctgttaggattaaagcgacaggttccgatgaagaaaattgggaagtcaatgcgaactgctattgagcaaattgcaatgatgctcttcattattggtggtggtggggcatttaagcaagttttggttactggcggtgttgcgaaatatgtggccacactatttgtttcagtccattggtcaccaataatcgcggcatgggtaatgactgcggtactgagagcttgtattggttccacaacggtagccgcgctgaccggagcagggctggcggtaccactgctgcagtcttctagtgttaatgccgctttgatggttttagcagttggtgcgggatcagtattttgtgaccatgtcaacggtgctggtttttggatgattaagcaatactttgatttgagtttgaaagagacactgttaacttggacgccactgactatgttaatgtcagtggttggtctcggatgtgtgctcgtgttatcattattcttttagagtcagtaattatgaaccttaagtaagtcgattgtgtctcggatagacagcaatcgactttttgattttgtatgtccccagaatgagcaataattctggaagcaaaggtagaccagaaaccgcactataaatactgctttgggaaatattagaatcctggtagcttgagaagcttcacaattaatgataaatcgggttagtgtcgctgacccaagtagctccatatttggaataatgcagagcattgagcttgatttctcattcaagattagtaaaactcttaaatacggatatgcaaatgtgggtgtttttggtgttgtaaggcgacgttaagaatggcagatctttaaccgtggctaaatcctgaaataatgctagcctcaaaagtggggtgtgtgcatagttacagactgcaaagcattatatgttgttggtacatcattattaatgttaataagatatgtcgatggtatgtcgtaaacggcctgagagctaataaaaccccacctagcatgtaattgttaggtggggctaatttgatgactgaagttaagcgttaaacaacacctaacaactgccatacgggaacacagcacaacagtccaacgatattaatgaccatgtaacctagggatgaagaagccaatgatcctttcgaagccattgaattattaacggcagcagatccaattagaaatggggcgtccatatacgataacaaccagatattgacgctagttgtaacaataaatacaatcacggccggattgaaaggtgttgtttggaaaaatggcaataatgcaatgataattaaggtcccagtggaaatgagcgagacgaccacaaacttgcagatatagatgatgattggtaaaacaattacggtaatccaaatattacctaaaatcgggctgattactggctttaggatgacccgcaaccaagaagttaagccaacagtctgcatcacatttcctaaggccatgacggtaccgataaagatgattgtgttccaacttaaacgtgtcttgaagtcatttggtgtcaaaactttggttgcaacgagcacgctgacacctactaatgccgtgacggcagctgggatattgactgtggattccaaaatccagaagacgattgcaacaagaataacggcaccggtaattttttcatctcgtgacattggtcccaaatctgtgagttgttgattgatgaacgacttggaaaccgtttgatcatttcgtggcttgaacagccaacgcaataagaagtagccaccaactagcgcaataatcgtccagggcagcatcattacgaaccagtttccccaagttaatactgactgaaatttattgggcaacagtcctttgaaagcataattttgagcagtagcacttagaaaactggcttccattaccaggaatccccagatagcggctaagaatagtcccgaactacctttactcatcggtttgtatcctagcgcattactgattccttgcgcgattggtgtactcattgcagttttggggtgtgcacttggaatcattggtgaaataattgttccggcagtaaagagtgctaaagtttgaccactgaagtttgcaggaaaccaggacatgatttttagtgcaattctattaattagaccagttttggttgctgctgcgccaaggcccaatccaccaataataatccacatagtggtggttgaaaaaatattaaaggcggttggaaagtcggtggcgcctaaaataacccatgacgaaagcattaacaaaccagttgcaaaacttggaataacgttaaaaatccaaaaaatattggcagtaactagcgaggccaaaacaatcatgcctgcatgtgtaagtccatgcggggttgggataacaaatgtgatgactaatcccaaagcgatgccgattaaccctgcaatccatttagtatgtttcataatgcttacctaccttagttggcaaaaacgtcagggttaactggaaattgtggtaacttaccatttgaaaagtcgataattgcttgggcagcaccgatgccaagtgcggcgttagcctccttggttgttccagcaatatggcttgtcaaaacggtatttttgctggtgaataatggattatctggcgcgggtggttcaggattgaatgaatcaattgctgcccctgcaagttgatcatgatttagtgcatctgcaagatctggttcgttgataatgccaccacgtgccgagttaatgatgtaggcagtcggtttcatgagtaataattctttggttgtaatcatattcttggtttcaggtgttaatggcatattgaccgataagaaatcagctaaggggtagatatcattcagttcagcatagagctttaccggtgaattcttgatgtaaggatcatagccgataacgtgcatgccaaatgcttcagctaaggtcactaattgctgaccgattttacctaaccccagaattgctagtgtcttaccgcgaagttcatgcccattaagctcataagtagtagaaaatccgggaagtgaggtaccgcttagctcagccttgtgtgttcgtaaagcattatcagatttattgatgcggcgactgagcagtaacatggtggtcatcacatattcagcgacagaaaatgcgttggctccgttaactttagcaactaacacatgttgcttggtagcggcatcgacatcaacgttattaatacctgtcccattacgagaaatgatcttcaattctttaccggcagcaattacatcggctgaaagctttgatgaccgcatgatcacggcataggcgtccttaattgcagctttcatagattcattgtcagtgtcaggagcgacttgaacatcaaagtggtttttagtcagtaattcaatacccgcatcgtcaattttttcacttaacaaaacttttttcatgattttttcctcccagatgtaattcattaagttaaccgcttacagttatattttagtgattaatttcactaaagcacagttactaaatggacagctggtgaacaaaatcgaccattgcatcgatgacgcgcgacaatggtcaattttgttataaaagatatgtgagtaattgatgtaagaccaggttatggttgttctttttgtaaaacagtgttgaagcgtatgtcgtgttaacgtcatcggcaattggtaggaacctaattagtgggtttttttgttgttctagtgtcaagaagggacttggatagaagccgattccttggtttgacgcaattagcatgtcgcgtaattcgagtgatgaaacgcgattgatttgatgttctgaaaaagtctgattgaacttttcaaaaaagattttcttcaagtagagtgaagcgtacgggctataatagagtacctctaagtctttgaggtcgccaagtgcaactgagtcagcttgtgcaagtttgtttagagaactgataccaactactaggtctcccttagctaattcaattcttgataaactagggtcggtcatatcattctgcatataatagtatggtgagacggctaggtctaatatgcccgtgtgaacaagttgctgtagtctttgaccactttcttgacgaaattcaagcttaattgttggatcggatttgagcaatggaatgagcattttttgggttgcaatttcttgattggaagatgaaaacccgattttaagccgcttttccttggtttgttgttctgattgaatccgaatcagttcatcgttgtaagtattaacgatatcctctgcagcaatgacaaattttgtaccggttggtgtcaggtcagtattgttatgacggcgaataaacaatttaacaccaagctcattttcaagttgatccatttgctttgagacggctcgtggagataagaatagcaattcagctgctgctttaaaactgccattctttgcaataaccaaaaatgtttttaatcgattaatttccataatgacttcctcctcgggctgaatattagtggcaagtgaacgtttggttcagcaagcgaacaatttggtactgttataattattgaccggaccatataataaagtcaataaatgattgttacagaaatcacaaaagaaggttattgaaatgagtattccaaaaattgttgatatgttggtttatccagttgctggttacgatagtatgctattgaacttaagtggcgcacatggtgcttttttcacccgtaatgtcgttatcttaaaagcagataacggtcaaattggggccggtgaagttccaggtggagaaaagattaccgagactttaaatgcggctaaagcgttagttatcaatgagtcgattggtaattataaatcagttttacaaaaaatcagacagaagttttcctatttagatcaagggggccgtggtaaccagacttttgatcaacgaattatggttcatgcgctgactgcaattgaaaccgcttttttagatttgctcggcaaacattttcacgttccggtagcagctcttttgggcgatggtcaacagcgcgaaaaagttggtgttttaggttatctattctgggttggtaatagtcagaagaccgacttaccgtatttacaagatgatgataattcgagtcaatggggaaagttacgtcgacaaccggtgatggatgcggatgctttagttaagcttgctaaagctgcatacgataagtatgggtttaagaccttcaaacttaagggtggtgtttttgacggtgaaaccgaagttgcggcaattaaggctttgcatcaagctttcccagacgcaaaattagatcttgatccaaatggtgcctggtcactcaaagaagccttacactacgctgatgaacttaaaggcattttgcactatattgaggatccttgcggtgcagaagcaggcttctctggccgtgaaattttatctgagtttcagcgcatcacgcacatgccgactgcgacaaatatggtagatactgattggcggcagatgtcacatgccattgcactgaacgccgtatcgattccgctagccgatccacatttttggacgatggaaggcgctgtacgggtcgcacagttatgtcatgaatttgatcttaactggggtgttcattcaaataatcattttgatatttcattggccatggttgcaaacgctgctgcggcagcgcctggaaatgtttatgatgttgacactcattggatttggcaggatggtcaaaacttaactcgtcatccttatgaaattaaggatggtcagttgacggtcccacggacaaacgaaggattaggtattgaggtcgatatggatgcaatcgaaaaagcacatcaactctatgtggataataatttaggcgctcgtgacgatgcgaaggctatgcaatatctgattccaaattggcaatttgatgctaaacgtccagcattagttcgctagatgcttgttcgatgtgttttataagaatcaagttgtgattaacaaaaacgatcgtcttactttaacttagtaagcgatcgtttttgttaatcattattgcgtatcgatatttgtagggtaactggtaattcagttttaccacagcccactaaaaatactagctgccgccacgccccaataatattcggaggtgcgggcggtttgggtgtagagtgtgttaattgcttggagtggttggtgcatgtgatcacgcatgacgcgcattgccatgccgttaactttagtggcaattaataaatagttaccgttcttgtcaagttccatagcatagcgaagtaagtcagcacgaacttgtgcgtcttgtttaacttcaggatcattataggcaacgtcgatttgttgcatcaaacgcttggttttatcatttttgttcacgttaatccccccatgccaagagtatagcacaagtctcagacttaaatgttagcttaacgcgaaaccgcccgcatttcggatagtaaaatgcggggcggtttttatcagtccgcttgttttttacatgtgatttctgcaacgtgatactggtgatttttgatatgccctggtcgctaaattaacgcggccgccatcacttgggccacatcttggctttgccaatactgatccactaatggtgcgaaagcgtggttcaagccctgatactgaataaacgtggtcgcagtatcggcagcggccaggcgttgtgcataagcccaagcttgtggtcggaagggatcaaactcgccgaccatgatcgtggttggtggtgtcattgtgaagttttcctggtgtagcggtgagatgagtggagaatgtgaatcaaagttctctggaacataataatccgtcatgatgctgtcaagttgccgaaagaggtcgtgatagttggtgagaatggcacgctgtgagtcaataatcggaaaggcggccaaatcccagagtggaccggcgtggtcagcatttggggcggtaactgggtacaacagcagttgttgattgatacgattgctaccgagttgttgattcagatttgttgcagccatgatgacgttagcgccagccgaatcgccagcaacggtaatcattgtttcagcgtcacgttgttccaaatattggaaaatcgcgagcccgtctaaaataccagcgggtgctggtgcttctggcgctaagctgtaatcgacattaagaatctcgcagtgacttttagctgcgaccagctttaaaaggaccgtattattgccgggaacaccgccataaaaggcaccaccgtggaagtagaccagtactgtgtgattaatgacattttgtggtgtcagccattcaacgctgaccgtgcgattcagagccgtaatatttcgactttgaactgtaaccgcatcaccaacagggtccgcgatggcgggggttaaactaccactgcggagcgccgctagatcattttcaaggatggctggttgtttgaaggccgttagtgtttgaaggacgtgcgggtcaaattgttcaccggcgatgtcgttgttaaatggtttaacaattttgacgacgccgttgacggttgtttgaatcgaattaattgttggcatcatattcaacatcctccttaggttcaactttagccgctgcgtcggccttgttggcttgtaattttttttcgtctaaccgatagaattgcatcatgaaaatcatcgcggctaataaaataatcggcatccaaataaaagcgagattaataaatgtaatggttcgtccggactgtacagctgccttggcattgaattgtccccatgcgagaaattgaccggctagaaaaccgccaattcccattcctaatttggcgccaatcattggtacggcagataagaatccggtttcatttaggcccagtactttcgttgagtagtcaacggtatctgatagcatcgcgaagacaatcgtgaacgtgatccccatcgcaatcaagaaaatgacggagccagcaattagtaggctcacactacgcatcttttcagcgattggcagcagtagttggccgataacgcccagtacgagtgaaaactgcaaaacgttacggttcttaaagcgttgtgataggaatggtacggacaggttcccgatgacggaaacaaagccaatccccaggaaaattggcgctaattcaggccgaccgtagacgtatttgataaagaagatcgctgaatttccccgtagcatccagaaggtttgtagcagaatgaacgagcaggctaataatagccatggtttgttgctagccgcacccttcaagctttgccagattgagagtgattcggctgactcagtggtaccgtctggattttgtgcaccgttagtttccttgagattgagaaaagcaaagatgaagagtcccatgataacgaggcctaagataatagcccagagggtgaaacctttcgactgattgcctttgccgagtaatttaaccattggcaaagtgatggccgccactgcactggtcccgatggttgtcatgaccatccgagcactcgctaacttggtccgctcaacgctatcatcagtcaagcttggtaaaatcgaagtaatgggcgtgttggcaccagaataaatcaggctaaagaaagtgtaagtgattgaaatgtagacgagtcgcattgtggtattgccgccaaatgatggaatcatgaatagcgacatggccagcaaccctaacggaatgccaaaccacacaaagtaggggcgcgattgtccatacttcgtgtgtgtatgatcaatcaaataaccataaatcaatgcatcaaacgcatcaatgaagcgcacgacgaagaacagcattcctgcaaaagcagctgagatgcccgcgaccgttgtgtaatagaacagtaagtaagtgctgaccatttgccaaataatattaccggccatgtcagtggaaccgtatgcaattcggcgtttccaagtttgaaaaattgacattataaatccccccaaacgaattaaatttaaactaacaatgataattaaccccttttatcaacataattatatttccaaattaggtgaattatcaaagataggcgatagtttggctggttaataatcgaaaggtgggtgcatcttttgtacaaacacgactgatgcctgttttgtagcgctggttgggagaaagccaaacaagcaaaaaacacccccagcaatggccaatcaaattagctgttgctgggggtgttaatggttaaagacgcgtgtcgcggatgtcaccaattgttaacagaaatagaattgaaaatagccttgtcggtcagttctgttttgaccattaatcaatggttggtttcagagctagtgctttagcggcttcttcactgtcatcaaagtgatgcttagtccggccgatgatttgataatcttcgtggcctttaccagcgattaaaacaacgtcgccgggttgtgctgcttcaatggccttggcgatggcaacgtggcggtcttcgtagacgggcacgtcggcgtttggcacgccggcaaccatgtcatttagaatcatggttgggtcttccgtccgaggattgtcagaagtaaagattggcttagtactgtgttcgacagcaattttagccatctttggccgtttcgtcttgtcgcgatcaccaccacagccgacgacgcaataaatatccttagtcgcgaaatcttgaatcgtttctagggcattcaataagccgtccggagtgtgtgagtagtcaacgatgacactgacacccgtgtgggaaggaacggattggaagcggcccttaacgccggtaaccttctccagtgacttaatgatttggtcttcggggatgccactagcgtaagctgcggcgaaggccgccagcatgttgtacacgttgaactggccaatcagttgcatcgtcacgtgggttacgtggccgaagacggagaggtcaaattcagtcccgtggctcttgatttcaacattttgtgcgttgatcatggcatctggtttgagtccaaatgttagtacgtgcgctgccgtatactgttcaaattcacggccaacgggatcatcggtgttcagaacagcgaccttattagttccgtcggcgctgtacttattgcccagttgtgcaaagagcatggccttggcttccgtgtacttagccattgttttgtggaaatccaaatggtcttgcgtcaagttcgtgaaaacggcgatgtcgtaatcaatcccccagacccgtccgagtacgagggcaattgaagaaacttccatggcgacagtttcaacaccggcatcccgcatggccgctagagtccgttgcgttgtgatggcgtcgggggtggtgttggcagttggcagtttttcatccttgattttgcgatacatggtcccaatcaggccggtggcttgctgctgatcacgatagatttgttcgatcaggtgggtgacagtggtcttaccattggtacccgtcaccccaatcatccgcatcttttgactaggcgcaccgtagaaaacgtcggcaagaattgccatagcgcgttcggtgttttcaacgtagatgaccggtacgttgacgtctaaaggttttgacgccacgatgatcttggccccttttccgatggcctgatcaacgaggtcgtgaccgtcgacgtgataaccaacgacggcaataaacatggcgccgggctgaacttcgcgggtatcctgcgtcagcatggtgacatcaaagtccgtggtcaaggcgggctgaacctgcttgaattttaaactattaattaattgacttgcttgcataatattagcgtccttttcaataaagttactgtttctagaatacatgcaaaccggataattgtcaccccaaatgagaattgaaattatgcttgtaatcgctcggtacatggtgtgctgctggttgaacgtgccatctccaggccaatctaggtcaacaaaaaagcccggcaattaagccggacttgcagggatggttattcgattcctaagaactcatcatgtaaggcgttcatggccgcttttaaatcggcttccttaacgagcacccagatggtcgtataactatcggtcgattgtaaaatatcgatatgttgtgcagctattgccgagacgatccgagcagtgacgccgggtgtcccagtgataccagcaccgacaacggaaactttagcacagttcgcaattgactgacaatggacgtgcgcgtcagtcagtagctgcttggcaacgtccgcgtcaccatcaaccaggttgaagacaacttggtgtggtgtaatgttaataaagtcaacactcaaaccgtgctgtgccatcaattggaaaatggcacttgaacttaacgtatcggtaggaacagtaaattgcgtcaaatcagtttggtgtgcaatccctgtcacggtacgataatgttcgatttgggtcgtggtccggtcagtgactaaagtccctaattcgtcgggttcctgataagttgaccgaatccgcatcggcacgtgagcttgttctgcaatttcaacagcacgcggatgaatgaccttagcaccttcatgggccatgttagcaagttcttcgtagctgatggccttaatgaagcgggcgtgggtgacgagtcgtggatcggcagtcatcatgccgttgacatcagtaaaaatatcaacacgttttgcttttaaagcggcgccgaggatggctgctgatgtatcggaaccaccacggccaatcgtagtaatgtggccgctctcagtagcaccttgaaaaccagttacgactaccacgtcggcgtcaataaaggcgtccgtgattggtttcggatcaacgcggagaatcttcgcattttgaaaatcgtcgttagtcacgatgccagcatcatgaccagtcatggccgtgacgtttaggccttgcttacgcgctaactcggtaaagacagcggtcgagatggtttccccaactgagaccaacatgtcgagttctcgattggttaagcgggagtgctcggccccaactaatccgagtaatgagtcggtggcgtaaggggcacctttccggccaattgctgagacaacgacaatgactttatcgccctgatcgacggcgtattgaacgtgctttaaagcttgaatacgggcggcttcgtccttgactgacgtgccaccgaacttttgaacaataatttccattgatctaaaactcctcgactttttccgcaacggcgttagcttcggggctatccatcaagtggtcagattcgacatagagtcggtgccacatcatgaaggtgaggaccgtccagagtttccgagaattatcccgaacgccggccttgtggtcatctaagagtttcaagaagtagtccttattgaagtattggtcagtttgcgaatcgttaatgatctgcttagcccagtcgtacatttcatctttgagccagaaccgaattggtactgggaaaccaagctttttacggtgaaggacgtgcgctggcacgatgtcttcgaccgctttacgaagaatgtactttgttgtgccgtgactaattcgaagatcagctggaatttcggctgctaagttatacacttcacggtcaacaaacggggtccgcagttccaaactgtgcgccatcgttgtccggtcggcgttatgcaacaagtcaccgtttaaccacgtgtgcatatcgatgaattgcatccgactgattggatcatagtcgacggattcatcatagagcggttgcgtgatggactggaacggatggttctgattgtaattcttgaagaaggcttgtttttcttgttcaccaaagataaaggcgttcccaacatagcgattttctaatggggtggtccctcgtagtaagaatgaccgaccacgcattccctctggcatcatgagtgcgatacgcttcaaggcaccattaatcggtttcgtgtagcggaacggtttcaatgattctggttcatgatagatggtgtagccaccgaagagttcgtcagcgccttcaccagtcaaacaaaccttaacgtgtttgaccgcttctttggctaagaaatactgcggcacagcggccgggtcagccaacggatcatccatgctccacacaaagtgcgggaaggccttcatgaaggcttcaggcgtaatcgtcatgctgtaattcttaacaccaagcttttcagcggtctcttgagcaacgtcaagttcactatacccttcacgttcgaaaccaacggagatcgtttcaaggcttgggttgaagttttttgcaatcgcgacgatgattgatgagtcgatcccgcctgaaaggaaagaaccaactggtacatcggaacgcatgtgaatcttaacggagtcaattaaggcatctttgatttttttggcatactcgtcttcagaacgttggaccggatggaattcacggtgataataccgatcgatccgtggcgcagaccccaactttttcgtcaaggagcaaccaggggcgagcattttgatttcttttgtgagtgtttctggttcaggaacaaattggaacgtcatgtaatcttgtaaggcatttttatcgaaggttttatcctttaaaatcttgtaaatggccttgctttcagaagcataatagaagtcatcaccactgatagcgtaatagaacggcttgatcccgaactgatcgcgcgcggcaaataacgttttttcttgtttatcccagatgacgaaagcaaacattccccgtaagtacttcgttgcgtcagcgtggtacttggcgtacatcgcaagaattacttcagaatcggagcttgttttgaattcgtagccttcttgtttgagttgttcacgtaattcaacgtagttataaatttccccgttaaatgtcatccagtaacgttcattatcataagatagtggttggtgaccaccggctaagtcaatgatacttaagcgccgaaaacccatggtaatgttgtcatcagcaaaataaccgtcatcatcgggtccccgatggacaatcattttagtcatttcgtggatggtctgatcgtaagctgcgttatccgctttagtccgatcagttaagcaaccagcaaaaccgcacatgtctgttcatctctcaatctttaaagtttagacagttcttatctactatatgtgtacagatggttcgttgttaatttacccgtttcattcacggatgtaaagcactctgaacaattataacggtttcttaccaatgtctgtcataattatgcttgacaatccgcgacgtacactttgactattatacttgctttaattcataagataaagcggagcgcgcagatggaacgctttcattgataaaaatttcatattgtgcgaaacgtccaattagttggatgccggttccttggcggagcggatttctactgactatttggttagttcgaattgaccgttattgacatgacacatttaggtgctgattgctggccttatggctgaaaaagtcacagaaaaatcccgcaaactcatgcacaaatttgcgggacgtttaagtgggaatattaaattagatgtgcccttgcgctctaagcccagccaactaggcgcaatacggccatggcaacgatgcctgttataacgacggctagtaaacttttggtgagcactcctgcaagaatggcaggaattgaggcataaatatttgggagattaaattctggccagtgtcccgcatggtaggtgagcagactttcaacaaaaatagcggtcataatggcaattggcacaaatgataaaaagctgattagccattgggggactgacagatttttaatgatggcaaacgggacaatgcgtgatagccaagtcacgaggccgcagagtaagatggtcacaaaaatgtaagtactcatttatggtccaccaccattccaaaaccgcaaccgagtagcgtcgcaaagatcaaagccaagttgcccgaacccaacgcatgagaaaatacatggcgagggccacaaatagtacgacccacaactgggtcggcaatgatttactgcgatccgtgatgatctgcaagtaaagtaaaccaatgaacataccaacaacggcgaaatccaagccgaactggttagggtcagtaatcaagttacctaaaaggcaccccaccactgtcgcggctgcccaaaccaagtaagccacaatgttagcagcgtgtaaccaactcgtttttaattgttgattggtctgattgagcttgttcatgctgagcgcgaaggtctcatcagttagtaacgatcccagtccgatattttgcaataacgactcttttttgaaatattgagcgactgacatgctcattaaaatcatgcgtgaattaatcaaaaaagtggataagacgattgccgaaatcggactacctgctaggagcatactgacgataataaattgtgcggaaccagcatagacgattagtgacatgagtagaacggcccaaactgataggtgactcgtgttggcgacaatgcccattgctaggccaacgccaatgtatccaaagacggtgggaatgacatctttgatgcccgcgcgaaaggttaaactagaatccataaatgtacgacctccgattcaataagtatgcgttaaccaacactaaatgggattatctgacaattagtgtggttcatgaaacaggataactatgtaggttaagtttgagtgcgtgttatgatgaaaaagcacgcttgatatccgccaatagtaaggtgacgaatgaggcaaaggcgggttaagaattagtttactactttcggtgaaaataatgaagaaaattatcattgacttttaatcgtgacgttacgaaattgttgcttgcatttcaaaagctgggggcgtaacataatcacattgattttttgaaaggacaaatggtgagagaaaatgactctggaacaattagcagcccatagcggggtcgctgctgataaaatcgtcgcctataccaatgccgggttattaccttgcaaggatgtcaacgcgcattttagcgccgatgatgaatattggctagatatggtcaattgcttcttagaaaatggctcatccgtcgaggatttgaaagatttaatgccactttgtgaacagtgtgcagctcaataaataagtaagttaagacaatcgcaccgattctactagaattggtgcgattgtttttttattactcatcgttattaaacaatcatgattaaaacgtgccgattcttaagttcaaaagcagccagcttagacccgctgggaaaagttcaagttagcgtaaatatgcttagattggttcgtcctacatcgacctccaggcatttctgccaattgccggaacgtggtgggcacagatttgagccgaaaaaccacgtctcaaatactggcctttcactaaccaagcacagaacgcttgctaagtgaactttcaccactgggcattgtcaaaaatgccttccagtcgggatagtattcgaatggcagacggtgaggtacccaacttttgatgaattggtcgttgcttttcataaacggtaattttgtcaatcaactgtcagactaaaaataatattgagatggctcactaatcctgaatcggtgtagtaggatttaatctcttgacagagtgcttaatgcacctagcgctttgtttaaacttccagcatcaaaatagtcagcgactaattgtaccaaattaggtggtcgttcatcagccattcgagcggtttcccgaccggaggggctgggtgacaatgctcagtagccaaattattcttagtcggaagtgggttgcttccggcttagaataagactcgtatttgagatgacgcgggttatgcgttagctcaaatcgacgtcggcttacgttccagcaattgtcacccagccccggaggtcgacataggacgcgcagcggctgacgaacaggaatccacctaatcggcacggtttaatcataattagtcctgattggtgttttggagcggacactattttttaaatgttcaatcggaatataaattaatttatatgggctagcaggattgagggactaacggtatacttattgaagcataaataccaaccaaaaaggatagtgaagcagggatgaaatcggggaagcaccgggtatcattattgatactgttatgtttgatggtggtcggtttagctggctgccataacaaggcgtattcgcagtcaatcgagaaggggttaaatgcggttgctgagaataaataccaaaaagcgctgacgtattttgataacgcgctagcgcagaagcccaaggatgaaaaggcacaggcgtaccgggatcaaacgcaggcctacttgacgaccacatcggagttgaaggccggaaaagttaaaacggcgctgacgacggttgataagggtgtcaagattacgaacggggcaacaagtttgacgaataagctgaaacagttgaaagtcaccgtaaccagtgattatcaggaatatcagcaattgtcagatgatgttaaagcacagttaaaggtgaagaacggcaactattcagcggacgtgctcaaacgttgcgcagccatcaactgggataaaaagccatatttgaaaccgttgaaggctaaggtaaaacagttattgactgcggcaaaaaaggccaagacgaatatgaaagttagtgcggctgaagcgaaacgagcagcggcgttacgtcggaagattgctgccgctaaaaacaagtggaacatggccgcattagacgatgtgcccgattggttcattttggcactttttgccgacgatagtgatgtggatgatgctgctgaagaattagatgacgaatatgccgatcaggccgacgataatgacgattattcggatcgggatgagcaaacgactgattcgaatgatgacacgaacgacaccgacgcggattcggctgatgacgattggagtgatcaagatacggattcgaatgacgataccgacgatgattccgatactaatagcgatgctgacagcgattcggattactcagaagatgatgacgatgaagattcgaatcgtgatgacgccgatgacagcgaaacccaatccgatgacgattacgatgatgatactgatagtgagtctgatgacgacgattatgatactgatgatcaatatgacgatgatgatgactacgatgacgccgagagcctactcaacccggcacctgttcaaccgtcagtggccgaccggctgtttgcgtcggctagttgttagtcgttcagcggtaaaatcaccaaagatcgtctgacagttttaataatgcagttatgggcgatataaaaacaagcgtccgcgttgattagatcaacgcggacgcttgttttcttacgtggagtttgttgccgaacatgtctgagtaccagttgctcacgggcaagcctttatcttagcgttgattaaggctgatgtttaaagcgagcgtaaatcgagctcattgttgaaaatccgatgactattaagaccatgatttgtaatacgccagtgggttgctgaatttgcctgacgataatgtaagtcagaatagccaagttgatcagccaaccaaatcgtcttatttgcttaattataaaatttttagggtctgttttactaagcatataaagtaaaagggcgatgatgatccaaaacaatcctgatgttgagtgatagtacacgtaatcattcctttagacgtctgactttctaatgacatcgtaacaatcaacttggtacgtgataatcgtatcatttgctcgaaagcatcaaaatcatgttttagtaaagatagtgtacattttcagaaaagaaacgtgaattttttgtaaaccaccggcataattaaccggcgcatcgattttgaataagtgtggtcttgacgctggggcgccggcgctagttttggcaagacgttagtgaaaggggggggacaagccatgatgatctttagacaacaaagaccccggcatgccggggtcttgtcagctatttttaattgttagttcaagttatttgctagctttaacggttttaagcatgctctgaatggcattggcttgatattgagcagccgctgctttttgaacttttgcgagttgcgctttgctcgttgtcgggttcttgaccattgcggccttgacctgattagtcacgtagactttagcacgcgcttttaatgtcgcttgctgttgcttcatcaatttactgaattgtttagcttgggttgtgctaagtacgacccagttcttattgatatagaagtagttggttcgcttgatcaactgtttgtcattgttggctaagccaaaccagaacttcatggcgttactcttataagtccaccgtgtcgtcttagtaactaacttaggtgtcgcggtcgtcgtcttaacttggttagcagtcttgacgctggctgtcgtatggctaacttttttctgattagtggtctttttataaatatagacccggtgcttgtcagcggtacccacactttgatagagcaataaatcaagttgcttgctactaccagcagactttaatgattgcgtggtggtcgtcgttgttttgaccatcccgtaatgttgaccatcattcttggagacgaagacgatcgaggtcactaagagtgccgcaaagataacggataggctgattcgtaatgtgttttggtgaacgtagataaatgataagaagagcgcgattgcgctaacaacgagtagtacgagaatcattagtcgttcacctccttagtgttcattactggcttaacggaatgctgcttgcctttcatgaagaacgcgacgacgagcccgacaactgagaagcccacggcaacccagaaagccgcgtggtaaccatttaaggttgcgttgaaatagctgttctgataaccaagtggattgctcttaatcaagctatgagctggttttgtggcgtccgtaacgtttgataagacggaagtcaagatggcagtcccaatggaactagcgatttgacgcgtcgtgttgttaacggcagtcccatgacccattagttcaacgggaagggcgttcatcccagcggtagttgccggcatcatgaccatggcaatcccaaacatccgaacggcatagagaaccacgatgtaaaccgttgcggtattacgagtaatgaaggcaaatggaatggtcccgattgtcagtaaaaacatccctaaaattgccaagcgtttggcaccaaaacggtcaaaggcccggccggtaattggactcataacccccatcattagggcaccagctaatagtgatagcccagattcaaaggcggagaaaccatgaataatttgcaggtaaagtggaataaccatttcggcccctaccatggccatgttagcaactgagctcaaaatagctgcaattgtgaactcggcatgcttgaagacccgtaattggaggaatggattttccatcgtcaattgacgccaaataaaaccaatgatgaagataacaccaataattaaagttgagagaaccacggttgacgtccagccattgtcaccaacggatgaaaagccgtatagtaagctcccaaaaccaatggtagaaagtaccaaggatgcaaagtctaattttggcttagacgtttccaagacgttggccatgaagaagaagccagcgattagaacgattgcgacgattggaacgatcaaaccaaataaatcacgccatgataagttgtcgataacccacccagataaggttggaccgatggctggggccaaaccgataacaattccggcagtccccatggcagccccacgcttatcagcagggaagatagatagcataatcgtttgaagtaatggcatggtgaccccgaccccaacggcttggatcaaacgcccagccaataagaagccaaagtttggtgctgtccaacagataatagtacccacttcgaaaatggccattgcggaaagatataaccatttagtggaaatccgtgaacttaaccacgcactaacgggaatcataatcccgttgactaacataaacccggttgttaaccattgcacggtcgacgttgtgatgtcgaaatctttcatcaacgttgggaaggcagtggttaaaatcgtttgattaagaacggtacaaaaagtaccaactaataaaactgcaatgagcaagccacggttataaggcttcccatgcgtatcaacaggagttgacaagtaaatcccttctctctaaaaaagtacgttgtctaatataatcggatttatcgactttgtcaacaaacttgacattaatattaaaaataatatactgagtattgaaaatgttagaaaagaggttgacccgtggataagcaagaagacggtgtattttttaagaaatttaaagaacagctgggtaagcatcaattcacaatcggaattagcgatttggcgaagatgaccggcgtctctcagacacagctacgttactgggaacagaaaaattatattcatagtcttaaagtgagtgagaagaataccacgcatcgttattcgtatggtatgctgatgcgtgttcattttatcaagatgatgttagacgagggttttacactggcagcggctgtcgagcgggccgatgggtataataaccaaatggaaatgatgcgcatctttatgatgacggcttttcaaggaatcgaagaacgggatggtcaccacatggtcaagttgggatattttgacgaagcgaagacacaacagctttattgttatattcaagatgagacgccacattatcgactttatcccgttaagtcagagcgctagcaaccttcagcttgtgtaaccgattaattaatgttaaatttaagttggtaaatgtcggtaagtcacttgggcatttaagtttcccgttcgtcaaccgatcttatggctgggttgaccgttgtcatgttggtcgtgttttgaagtttaactttgcaaaaggatttacaacggagcgcgaataagcgctgagagatgcctagctagaactaggtagtaatcgtgcataaaacaacgtgtaattgaaactagtagtagtcttcaatcgcccggtgatgatatttaccagaggtcccaagtgctgcgggaaagcttggggcttttttgtactttcgtacgttaaaacgtaatctatcagtgtggttatcaacaaaaaagagaccgagtatcaactcaatctctttaaataatctataagtacgcgtggtgcttgtctttcatttagtattaattctacttctatatgaaataatcacgagtagcgcgcgttaattaagtaggaattgttaagatgtcgcagtttgagcaaacttggcggctaaccattcattccatggtagtgctggattaccactagtaaagtattgttgatcgagtcgatcaatcaagttgacgtaggcggtaaatgaaaaactaacggtgtcactcaagcgctgagccttggtcatgtagcggccgtaagtaaggtgttcattgatgtctgtcatatagctggcaacatcatagttggacatcatttcaaggttgttagcgtcaaaaagtggtaagtagaatgcggcaaagtcttcaactgccttgtgctgcaaagaactatccaattgcgtaattgataattgagcatcatcattcacgatgcggttcctccttagttgaacaagcacgtttctaaattagtaaccaaattggttattttgcgctacaattaattatgtcacgattaggcaattatttcaaagctttgtcgttattagagactaggactggtgtctcaattgtagtaagatgttagaattatattagagagaatcagaagtaactatttagttgaggtgaagaatattcatgacccccatgaaggaagattacttaaaaattattttcgagcttggtggtacgaaaaaaaaggtgtcgaataagcaaattgccttaagtttagacatcgcggccggctctgtaacggagatggtcggtaaattagttcaggaaggcttggctaagcataccccgtatgctgggatttcgttaacaaagaaaggcattcgctacgctgaaacgttagttcgcaagcaccgaatctgggaagatttcttagttgataaattggattatgatttgccagacgtgcatacggaagcggaagtgctggagcatgtgaccagtgaacgactagtggattctttggaagcctttttaggcaatccgacgcattgcccgcatggtggcgcgattcccgataaggatggtcattatcaggaagacagtcatgtgagtttagcagatacgcaggatggcacaacggttacgattgagcgatttattgataatcatgatttattagtttatttgcatgatacaccgctcaagattggacagcaggtcacggttttaaagcacgatccatttgaaggtcctgttaccgtttccattcagaaaacgggcgaggaaatcccagttagctataaagcggcgcacaatgtctttgtaaagtaagcatgcggcacctatttccgaacaaacctgttaattgttagttagttattctgtttcatttatcatcacataaacatttcatggaaatcatggtgtttggctaccctttttagaaacaatatgctacaattgttcttgtagcttggttaggtaattttggtcagatcgtttcaataaactatccccatttgtaccgaatcatgatttacattattttatacgtgcaaaatgcactaggaggattttttattatggaacacggaacagttaaatggttcaacgctgataagggttttggttttatcactcgcgaaaacggtagcgatgtattcgtacatttctcagctatccaagaagacggcttcaagagtcttgatgaaggccaagctgtaaacttcgacgttgaagaaagcgatcgtggcccacaagcagttaacgttacaaaagcataattaacagcttaaatggcttaaaccggtgatgagaattaattctcatcaccggtttttttgtcgttttgcagcggatgcttaattatcgtaaataaggctttactaacagccagacattggctaaagtaagaatcattagagaatgtaattctgattattaaagggtgggatgacagtgacaaccgatgagatgattattgcgacttgcttgaaggctggtaaaatcatggtcgagaatggttcggagatttcgcgagtagatgatacgatgatgcggattgctcagaatgcgggggttgttgctgccaatacctacgtgacgattacgggtgtcatgatgtcgattcaaggacgtaatgcaacgcagattgccgcggttaaccagcgaacgatcgatcttgaaaaagtggcacaggtcaatcagttatcccgtgaatttgcggctacgaccattgatttaccaactttatatcaacggcttaatcagttagatgcagcttcgcgctcatttccgttgtggttgcagttggtcggtgcagccttagtcagtggccccttgatgattatgtttcgtcaggaaattgttaatacgtggccaactgttattattggaacattaggttacttggtcttttatctgcttaaccggtatcttaaaattaaatttttgagcgagttaacggcggcacttctaattgggtttggcgcggaatgggtgtgtcagattgggtggggaaccaatgtcaatgatattattatcgggtcgttgatgccactagtgcccggagtgccattaacaaacgccgtacgagatactctggctggtaatttcgtcagtgggcctgcacgtggcgtggaagcgatgctgagtgcggcagcactaggctttgggatcgccgttgtcattacattattttaagtacgggcactagcctgggtattcggagggatcatgatgggcacaattggacaattagtgctggcttacattgcggtactggggtttggcctgattattaatattccacatcaagcgttaaacgttgcgggctggattggtaccctaacgtggggtggctatttgattgttcaggcttttgatggtggggtcgtcttaggaagcttaattggctcggtcggtattggcgtcctcagcagcttagcagctcgctacaagaagatgcccgctattatcttcaatattccgagtttagtttcattcgtgcccggcagtcaggcttatcagatggtgcgtaactttgcgctgggtaattatcgtgaggcggtttcattcacgttgcaagtgattatgattactggtgcgattgcattgggattcttattagctgaattactcaaccggcttatcgcattttgtattcgccagtggcggttgcaccgattggagtcgtaacctaactgttggctgattagttgtgaatcgtgaacaaagtttgcggacgctaagactaagcgccataaataaattccgccaaaagtggtgggttagtgcgactaatttgccgtgtgccagcgttctgaatagttacgcgcttagattagttattacgactcgcattcaatacagaaaaaggcgccaactgaactgctctactaagcagttcagttggcgccctttttaattagttagctgagacatcgcaacaagtagtcacgactcttatcatcaaatcagatggttagttttggttagcaaatttttcgccggttgtcgcagcctttaaattaagggacttacgtaagacgttcgtgacccgttgcttttcagattgcgaaacaacttcgaaagactgaccatcaatcatcttaccagtaccctgggcgtgatcagagacgatattcttggttgcactacggtaattagtgacgatactagttaaattaccgaatgttaagtcagtccgtgtttgtttagcaagtgaatttaagaaatcttgtttaagcaagttggaagcactggcgctttctccgataatggcggtaattaattgccgttgccgctgttgccgaccatagtcgccgagtggatcatcataacgcatccgggagtaagccaaggctttggcaccattcatatgttctttttggcccttagtaaaggtgtagccttcgtaggtaaatgtccgaattggagtaatgtcaacgccaccgatttcatccacaacttttttcatgccacccatgttgatcagggcgtaatagtcgattggaacgttcaaccatttttgaacggtcttgatggtcgttccggcactaccataagcgtaggcagcgtttaacttagtcgggaagtcctgttcgaagccggagacagctacttcagaatcacgtggtaaactcatcagggtcgttgtcttagtcttggggttgatcgttgctaagatgatcgtatcggtccggcctttatagttccgcccgagggccccggtatcagttccgagtaataggatcgagacgggtttcttgccattcaatacggcgctcgtattccgactctttttaataccactactcttgaagacggtgtcggccgcattcttggcgttaaaataagttcgcgcggcaaaggccccggtcccaactaataacacggcaataatgattaaaacggtattgcgaacggggtgcttcttcttgggcccgttgccgttcccctgtgaattgtttccttgtgatttctcacgatgcatttctgagcgacttggcatgtcttccatgaactcttcctccaatggtaatagttattcatagtttagcattttttcgggtcagcgggaactgaatccacgtaagatttagcttgattaccgatgactgtcagataaatcataacctttttgttaataaaacgtgattaaaatgggaattctttgtttttttttaaggttccctgagagatattaatgattcgttcagtcgattaatagactatggtataattttgttaattttaatattaaatgggggttcttgttttgatgatcgataagtcgcgtagtcggccgatcaagtttgtcattggggtaattttatttgcctacttaagctattttattagtgacggcgcggttggtattgatttactagatgtggccttaacgtcgctggtccaaattagtaatagcggtatttggacggtattttataaggtgattgcttggttggcgtcacccggaatggacattttgtggatcgtcatcctggcgtttctaatgtacggatttaaatataagattcaagcgttctggacgctagcatatatggttggttcaatggcgttaggctttattgtcaagcacatcatcggccgagcgcgaccaattggtcatttagcgcaggataccggatatagttatcccagtggtcacgttttaggaaccttcgtgttggtcagcgtgattatcatgttgattgttcctgagttgccaagttatcgaatggcaatgatcgtcaagtgggtgagtgtcgtatggttagtattggtcattttctcacgtatttacttgaatgcacattatccaactgatacgattggggccgtgctattggcatggtcttggagtcaaatcatgcaatggttctacgttttctgggcaccaggattattgaaatggccgttgttttatcgttcatatttataaagacaattaacaaacttaaactaatctattatttagcaggcaaccgtgtcactaaataatagactcaaaataaaaaatcgtttgctttaatcgacactactcggctgattgcgagaaattgatcgaagcaaacgattttttgtttacatctataaaatattaactagcaacgactggtaatgaactaacgattatcagctagccattcaagtgctaatgttaaccagtgggcgacgtgcggctgattggcgtctggtttccatgctgtttgtgcattcgcaagggctagtccgtgtgggccatgtttaaagacgtgtagttcataaggaatcttagcagttgctaacgcagtcgcgtaggcaagcgtattggttgctggaacaattgggtcgtcagccgttgtccagataaaagtcggctgattatctgaattgacgtgttggtcagcggccagttcattcggcgttggtgtccaggtagccaaggtcgcgtcatccttgggaaaacctagcaatggactgatgactggatagccgagtaccacgttattcggctttaacatggcgggcgttacgtttaattcagttgccacgcgggtcgcccagtaatcgttatacagtgccacaatgtgaccacccacgctaaaaccagcaggcgtgatctgttgcggatcaatatgccattcggccgcgtgttgacgaagcaagttgactgctcgtcctaaatctaatacgggtgctaatccgagtggttgttgatcagtgagtagcgtatattccaagtaaaaggcctggtaaccgtgcccagcgaaagccatggcgagactctctgcttgcgccactggaatatgcgtgtatgagccgcccgggacgataataatggcgggtaagttcgtttggtgtgcgttcgtatccggttgatgcaaataaccggtcaattgcgcgcacgtcgctgttaatttttgcttaataacttgcatgcaatcacctcaatttgatatggttaacataactattataacgcaagtcaggtggaacagatatgggcatggttacggttacaactcggaatgagcaactcgagttacggccatttacgttggcagatacagaggattattatgacttagttcgtgatccgtcaattgcggcatcggcgggctttacgccagcgcacagcttagtggaatccgaattcttattgaaacagcaatcgaagttaccacagatttttgcgattgaactaacagcgatccaccgcgtgattggcagtgtggggttgtatgagcgcatgaggaatacgggcgaaccagcaactttagagatggatctcgggtatatgttgaacgctcgatattgggggcggggcattatgacggcagcagttgcacgtattttacgatacgggtttgaaacgcttcatttgcggcggatcacagccagttgtctagctaataatccggcgtctaagcgaatcttagagcatgctaattttcgacagtatgatgctgttcgccatccagattacgccccgtttggcgctggtcagacggagttattctttgattgtgtggaattaaacctttaggaggtgagttaatgcaactcgcaaaatcgtttgaacaggccgcctgcgtgttggtattgttggctacgcagcaacctgagattccgttgactgcggatgtcttgcacgagcgaattggtggttccgcttcgtatattcggaagattattcgtaaattagtagtggcaggactggtcacgtccaccagtggaaataacgggggtgtccacttggcacgctcacctgaggacatttcaattacagatgtggtcgcggccatcgaggggacgttgcagacctttccgaattatggttattttgaccgagtatttaaggacgttgaaccggtcgctcatgaagggacgaaagtggtcaacgggattttttcgcgagcggatcaattatggttagattttttagaccagcaaaaactggcgacgttgatcaagaaattattagttgttactcaaatcccagtgttggattggacgaattactcagatgataaaatggcccaattaaatgcgttgcttagtcggatgcgggcacataagtgagacgtcgtacaaactcgataaaaattgggagcggtttcgcttggtaaaccaatattgacgcgcttttgccaatcggggatcattttcaaaatgatacactttatttcacaaggctgaaaatgctgttattaaagcgttttttatggtattctaacaatgaatttcacaagatagaggggaacaacatgccagataagaaatattacggggccgatgcgatcgtcgacagccttgtaaaccacgacgttaagtacgtattcgggattccaggcgctaagatcgatcgggtctttgagcgcttggagcacccagtcaatccgaaaagtccgcggttgatcgtgacgcggcatgaacagaatgccgcgtttatcgctgccggaatcggtcggattactgggaaacctggtgtagtgatgacaacatctggccccggtgccagcaatttagccacggggctcgtaacggcaactgctgaaggtgacccagtcttggcaatttctggtcaagttcagcgtgctgacttgttacggttgacccaccaaagtatgaataacgcggcactatttaagccgattacaaagtacagtgcggaagttcaagaaccggaaaacatttcggaagtgctcgcaaacgcctaccaagaagccacagctgctaagcagggtgccagctttgttagtgtgccacaagatgtcactgattcgattgtacgcacacctgttattacaccaatccaggcacctaagttaggacctgctagcccggtcgaagccacgttattagcacaaaaaatcaaagcagctaagttgccggtcttgctagttgggatgcgggcttcttcaccagaagtgacgaaagcaattcggaacttggtggctgctgctaatctaccagttgtcgagactttccaagcggcaggcgtgatctcacgtgatttggaagccaaccatttcttcggtcgggtcgggttattccgtaaccaaccaggggatatgttactaaagaagtccgacttagtgattgcggtcggttatgacccgattgaatatgaaccccgcaactggaatgcggaaggcaaatcccgtatcgtggttatcgatgcaatgcgcgctgaaattgatcataatttccaaccggaaaccgaattgatcggtgatattgctcagacgttagactttttgttgccgtacatgaagggctatgatattagcgatagtgcgcgagcttacttgggtgaattacaagaacggcttcagacgcgtgatttcgtacctaatattgataagcagtccaagttaaatcatccgctgtcagtaattgcagccttacaacaacgggtcagtgatgacatgacagtgacggtcgatgtcggcagtcattatatctggatggcgcgtcactttcggagctatgaaccacggcacttgttgttcagtaatgggatgcaaacgctaggggtggccttaccttgggcaattgcagcggctttggttcgtccagatacgcaaatcgtatctgtctctggtgatggtggtttcctattttccgcccaagagctggaaacggctgttcgactgaagcaaaatatcgttcatttgatctggaatgatggcacctacgatatggttaaattccaagaagaaatgaagtatggtgaggatgcagcggtccactttggtccagttgattttgtgaagtatgctgaaagctttggtgcgactggcttgcgggtaaaccaacctgctgatttggaaaaagtgcttgatcaggcctttgccacggatggtccagttgtggtggatattccaattgattattctgataacaaggcgttaggtaagacaatgttaccagaccagttttattaaaattaccattagtgaccggttgtcaaaagatggtcggtcagatataatggttgagtatatcgaaagaagaggatgcggttaacaatagtagccggctggaagtgggtcaccacttatgaaggtcagtgaacggggcaaccgccgaaatcgatggatcagtgaccgattcatccgttgggtcttggttgaataaatcaaggactgtcgcagctagaatagttgcggggcgctatcgacgatgaaatcagcaattatgtcaatcaatctgattaaagtctttttgcgcacgttatcgtgaggcagagaggctttttattttgattgtgctaacctgaatcggtgtgaacacttttagatataaatcgatttttggaggttctgcaatggcagaaaaacaacatcaggaagtgcatcgttccttacagacgcggcatttatccatgattgcattaggtggtagtatcgggaccgggctgtttgtcgcgtccggttcggcaatttcaacggctgggccagggggagcattactggcctacgttggtattggagtgatggtttactttttaatgactagtctgggcgaaatggcaacttatttgcccgtttcaggttcgttttccacgtatgccactaagtttgttgacccggcacttgggtttgcgatgggctggaattactggttcaactgggcaatcacgttagcggtcgatattagtacggcggcgattgtcatgcagttctggttgccatccgtgccggggtgggtttttagtctgattgcgctcgttttgatttttacgatcaacgcgctgtcagtccggtcgtttggagaaactgagtactggctttcgctaattaaagtggtgaccgtgctcgtattcttggttatcggtgtcttgacgatcgtgggaatcatgggcggtcatgccactggcctcagtaactttacctataaaaaggcaccatttgttggtggaattccaacgattttgagtgtcttcgtggtcgctggtttttcgtttcaaggaaccgaattaattgggatcacggccggggagtcagcaacaccggagaaaagtattccggcggctattaaacaagttttctggcgtattttgttattttacattttagccattttcgtgattgcggcgattattccttatacgtcgaaagatcttctagggtcatcagcgagcgatattgccatcagtccgtttacgttagtctttaaacgggctgggttggcggctgcggccagtgtgatgaacgcagtgatcttgacgtccgtattgtcagctgctaattcggggatgtacgcctcgacacggatgttatattctttgtcattacagggttatgcccccaagacatttggtcgggtcaatcgtcgtgggattccaatcatggcattattaggaacgacggtgatcggattactcacgttcttgtcgagtctattcggtgaacgaatttatattttcctcgtttcggccagtgggttaacgggctttatcgcttggctaggaatcgctatttcgcatctgcgtttccgtcgcgcgtttgttaagcagggtcatcaattgagtgaattgcggtaccatgccaagtggttcccatttggcccgtggttcgcctttatcttgtgtgtcgtggtcattattggtcaagacttacattcatttgcaacgcttgattggcaggctattggggtgacctatatgagcatcccgttattcatcatcttgtatgtctattataagattcgtcaccatactaagatgattccactagacaaggttgatttgacacgcaaacggcaccatcaagattaagcacgcactttgatagtttgagtaaatgcggttgacactgggtcaatcgcattttttgacggcgagagttgggcctgtcaactcaaggcgcggtcgtatttttaggtgtcctgatttatgctgataacactgctcacaacagatggtcacggcggatcgttatgagcgggggcttgcacgattgtaatgatagcaagcggcaaattgagggtgcgctaatctgatatctatggtaatttgatagaatgagaatatggaatcattaaaaattcgcaaacttatccttaagaataggctagtcggctatgactatgctaagctgaaatgagaaaggcagcgagagagatgttaaagagaaatttgttaagaggtctagcattagtgtcattagcaggtgtcctggctggctgtggtgctagccagtcgacgtctaaagcgactagtagttctacgagtgctaagtcgacgaagacgcagaccaagcggcaacgactgattagtgccttaccgaaaggcgttaaatcgaccgatagcgacttagtggtcgtcaataagtggcataagcgcgctgagatgacatttaataagtcgagcgtggatggtattgaagtccgtagttctatcgtcaaaccattggaagcctttctagcgggggcaaaaaaagccggctatccagcaacaatcgtgtctgggtatcgctcagtcgcttatcaaaaagaggtttggtatcagtcgattcaaacctatgagaatcaaggaaaatcagccaaggaagccttaaagctgactaaagaatatgtcgcagttcctagtggtagtgagcatgaaactggtctcgcagcagatatcatgaacacgcactggtacagcactcatggtaatcaattattgtcatcatccgacaagaacaagggtcagcagtggttgattaatcacgcggcggactatggatttgtgttgcgctttactaaagatggtaagcagtcgaccgggattgactatgaatcttggcatttccgttacgttggtaaggcgagtgcggaattcatgactaagcacaatttgactctcgaacagtacgtcagtttgctgcaagctcgagaaaaggcggccaagtaataagctagccgtattattgatggccccaattaataccatttatggcgtacgttaggaattagctagcgtgcgcttttaaattgtcttcggtttagcaatgtgggttcgtctcaactgagtattatttggtcacgacacgttgtcacttgatcatgctggtcagaggccgcactcaaagctgaagtgccaccagcgccggcttgggtaacccagtgtgtgttagtgagttgcttggatcgctgactagtgcgtcgcagttgtggctggtgcgaagttttttactgaattaactcaccagatattgcattttaagacgtgggtgcgtacaatatgtagtgttgcttttagagataatcaaaattttgacgtgattaaaaggagagacgccccatgcttgtaatgtcaggaacaatcggtgccggcaagacgagtttaacgcagttagtggctaaccactttggttctaaagcgttttacgagtcagttgatgataatcccattttgccgttattttataaggatcctaagaagtacgccttcttattacaaatctattttttaaataaacggttagacagtattaaatcagcttttgctaacgatctggacgtcttagaccggtcgatttttgaagattcattattatttcatttgaatggtgatcttggccgggcgacgaataccgaagttgacatttatgattcattattagataacatgatgcaggaattgccagaagcgtctcatcaaaagagtcctgatttacttattcatatcaatatttcttttgatacgatgctcaaacgaatccaaaagcggggccgttcttacgaacaaattgatcaagatcctgatttatataaatattatcagactttgaatgaacgctatgacgactggtacgctaattatgatcatagcccgaagatgcagatcgacggggatcagctggactttgtcgccgatgcggatgcgcgtaaggaagtcattcggttgatcgacgaaaaagtggctagtttaggctagttgcctttttagaatcaatgttttatagtagacagtgaatattaaacacggcgcgtttttaagtagacgttcagagaaccggtgggtggtgtgaatcggtagtcgaaactccggcgcgacaatgtgggcaggtaatactgcacggcacggccgttatccgtttaagggtgggattaatcatgatcctgaacttgggtggtaccgcgaatcgcagtctcttcgtcccaattgggagaagagactgtttttatttacgattaaaagtgaaaaggagacgtcgttatgttagatgttaaaatgattcgtcaaaatccagattttgtaaaagaacagcttggtcatcggggcgttgctgcgagtgacatcgatgatttattggccgctgatgaaaagcgtcgtgaattgatcgccaagagcgaacaattgaagtcgacgcgtaaccaagtttcaggcgaaatttcacagaagaagcggaacaaggaagacgctagtgccgaaattgcagaaatgcaaaaggttagcgccgatgtgaagacgttggatgaagaacggcggacagtcgatgcccaagttcaggatatggctgcacatttaccaaacatgccccatcccgacgtaccagttagcttgaaagaagaagatgccgttgaattacgtcgaatcgggacaccacggcattttgactttacgccgaaagcacattgggatatcggtgaagatttaggcatcttagactttgaacgcggtgctaaggtttctggtagtcgtttcttatactacgtgggcgatggtgctaaactggaacgcgccgtttacaactttttcttagaccagcacgaagctgaagggtatacggaagttttgccgccatacatggtcactgatgaatctatgtacggtaccggccaatttcctaagttcaaggaagacgctttccggattacgacgcaagatttgacgttgattccaacggccgaggtgccattagtcaactattatcgtgatgaagttattccggctgaaaaattaccagtttactttacggccttatcaccagccttccgtgaagaagctggtagtgctggtcgtgatacgaaaggcttgattcgcttacaccaattcaataaggttgaaatggttaagttcacgaaaccagaagattcatgggatgaattagagaagttgaccaacaatgccgaatcattgctaaagaaacttgggttaccatatcacgttattacgttaacgactggtgacatgagcttcacagctgccatgacacatgacttggaagtttggttcccagaacaagacaagtaccgggaaatctcgagttgttcaaattgtactgatttccaagctcggcgggcgcacattcaatatcgcgatgacgatggcaaattgcaattcgttcatactttgaacgggagtggcttagctgtcggtcggaccgttgcggccattttggaaaactatcaaaatgaagatgggacggttacgattccggatgtattagttccatatatgcacggtaagacgaagattgaaaaacaaggttaattgagatgaagttagcgaactcgcagtgatgcgagttcgctttttttgcataattaatgagtattaaaaggaactgtcgattttaaaatgtgagtggaaataacggccgagttgactaaataattgcgggacgggcagaatgtcgggacaacatttcaggcgcaaaagggcgaaaaagctgggtttactgaaatttattcacctttttttgaaaatagggtttgctattttcggctaccgtgctataatatttcttgtcggaaaaatataacttgtttatccagtaaaaagtatatttatccatttatttgaaaaaagttgttgacaagtattcaacatgatgataaagttaaatagttgtcaaggcataccagtaagaactgtttgaaccggcaacaaggcatgattaacatcatgcgggtgtggcggaactggcagacgcgctagatttaggttctagtgtcttacgacgtgggggttcgagtcccttcacccgcacatgccgacttagctcagttggcagagcatctcactagtaatgaggaggtcggaggttcgaatcctctagtcggcatttacaatttaatagctttattatgcggaagtagttcagtggtagaacatcaccttgccatggtgggggtcgcgggttcgaatcccgtcttccgcttttaatttgccggggtggcggaattggcagacgcacaggacttaaaatcctgcggttagtgataaccgtaccggttcgatcccggtcctcggcattttaaataagcacccatagcgcaattggatagagtgtctgactacgaatcagaaggttgtaggttcgactcctactgggtgcattagtatcgggaaatagctcagcttggtagagcacctggtttgggaccagggggtcgcaggttcgaatcctgttttcccgatcgtttaacacagtcttagttaagtgctaaggctttttatttaattttctcgggaagtagctcagcttggtagagcactacgttcgggacgtaggggtcgcaggttcaaatcctgttttcccgattacggttaaaccaactaatccagtcatttggctggatttttttatggccttttttgtaagcaggggtgtttcaacggtcaggggacacttttgcgacgttactcactaagtcagccatgtgaagaatacggtggttgtgactcataatcccgacaaggcaacagccactgttagtcatgagctcggagaaattagtctcggaactgctgttcatcgttgtgataccagtgcccatcgcctgcaatgaggagtgactcaacttgacatattttaaataggtagttcaatgaatatggagacctaataatttaatcattatgaggttctaaacggttgaatcaattgaaagcaaacgttcggcgtgctatgctgtaacaaccgttaagcacatgctagtccgcggtttgggtgaaattctttgcttttttccattatcctcgtataataatagtcaatattagtcaaagataatgaaaagggtgaagcacatgcaaagtcaaaatatctcggatattattgaaaagtatttaaaaagtattttggcggactcggagcatgttgaaattcgacggtcagaaattgccgaccttttcaacgtggtaccctcacagattaattatgtgattaagacccggtttacgatccaaaatggttacttagttgaaagtaaacgtggcggtggtggttatattcgcattgagaaggttaatttggtcgatgatgctgatgtgttggacgccctcatacaggtgatcggcgattcaatcacacaacgagatgcttatgcggtcgtccaaagtttatacgaggacgacgtcttaaatcgtcgagaagcgcaattgattttagtggcgattgaccacgagacgttaggattaacggaccgggacttagaaaacagtctgcgggcccggataattatcggaatcttgaaccacttgcgttacgaaagctaaagaaagcgaggaatcgcaatggataacttatttacacctagtgccaaaagtgtgctggtactggcacaggaacaggccaaatatttcaagcatcaggcagttggtacggagcatttgctattagcattggccatcgaaaagaatggaattgctaataaggtgctacaacaatatgccgttagtgaagatgacattcgtgaagaaatcgaacggttcactggctatgggacgttgagcaatgttggcaaggatacttacttgccatattcaccaaaggccaaagaaattttgtccgttgccggtgatgaagcaaaacggctcggtgccaacaagattggaacggaacatttgttgttagcgatgctctctgatgaaagtatcctttcctcgcgaattttaatgaatttaaacttagatctaggtcagacgcgtaaagtcgttcttcgcaagctaggtgtcagtgacgccatgagtaagcgcaagggtaacgcggctaatcgcggtggcaagaagactgaaggaacgccaaccttggattctctggcgcgcgatttgacccaattagctagtgaacaagaaatggacccggtagtaggtcgttccaaggaagtcaaacgggtcattcagatcctgtcacggcggacgaagaataatccggtcttgattggtgaacctggggttgggaagactgcaatcgccgaaggtctagcccaaaagattgtggccggtgatgtgccaactgatatggcagataagcgtttgatgatgctcgatatgggatcgttagtcgctgggacaaagtatcgtggtgaattcgaagaccgcctgaaaaaagtgattgatgaaatttacaacgatggccatgtgatcttatttatcgatgaattgcataccttgattggtgccggtggtgctgaaggggctattgatgcctctaatattctgaaacccgcacttgcacgaggggaactccaaacgattggggcaaccactttaaatgagtatcaaaagtacattgaatctgacgctgcgttggaacggcgttttgcaacggtcatggtcaatgaaccgaccgaagacgaagccgttgaaatcttagatggactacggccacgctatgaagaacatcatcgggttacgattacggatgaagctgttgatcaagcagtcaagctatccagccggtatatcagtgatcgtttcttgcctgataaggccattgacttgatggatgaggcggcagctaaagtccgcatcgatcagatggatcaaccaacaaagctatccaagaaccaggacaagttagcgcaactgcgtgaggataaggaaacagcgatcgaagcacaagattttgaacaggccgctgatattcgtaagcaggagatgcaactgaagcaacgcctagatcgaatcgaagctgaccaagacgccgaagtgactgagggggcaacaccacactatgatttacaagtcacaggtgaggatattgctcaggtcgttgccgaatggaccggggttccgttaacgcaattgcaaaaatctgaaagtgaacgcttagttaacttggaaaagattttgcatgaacgggttgttggacagccagaagccgtatccgcagtggctcgtgctattcgccgtgcgcgcagcgggttgaaagatccgagtcggccaattggttcctttatgttcttaggaccaactggggttggtaagacggagctagcaaaagccttggcagcagcgatgttcgggtctgaagataatatgattcggatcgacatgtctgaatacatggaacgctattcgactagtcgtttgattggctcggcacctggttacgttggttatgacgagggcggtcagctgacagagaaggttcgccagaaaccatactcggtcgtgctatttgatgaagttgaaaaagctcatccggacgtctttaacattttgttacaagttttggatgacggctacttgacggattctaagggtcggaaggtagacttcagaaatacgattctgattatgacgtcgaaccttggggcaaccacacttcgtgatgaaaaatcagttggttttggtgcaactgataaggccaatgactacaatgcggttgctgcgacgattcgagcaacgttaaaacagacgttccgcccagaattcttaaaccggatcgacgaaacaatcgtcttccattcattgaataaggaagaattacacgaaatcgttaagttgatgtcacaagaaattgttgatcgagtggcccaacaaggtatcaagatcaaaatcactccggctgccattgacgtggttgcgaaggctggctttgaccctgagtacggagcacgaccaattcgacgggcattacagactgaaatcgaagatcggttgagtgaagaattattgaccggcgcgatcaaggtcgatgaccaagttacgattggtgctagcaagggtaccattacaattaatattaaaaaccagcctaaggcagatggtcgttcgaccgtttcctcaaagtaggcgcgattaaattaaagatgacgcttgaagtggtagtccacttcaggcgtcatcttttaggttcaatcggtattaagatgctacccactgaagtgaactgtaggatctgaggctggtggttcggtgctgattggtgtaaattataataggaaataaagtcaagaaagaagatgataacatggcgacacgagccgaacagatggcgaagacgcaccaggcgattttagacacagcccgggaactgtttttaagaaatgggtatgatgcgacaagtacgcgcgacattgcgaatgcgattggcattacgcagcccgcgctttatcaccattttaaagataaagaggtcatctttctggctgtcattacgacggtcggtgcggaaatcaaggctggcattgaagcgattcaagtccgtgcggattggtctccgttggatcaattaacagaagtctcgctattactaacgcataagcatccggctgatgtcttcacgttaattcattccagtttcaaagcattaacgcatgaacatattcgcgagttgggcggcatatttgttactgattatgtgaagccgattcaaaccgtttttgagcaacctgacatgcaactacatgtgggggtcacgccacagatggcgacgaatttctatatcaccagcttgagtccgctgtttaacagttttcatcaaatcggtgatcctcatgctgacgagcggacccgcgttcaaacccttttgaagatgatcttatacggggttgcgagtgaaccagaaaactaatggcggcagagaagtctactagttgacaactaacgttattcgatgtatattataacttgtctgtaaccgtgaactcgagcgaacgcgcaatctattgtctgtgcggctcgttaatataaatccaaaaatagtcaacttaagcgactatttttggtttttttatgcctaaaattcggtcaaaaacgcatttgtaacacaaatgtaatatttggctggaggtggcgggttccggaataataagaaggggtgaacaacttggccggacatttagtaaaatacggtaaacaccgtacccgtagaagttatgcacgtatcaaggaagttcttgatttgcctaacttgatcgaaatccagaccgattcttaccaatggttcttggatgaaggtctccgggaaatgtttgaagatattatgccgatcgacgatttcgcaggaaaactttcacttgaatttgtcgactatcaattattagaaccaaagtacaccgtcgaagaagctcgtgaacatgatgccaactactcggcaccattgcacgttaccctacgtttaactaaccatgaaactggtgaaattaagtcgcaagacgtattcttcggtgattttccattaatgactgaacaagggacgtttattatcaacggtgccgaacgggtcattgtttcacaattggttcgttcacccggcgtttacttcaatgaagaattagataaaaatgggcgtcctagctacggcacaacggttattcctaaccggggtgcttggttagaacttgaaactgacgccaagaatgtttcatacgtacggatcgaccgtacgcggaagattccattgacggaattagtccgggccttaggctatggttctgacgatgacattattgacatgttgggtgaaactgacagtttgatgttgacgttggaaaaggacgttcataagaacaccgacgactcccgggttgaagaatccttaaaagatatctacgaacggctacgtcctggtgaacctaagacggctgacagttcgcggagcctattgactgctcggttcttcgatccaaaacggtatgacttcgcaccagttggtcgctacaaggttaacaagaagttaagcatgaagacgcgcttaatggaccaaacgttagctgagacattagctgatcctgatactggtgaagttattgcgcaaaaggatacggtcattgacaagaatgtcatggctaaactatccccatacttggaacgtgacgactttaagacggttacttacacaccatctgacgaagccgttgttacgaatccaatggtcttacaagttgttaaggtttattcacaaaacgaccctgaaaaggttgtgaacgtgattggtaatggcaacattgatttgaagttcaagcacattgtgcctgctgatatcattgcttccattaattacttcttcaacttgcaagaaggtcttggctcaaccgatgatattgatcacttgggtaaccggcggattcgttccgtgggtgaattattgcaaaaccaattccggattgggttatcccggatggaacgggttgtgcgtgaacggatgtcgattcaagatgctgcgacggtaacgccacaacaattgattaacattcgcccagtggttgcttcaattaaggaattctttgggtcatcacaattgtcacaattcatggaccaaaccaaccccttaggtgaattaacgcataagcggcgtttatcagccttaggacctggtggtttgactcgtgatcgggccggatatgaagttcgtgacgtgcactatacccactacggtcggatgtgcccaatcgaaacgcctgaaggccctaacattggtttgatcaacagtttgtcttcttatgcgaaggtcaaccgttacggcttcatcgaaacgccataccggcgtgtcgattggacaacgcataaggttaccgataagatcgactacttagcagccgatgaagaagaccaatttgtgattgcacaagccaactctccattgaatgatgatggttctttcgttgaagacactgttttagctcgtaacaaggaagaaaacttggaaacgccaatcgaaaatgtcgattacatggacgtttcgcctaaacaagtggttgccgtcgcaacggcatgtattcctttcttggaaaacgatgactctaaccgtgctttgatgggtgccaacatgcaacgacaagcggtgccgttacttgatcctcacgcgccattaattgggactgggattgaatataaagctgcacatgactcagggattgccttgatttgtcgtcatgaaggaacggttgaatacgttgatgctcgcgaagttcgcgttcgtcgcgatgatggttcattagacacttacaagttaatgaaattccgtcgttctaacggtggtaagaactataaccaacggccaatcgttaaagttggcgatcacgttgataacgatgaagtcttagccgatggtccagcaatggaaggtggggaattagcccttgggcaaaacccattagttgctttcatgacctggaatggttataacttcgaagatgccatcattattaatgaacgtttagtccgtgaagacgtctacacgtcaattcatattgaagaatatgaatcagaagcacgtgacaccaagcttggacctgaagaaatgactcgtgaaattcctaacgtcggggaagatgcattgaagaaccttgacgaagacgggattatccggattggggccgaagttaaagacggtgacatcttggttggtaaggtaacgcctaaaggggttacggaattgtcagctgaagaacggcttctccatgcgatctttggtgaaaaggcgcgtgaagttcgggatacgtcactccgggttcctcatggtggcggcggtatcatccaggacgttaagatcttcactcgtgaaaacggtgatgaattatctcctggcgttaacatgatggttcgggtctacatcgcacaaaagcggaagatccaagttggtgacaagatggccggtcggcatggtaacaaagggacggtttcaatcgtggttcctgaagaagacatgccgtacatgcctgatgggacaccaatcgatatcatgttaagcccaatgggtgtgccttctcgtatgaatatcgggcaagtgctcgaattgcatttggggatggctgctcggaagttaggaattcacatggcaacgcctgtctttgatggtgctcaagatacagatatttgggaagccattcgtgaagctggggttgattcagatgccaagtcgatcgtctatgatggtcggactggtgaaccgttcgataagcgggtcgctgttggggtcatgcactacatgaagcttagtcacatggttgacgataagatccatgctcgttcaatcggaccttactctttggttacgcaacaaccacttggtgggaaagcgcaatttgggggccaacgtttcggtgaaatggaagtttgggccttggaagcttatggtgcagcttataccttgcaggaaatcttgacttacaagtccgatgacgttgttggtcgggttaagacctatgaagcaatcgttaagggcgaaccaattccaaagcctggcgtaccggaatcattccgcgtgttggttaaggaattgcaagcactcggtcttgacatgaaagtcttggattctgaagacaaagaaatcgaattgcgggacatggatgatgatgacgatgaagttgtcaatgtcgatgcactcagcaagtttaaacaacaacaagatgagaaggctgcggacaaggccgcaaaagctgacgccgctaagccttctgaaacaaccaacgctcagcaagataatcaataaaaagggaggtcggtcctttgatcgatgtcaacaagtttgaaagcatgcaaatcggtctggcatccccagacaagattcgcagctggtcatatggcgaagtcaaaaagccagaaaccattaactaccggacattgaaacctgaaaaagacggtctgtttgacgaacggatttttggtcctactaaggattgggaatgtgcttgtggtaaatacaaacggattcgttataagggtattgtctgtgaccgttgtggggtcgaagtgactcgtagtaaagtccgtcgtgaacggatgggtcatatcgaacttgccgcaccagttactcacatctggtactttaagggaattcctagccggatgggcttagtcttagacatgagtccccgggcacttgaagaaatcatttacttcgcttcatacgtcgttatcgaatctggtaatacgccacttgaaaagaagcaattactttctgaacgtgaataccgtgagaagaaggctcaatatggtaacgaatttgaagctgccatgggtgccgaagccatcaaacggttattgaataacgtggatcttgaaaaagaggcacgtgatttaaaggaaactctgaaggatgcttctggtcagaagcggacccgggccgttcggcggcttgatatcatcgaagctttcgtgacatctggtaacgaaccagcttggatggtaatggacgcaattccggttattcccccggacttacggccaatggttcaattggaaggtggtcgttttgccacctctgacttgaacgacttgtaccggcgggttatcaaccgtaataaccggttgaaacgcttgttggacttaaatgcacctgggattatcgtgcaaaacgaaaagcggatgttgcaagaagccgttgatgcgttgatcgataatggtcgtcgtggccgtcccgttgctggtcctggtaaccggccattgaagtctctttcacacatgttgaaagggaagcaagggcggttccgtcaaaacttacttggtaagcgggttgactattctggtcgttcggttatcgatgttgggcctttcttgaagatgaaccaaatgggcttaccacgtcaaatggcgttggaattgttcaaaccgtttatcatgaaggaattggttaaacgtgaattagcttctaacatcaagaatgctaagcgaaagatcgaacatgctgatgacgatgtctggggtgtgttggaagacgttatcaaggaacatcctgttctcttgaaccgcgcccctacgcttcaccgtttagggattcaagctttcgaacccgtcttggttagtggtaaagcgatgcggctccatccattggcttgtgaagcttacaacgccgatttcgatggggaccaaatggctattcacgtcccactttcagatgaagcccaagctgaagcacggctcttaatgttagctgcccaccatattttggcgcctaaggacgggaaacctgttgttacgccatctcaagatatggttatcggtaactactacttgacgactgaagaaatcggtcgtgaaggcgaaggtatgatcttcaaggacttgaatgaagctcaaaaggcttaccaatcaggttatgtacatttgcatagccgggtcggcattcaggtctcatcaatgcctgacaagccattcacggacgatcagaagcaagcagtcttagtcacgacggttggtaaggcaatcttcaacaacattttgcctggcaagttcccttacttgaacgaaccaactaacgataacttgattgctggtacaccggacaagtatttcttgaagcctggtgaagatattcatcaattcttggatgcccaggaaatcattccaccattcaagaagggcttcttggccgacattatcgctgaagtttacaagcaatatcacgtgacagcaacgtcactcttgcttgaccggatgaaggacttaggttacaacatttcaactaagtctggtttgacggttggggttgccgatattactggtttgaaagaaaaaccagcaattatcgccgaagcccataaacaagttaatacgatttcaaaacagttccgtcgtggtttaattactgatgacgaacgttatgaacgggtcattggtgtctggaacgacgctaaggaccaaatccaacaaaaactgattgaaagtttcaacgcggataacccaatctttatgatgagtgattctggtgcgcgtggtaacatttcaaactttactcagttagctgggatgcgtggtttgatggctgcccctaacggtaagatcatggaattaccaatcctttcaaacttccgtgaaggtttgtctgtcttggaaatgttcatttcaacccacggtgctcgtaaagggatgaccgatacggcgcttaagactgccaactcaggttacttgactcggcgtctggttgatgtggctcaagatgttatcgttcgtgaaaaggattgtgggactgaccgtgggttgcggattcacgcaatcatggaaggtaacgaagtcatcgaaccgttgtatgaccggatcttaggtcgttacacgatgaagactgtctttgatcctgaaacgcatgatgaaattgtcggtaacaacgtcttgatcgacgaagacttagctcataaaatcgttgatgctggtgtaacggaagttacgatccgttctgcatttacttgcaacactaagcatggggtttgtgaacattgctacggccgtaacatggctactggtgatgaagttgaagttggtgaagctgttgggacagttgccgcacagtctatcggtgaacccggtactcagctgaccatgcggaacttccataccggtggtgttgccggggatgatattacccaagggttgcctcgtgtgcaagaaattgtggaatcacggaatcctaaagggcgtgccgaaatctcagaagttactgggacggttgaattaattgaagaaaatccagcggaacggacgaaggaagttacggttaagggtgaaactgatacccggacttacacgttgccgttaacagcacggatggcggttagtgaaggcgactttattcaccgtggtgctgcgttgaacattgggtcgatcgatcctaagcaattgattcaagtacgtgatgtcttatcaactgaaaactacttgctccgtgaagttcaaaaggtttatcggatgcaaggggttgaaattggcgataagcacgttgaaatcatgattcggcaaatgttacggaaggttcgggtcatggatccgggcgataccgacgtcttgcctgggacgttaatggatattgcagacttcaaggacgagaactacaagaccttgattgctggtggtattcctgcaacgtcacggccagtcattcttgggattactaaagccgctcttgaaacgaatagtttcttgtcagctgcttcattccaggaaacgacacgggtcttaactgatgctgctattcgtggtaagaacgatccactgatcgggcttaaggaaaatgttatcattggtaagatcattcctgctgggactggtatgccggtttaccgtcatatcaaaccaaaggaagttggcaacgtggctgatggggtttactcaatcagcgaccttgaaaaacaaatgcaagaacaagatgctagcaagtaattgctaagtaactaaaaagggcggccattgtggtcgtcctttttgtatgcacgattgtaggtaggctatctggggcgttcggcgatgaaggttaatcttcagggggggaagactaactgagcctcgctggaaaagttcaagtttgtgtaaacttgcttagttagtgtgtcctgcactgcgctccaggcatttctgttaattgctggactgccgtgccttaatactatattggtgaaacgtgttcagattggaatgagactttcggttagctaacactaatcctcagtctcagcccgtctaaaccgcacactcttgtagtgctaagaaacgtcttccgctcgggatggtgttcgaatggtgggcacgtgcgtacgcaacttttgacggattagtcgttacttttttgagaccggaatcttatcaggtaactttcaggttaataatagaattgtgagctgtccccgatttctaaatcaccatattactactgagggtcagaacaactgatacgatattaacgcttgtttaaagttccaagtagtaaacaattcgacgacaaattgtaccagttgagtggtcgttcatccgaacaggacgcgcactgactaacaagcaataatcggacgtactagaacattgcaattatagctcgctatgcgagacccgtgagttgggtgaccatgatgaagctccaactgatgaagggcacgaatggtaagcgatggcgtggggcactgatgataaaaccaactaatgcggcaacggccgcaatggcgagacaggtcaacagtgtgtcggctggaatgatgaaaacaagcatgagtagaacgtcaacatcgccgagaccaaaggtggcagttagccgggccagcaagtataacccgactagtaaggcaagtacgaggtagagactgatcgtcaggggtggccgttgttgccataagcccagtccggctggaagaagtaatgtcagcgggtagacttcaaaagtgagataatcagtaagactattgaaatcaataccaagtaaccaatcagaagtggcagcgtcaatgacaatgacgcactgctagaagctagtagactaccacaaagtaattcaatcagactggaacggaggctgataggagtgcgacaatcatagcactgtccccgttgaagtagaatgccgagtaatggtatcagttgccagaaccgtaattgatgccggcagtgtggacaccttgatcgttgagtgctaatgagtatgtgtccgttgctgatgcgttccgccatacaggtcacgaatgagcccagacagaggccaataataaaaagactgctggttaacatggaaggaccacctttcatcactagttacgcaatgtaaagcaccactattttttcaggacatttattgacaacttcggcatgtcatgatagtctagtaaaggtgctttttgcagacagattcctgtatcaggaatacagacatgctgactggtcggctaagcgcacaattaccatgctccaggcattcttttttactcaaaaaagaaccacctggatgtgtggacttaaaaaacagatatttggaaggaggacactttagaacatgccaacaattaatcaattaattcgcaaaggccgtaagtctaaagtatcaaaatcaaatgccccagcgttaaactttgggtataacagttacaagaaggttgcaactaataacccagcgccacaaaagcgtggggttgctactcgtgtcggtaccatgactcctaagaagcctaactcggctttacggaagtatgcccgtgtacgtttatctaacttaatcgaagttacagcttacattcctggtattggtcataacctccaagaacatagcgttgtcttaattcgtggtggtcgtgttaaggatttacctggtgttcgttaccatgttatccgtggtgctttggatactgctggtgtcgaagatcgtcgccaaagccgttccaagtatggtaccaagaagccaaagaaataataaggaggtaagttaaatgccaagaaaaggtgcacctgcaaaacgcgaagttttagcagatccaatgtataactctaaattagtaacgcgtttaattaaccacttaatgttagatggtaagcgcggtaccgcatcaactattttgtatgatgcttttgatcaaatcaaagaacaaactggtaacgatcctttggaagtcttcgaagaagctatgaagaacgttatgccagtacttgaagttaaggcccgccgtgttggtggttctaactaccaagttccaatcgaagttcgcccagatcgtaagacgactcttggccttcgttggatcgttcaatatgctcgctcacgtggcgaacacactatgtccgaccggttagctcgtgaaatcatggatgctgctaacaatactggtgcttcagttaagaagcgtgaagatactcaccggatggctgaagccaaccgtgccttcgcccattatcgttggtaatatttccgtgagatggttaaaggtcgcctttaactaatcacaaaaaggtgactattatatgcgcgcatatagtagtcattttttgaaataaactttatactgttaattccatttatattgagaggagtaacacattttctaatggctaatacacgagaattctcactcgataagacccgtaatattggtattatggcccatatcgatgctggtaagaccacgactactgaacggatcttgtactacactggtaaaattcacaaaattggtgaaacccatgatggtgcttcacaaatggactggatggcccaagaacaagaacgtgggatcaccattacctctgctgccacgactgcacagtggaagaaccaccggattaacatcatcgataccccagggcacgttgacttcactgttgaagttgaacgttcacttcgggttttagatggtgcgatcgccgtattggatgcccaatcaggtgttgaacctcaaactgaaacagtttggcgtcaagcatcaacgtataacgttccccggatcgttttcgttaacaagatggacaagattggtgcggacttcaagtactctgtaagcacgatccatgatcgtttacaagctaacgcccacgccatccaattaccaattggtgccgaagataatttcgaaggggtcattgacttaatcgaaatgaaggctgacctttatgatgaagatcaacttggtactgaatgggatacggttgacgttcctgatgaatacaaagaagaagcccaagctgcacgtgatgacttaatcgaagccttagctgacatcgatgacggcatcatggaaaagtaccttggcggtgaagaaatcagcaaagaagaaattaaggctgctatccgtaaaggaacgttagcacttgaattcttcccagtattagctggttcagccttcaagaacaagggtgttcaaatgttaatggatgccgttgtggactacttaccatcaccacttgatgttaagccatacaaggctactgatcctgaaactgaagaagaagttgacttgattgccggtgatgataagccattcgctgccttagcatttaaggttgctactgacccattcgttggtcgtttgactttcatccgggtataccaaggtactttggaatctggttcatatgtcttgaacgccactaaggacaaacgtgaacgggttggtcgtttacttcaaatgcattctaaccaacggaaagaaatcccagaagttttctctggtgatatcgccgctgcaattggtttgaagaacacgactactggtgactcattgacttcgattgaccatccatatcacttggaatcaatggaattccctgacccagttatccaggttgccgttgaacctaagactaaggctgaccaagataagatgaacgttgccttacaaaagctttctgaagaagatcctactttcaaggctgaaactaaccctgaaactggtgaaactttgatcgccgggatgggtgaattgcatttggatatcatcgttgaccggatgcggcgtgaatttaatgttgaagccactgttggtgcgcctcaagtttcataccgtgaaacctttactaagagcactcaagttcaaggtaagtttgttcaccaatctggtggtaaaggtcaatatggggatgtttgggttgaatttacacctaacgaagaaggtaaaggcttcgaattcgaagatgccatcgtcggtggggttgttcctcgtgaatacattccttcagttgaacaaggtttgaaggaagctatggctaacggtgtgttagctggttatcctttggttgacgttaaggctaagctctatgatggttcttaccatgatgtcgattctagtgaagcagccttcaagattgccgcatcattagcattgcggaatgccgttaagactgctggccctgttatccttgaacctatcatgaaggttgatatcgttgccccagaagattacttaggtgatgttatgggtcacgttactgctcgtcgtggtaacatcgaaggtatggaagaacgtgggaatgcccaagaagttcatgcatacgttcctttggctgaaatgtttggttatgcaaccacattacgttcagctactcaaggtcgtgggactttcacaatgacctttgatcattacgaaaaggtaccaaagtcagttcaagaagatatcatcaagaagaatggcggcactcctgccaaataagcttgattgataataagaaggacgttcagcttcggctggacgttctttttttacataaatttctggtcgaactaaatgtgattactgctcgtcgtaagacaacgtggcacatcaattgaagcggcttgggataagtttggccgtcactggcattgggtacggctgtgacgagcacagtgctgctcaggactatgtcatcgcgcaagggtacaaccgcgcaacaagggtcgcactagttaagttactagccgctgcgaccataaaactggcagccataatattaagggtgcgagactcatagcataataaggagaacgcggacaacatcgcattttttgtatcggagatgaccacttgagttgacggttgtcagtggccacggccaaggtgctgacggtcggtgataagtagatgacaatataatagaaggtagatgaacaagaacgtgggtcagtgtgacggcgccgtcagatgtaggagcggttgaattaagcgtgttgaagtccgattaaatgactccagacaaaaatgtatgacgctgaacgcgggtcttgttcctgagaaagtgttaatgcaatctagtaggtgtccacatgatcgtggccggtcggcagtgagaaatgtaaagcgctcaccaaaaagaaattaggcgcaaacgctattaattggatggaatttgtgttacattaattgagctggttcaaaaaggtaacacggtttacaacgatggttataaaaaaagtgcgaaaacacttgctattacagagcttttcatttattatagattgtgcttggtatttagaaggggataactatatctccatcatcaagtagtcgtagttagctttgatgtgaaaggttgcgacacgcccggccacattgtcatgggacgtggcggtaattttcacggagctagtcttattttcaaaatagacgaaggaggtcacaacaatggcaaagcaaaaaattcgtattcgcttaaaggcatacgaacaccgcattcttgatcagtcagctgacaagattgtcgaaacggcaaagagaactggtgctactatttcaggtcctattccattgcctactgaacggactatttataccgttctacgttcaccacataagtttaaggactcacgtgaacaattcgaaatgcggactcacaagcggttaatcgatatcgttaacccaacgcctaagacggtcgactcattaatgaagttagacttgcctagcggtgtagatattgaaatcaagctttaatttactaaactaaaatcaattaattggaggtgtactcatgaccactaaaggaatcttagggaaaaaggtaggaatgacgcaagtcttcactgaaagcggcgaattagttcccgttacagttgttgaagttcaacctaacgttgtgttgcaagttaagaccgttgaaaatgacggttacgaagcaatccaattaggtgttgacgacaaacgcgaagtcttgacgaacaaacctgctcaaggtcatgcagcaaaagcaaaaacgactcctaagcgcttcattcgtgaaattcgtaatgttgagcttggagattacacagtaggtgacgaagtcaaagcggatattttcgcagctggcgacgccgttgacgttacgggtatcactaaaggtcatggttaccaaggtaatatccataaggacggccaaagtcgtggaccaatggctcacggttctcgttaccatcgtcgtcctggttcaatgggtgccatcatcaaccgggtattcaaaggtaagaaattaccaggccggatgggtaatcaccaacgtacgatgcaaaacttacaaatcgttcgtgccgacgttgaaaacaacgttttattaattaaagggaatgtccctggcgccaacaagtcatttgtaacagttaaaacatctgttaagagtaaataaggaaggaggacataatacatgactagcgtagcattatttaaacaagacggtacgcaaaatggtgacgttactttgaacgacgctgtgtttggtgttgaaccaaacgaaaacgtggtttttgatgccatcttgatgcaacgtgcatcaatgcgtcaaggaactcacgcagttaagaaccgtagtgctcgtcgcggtggtggtcgtaaaccatggcgtcaaaagggtactggtcgtgcgcgtcaaggttctatccgttcaccacaatggcgtaaaggtgggattgtcttcggaccaacccctcgttcatacagttacaaattacctaagaaggttatgcgcttagctttgaagtctgtcctttcacaaaaggtcttagacaacagcttagttgcagttgatagcttagctttcgacgcaccaaagactaaggattttgtaaatgtattaaacaacctcaacgtcgataccaagactcttgttttggttgaagaggacaatgaaaaggctgctttggcaggtcgtaacttaccaaatgttaagatccttaaagccaaaggtgttaacgtcttagatgtcgctaatagtgacaaattagtcgttacccaaaaagccctcgatcaattagaggaggcgctcgcataatggaagcacgcgatgtaattttacgtcctgtagttactgaatcatcaatggctgacttggacgacaagcgctacacatttgatgtcaacgtacaggcaacgaaaacccaagttaaaaaagcaatcgaagaaatcttcgatgttaaagtcgttaaagtgaacgttatgaacgttaaaggaaaacttaagcgccaaggtcgttacgccggctacactaagaagcgtcgtaaggctattgttaccttaagttctgattctaacgaaatcaagttgttcaacgacgatcaacaataaatctaatttaggaggtaactctagtgggtattaagaagtataaaccaaccactaacggccgtcgtaatatgactgcttcagatttctctgaaatcactaagacgaagcctgaaaagtcattattagactcacaaagtcacactgccggtcgtaacagttatggtcacattactgttcgtcatcgtggcggcggtcataagcaacaataccgtttggttgactttaagcggattaaggatgaagttccagcaaccgttaaggcaatcgaatatgatcctaaccggacagctaacattgcattattagtttacgctgacggtgtgaaatcatatatcttagcaccaaaaggtttggaagttggtatgcaagttcaatcaggtgccgaagccgacatcaaggttggtaacgcattaccattaactaacatccctgttggtactgttattcacaacattgaattgaagccaggtaagggtggccaattagctcgctctgctggtacttcagcacaattactgggtaaggaaggcaagtacgcaattgttcgtttgtcttctggtgaagttcgtttagtattattaactagccgtgctactattggtactgttggtaatgaacaacacgaattaatcaactcaggtaaagccggtcgtacacgttggcaaggtaagcgcccaactgttcgtgggtctgtaatgaaccctaacgatcaccctcatggtggtggtgaaggtaaagcaccaatcggtcatccatctccaatgtctccatggggtaagaagacgcttggtaagaagactcggaacaagaaggctcgttcaaacaagcttatcgttcgtggtcgccgtccaggcaaacactaataaaatttgaatttactgtagttatcgagaggaggtcacacgatgggtcgtagtttaaagaagggacctttcgcagatgcgcatttattaaagaaaatcgatgcacaatctgattctgacaagaaatctgtcatcaagacgtggtcacgtcgttcaacaattttcccaagttttatcgggtacacaatcgctgtttatgatggtcgcaagcatgtcccagtttacatccaagacgacatggtcggtcataagttaggtgaatttgtaccaacacggacgttccatggtcatggaactgacgataagaaaacgaagtaatagttaggaggatataaagaatggctgaacaagtaacatctgcacgtgcaactgcaaaaactgttcgtattgccgctcgtaaggtccgcctagttgtcgatcttatcagaggtaaaagtgttgccgaagccttagcaatcttgaagttcactccacggggtgcttctccagtagtagaaaaagttttactttctgctgttgctaacgctgaaaataactttgacttagatcgcgaagatttggtcgtaagcgaagcttttgttaacgaaggaccaaccttaaaacggttccgtccacgggcaaagggttctgcttcaccaatcaacaagcggactagccacattacgatcacagttactgaaaaataggagggataacgcgtgggtcaaaaagtaaatccaaccggattacgtgtaggaatcattcgcgactgggaagcaaaatggtacgctgaaaaagattttgctgcctacttgaacgaagatttacgcatccgtaagtatatcgaacaacgacttgccgacgcttccgtctccaccgttgaaatcgaacgcgctgcaaaccgcgtaaacatttcaatccataccgcaaaaccagggatggttattggtaagggtggttctgaagttgaagctcttcgtaaagaattaaacaatttaactggtaagcgagtacacatcaacatcatcgaaatcaagaagcctgatttagatgctaaattagttggtgaaagtattgcgcgtcaattggaaggccgggttgctttccgtcgtgcgatgcgtggtgctatgcaacgtacaatgcgttccggtgctaagggtattaagacacaagttgctggccgtttaaacggtgccgacatgtctcgtgttgaagcatactcagatggtacggttccattgcatacgcttcgtgctgacatcgactattcatgggtcgaagcacggacgacttacggtaaattaggtgttaagacctggatctaccgtggcgaaatcttgccagaaaagaaatctgctaaaggaggaaactaaacatgctggtacctaaacgggttaagtatcgtcgtgttcatcgtggtaaaatgcgcggtgaagctaaaggcggtaaaacagttgcttttggtgattacggtttacaaaccctcgaatcacactggatcagcaaccggcagattgaagctgcccgtgttgctatgaaccgttacatgaagcgtggcggtaaggtatggattaagattttccctcacaagtcctacactgaaaaaggtgtcggtgtccggatgggtaatgggaaaggtactcctgcaggttgggtagcaccagttaaacgtaacaagattatgtttgaagttgctggtgttccagaagaagttgcacgcgaagctttacgcttggctggaactaaattacctgttaaaactaagattgttaagcgtgaggaagtaggtggcgaatcagatgaaggctaaggaaattaaagcattgtccactactgaaatgctcgaaaaagaaaagtcttacaaagacgaacttttcaacttgcgttttcaattggccactggtcagcttgaaaacaccgctcgtttaaaacaagttcgtaagaacattgcgcgtattaaaactgcgttgcgtgaacaagagttaaacaagtagagtataaaggaggcaatcacgaatgagtgaagatactcgtaatagccgtaaggttatccaaggacgcgttgtttctgacaagatggacaaaaccattgttgttattgtcgaaacttacaagaaccatccggtatacggcaaacgtgttcgttattcaaagaaattcaaggctcatgatgaaaagaatgaagccaaaactggcgatatcgtcaagatcatggaaactcgtcctctatcagctactaagcgtttccgcttaattgaagttgttcaaaaagctgttattatctagattattagctgaataaaattacatgaagggaggacacttactgtgatccaacaagaaagtcgtttaaaagttgctgacaactccggtgcccgtgaaatccttactattaaggtattaggtggctctggtcgtaaaactgctaacattggtgatgtcattgttgctacggttaaacaagcaacacccggtggtgttgtcaaagctcatgatgtcgttaaagctgtgatcgtccggactaagtctggtgttcaccgtgctgacggttcatacatcaagtttgatgaaaatgctgcagttattattcgtgatgacaagactccacaaggtactcgtatctttggacctgtcgctcgtgaattacgtgataaggacttcatgcgtattgtttcattagcgccagaagtactctagtcacacaccgtaaataaggaggtgcgcaacctaatgttgattaaaactggtgataaagttcgagtaatcagcggtaaggatcgtggtcaagaaggtactgttaaaaaggttatctctgccaagaaccggatcgttgttgaaggtgttaacaagatcaagaaacaccaaaaaccaacgaacgttaacccacaaggcggtatcgtggacatcgaagcaccaatcgatgcttctaacgttatgtaccttgacccatcaaccaacgaacctacacgtttaggtgttcgtcgtgaagatggcaagcgtgtccgttacgctaaaaagtctggtaaagacttagaaaactaagactgactgaaaggaggaagcaagtttcatggaaaaccgtttaaaagctcaatatgaaaaagaaatcgttccagcattagttgacaagttcaattacacttcagtaatgcaagtgcctaagctggctaagatcgttttgaacatgggtgttggtgatgcagttaccaacgctaaaaacttagacgaagcagttgaagaattaactttgatctccggtcaaaaaccattggttacccgggcaaagaaatctatcgctggtttccgtcttcgtgaaggtatggcaattggtgccaaggttgacttacgtggcgaacgtatgtatgacttcttggacaagttgatcaatgtttcattaccacgtgttcgtgacttccatggtgtaagtactcgttcatttgatggtcgcggtaactacacattgggtgtccgtgaacaattgatcttcccagaaatcaactatgataatgttaaccgtgttcgcggtttagacattgtaatcgttacgacagctgatagtgatgaagaatcacgtgagttgttaactcaatttggcatgccatttgctaaataaccgaagggggttaatcgaagttggctaaaaaatcacaaattgctaaacaaaagcgcggtgctaagtttaacgtacaaaactacacccgttgtgaacgttgtggtcgtccacattcagtttaccgtaaattccacttgtgccgtatctgcttacgcgacctggcccacaaaggtcaaatccctggtatgaaaaaggccagctggtaaaaacaaacccaagttaaaggaggttaaactttcatgatgactgatccaatcgcagatttcttgactcgtatccgtaacgctaacatggtacgccacgattcactagaagttcctgcatcaaaaatcaaacgcaacattgctgaaattttaaagaatgaaggttttgttcgcgacgttgaatacatcgatgatgacaaacagggcatcatccgcgtcttcttgaagtatggtaaggacaacgaacgtgtaatcagtggcttgaagcgtatttcaaagccaggtttacgttcatacgtcaaggctgatgctgttcctaaggttttaaacggtttagggattgctatcatctcaacttcagaaggtgtcattactgataaagaagctcgcgccaagaagcttggcggcgaagtattagcttacgtttggtaatcattaattaagacgggaggtgcaagtaagtgagtcgtattggttataaagtaattgaactacctgctggggtagaagtatcacaagctggtgaagtcgttacggttaagggtcctaagggtactttaacgcggaacatcgccagtgatattacgatgacggttgaaggcaacgaagttaaattcactcgtccatctgatgactacaagatgaaggcattacacggtactacccgtgcaaatgttaacaacatggttgaaggggttactaagggctttactaagaaccttcaattggtcggtgttggttaccgtgcccaattgcaaggcaagaagttagtattaagcgttggttactcacaccctgttgaatttgcaacgcctgaaaacttgactgttgaagttcctgataacacgcatatcaatatttctggtattggtaagcaagctgttggtgactttgctgccgaagttcgggccgttcgttcacctgaaccttacaaaggtaaagggattcgttacgtcgatgaatatgttcgtcgtaaggaaggtaagactggtaaataatgcagcgtaaagctgtccatactaatatatagaggtgactattgtgatttccaaaccagataaaaacaaaacacgtcaacgtcgtcacgcacgtgttcgcggtaagatttctgggactgctgagcgcccacgcttaaatgtttatcgttcaaacaaaaacatctacgctcaagttattgatgatgtagagggtgtaacgctcgcaagtgcctcaactttagatagcgaagttaaaggtaacaacaagactgaaaaggctgcatctgtcggtgaagttgttgctaagcgtgctgctgaaaagaaaatcgttgacgtcgttttcgatcgtggcggttacttatatcatggtcgggttcaagctttggctgaagccgctcgtgaaaacggacttaaattctaacaaaggaggaataataccatatgactttcattgatccatcaaaattagatcttgacgataatgttgttgccattaaccggattaccaaagttgttaaaggtggtcgtcgcctacgttttgctgcattagtaatcgttggggaccacaagggacacgttggtttcggtactggtaaggctcaagaagttccagaagcaattcggaaagcttccgaagctgctaaaaagaacttgatcactgtaccaatggttggtaccaccattcctcatgaagcacttggtgtttacggtggtggccgcatcatgcttaagccagccgttgaaggttctggtgttgccgctggtggcgccgttcgtgccgtcatggaattagccggtgtggatgatgttactagtaaacgattaggctcaaacacccccgttaacgttgttcgtgcaacgttcgaaggcttaaagagcttaaagactgctgaacaagtcgctgctttacgtggcgtttcagccgaacatttagctgaatagggaggacaaacaacatggctcaattaaagatcactttagtacgcagtgctgctcaccgtcttcctaagcaacgtaaaatcgttaaggaattaggtttgggtcggattaatagttccgttgttaaacctgatgacgcagcaactcgcggtcaaattttccacatcgcacacttagtcgatgtcgaaatcatcaagtaattcaaattttcaaagaggaggtgcctactaaatgaagttacatgaattaacacctagtgaaggttcacgtttttcacgtcgtcgaattggtcgtggtgactcaagtggccaaggtaagacttctggtcgtggccaaaaaggtcaaaaggcgcgtggtaaagttcgtgtcggtttcgaaggtggccaaatgccattgtaccgtcggattcctaagcgtggatttactaacattaaccgtaaagaatatgcggttgttaaccttgacggcttaaaccgttttgatgatggtgccgaagttacaccagaatcattaaaggaagctggcttagttaagaagagttctgctgttaaagttcttggtaatggtaaactcaacaaaaagttaacagttaaggcaagcaagttctctgcaacggcggttgcagccattgaagctgctggcggtaaaactgaggtgatctaatttgctgactaccatgaagaacgctctcaaagttaaggatattcggaataaacttctgttcacgttgggcgttttgattgtatttcgtcttggctcttatatcacagttcctggagttaatgcacaggcacttcagtcggtggcatcttcagggctgataagtatgttgaatacattcagtggtggcggtttaacaaattattccatccttgctatgggggtatccccttacattactgcacaaatcatcgttcaattgttacaaatggacattgttcctaagtttgttgaatggggcaaacaaggtgaagttggtcgacgcaagcttaatcaagcgacccgttggttaacgatcgtcttggcctttgttcagtcgattgggattacggctggttttaactctttgagtcaactcaagctcgttaacaatccaagtatttcgacttacctgaccattggggtgatcctcactggtggggcaatgttgacgacttggatgggtgatatgattacggatcgaggaatcggtaatggggtttccattattatcttcgccgggatcattgcccgtatgccaacatcgatttatcaaatttatcaagaacagttcgttaatgtttcacagagcgactggtggaagagtggcttgtttgttgttgggttagccttgcttgtgctgatcatcgttatgtttgtaacgtgggtcgaacaagctaatgaccgaattccaattcaatacactcgtcgtgcagctggtgcacctgacagtagttacctaccattaaaggtgaacgttgccggggttattcctgttattttcgcgagttccttcattgcaacgccccaaacgattttgctaggattccaatccagtcatggtgacgaaacctggtataccgttttgagtaatatcttcaatatgcagtcgacgactggtgctattctttacaccattctgatcgtgctcttcacgttcttctatgcgtttgttcaggtcaatcctgaaaagctctctaagaacttacaaaagcaaggcagctatattcctggtgtttggccaggtaaggatactcaagattgggtttcaaaattgttaatgcgactaagtacggtcggtgccctctaccttgggttgatttccttgattccattattagcttctgatatttggggtctcgatgaatcaatcggtttaggtgggacgagtttactaatcgttgttggggttgcccttgaaacaattcgtcaaattaaaggattgatgatgaaacgtgactatgtcggtttcattcgttaatcagcgaatgtgttggggagactcaacacatttgtgcattcaggaggaaaaaacatgtcaacaatgaacctgattttaatgggattaccgggtgccggtaagggtactcaagcacagaagattcttgaagattttgatattccacatatctcgaccggagatatcttccgtgcagccattaagaacgaaacgaagatgggcttggaagccaagaagtatattgatgcaggtaacttagtaccagacgaagtcactaacggcatcgtccgtgatcggttagctgaagcggatactaaaaatggtttcctattagatggttacccacgtaacatcgatcaagctcatgctttgaaacaaatcggtgaagaactcaataagccacttgatggggtcatcaacattcatgttgaacccgcagtacttgttgaacgactttccggtcggtttatctgccggacttgcggtgcaacttaccataagttgtacaacaagcctaaggtagaaggaacctgtgatgtgtgtggcggtcatgatttctatcaacgtgatgatgacaagccagcaaccgttaagaatcggttagacgtgaacattaagttgaacacgccattaattgattattacggtcaagaaaagttactctacaatgtcgacggtgatcgcgacattgatgatgtctacaaagatatcaagaaaattcttgataacctgtaaaccaggttccttcagcagcgacgtttgcttttcaaaggtcgttgtgataaaattattcaggtttagccgttgactgatttaatatttttttaatgttatgattagacaatgactggttcagtaatggaccaaatacgtggtagcacggaatctgataataaggagggacagtacttggcaaaggaagacgtcatcgaaattcaaggaaccattaaagaaacgttgccgaacgcaatgtttaaggttgaacttgaaaacggcgctgaaatcttggcacacgtatcaggtaagattcggatgcattacattcgaattctgcctggtgacaaggttacagttgaaatgtcaccttatgatttaactaagggccggattacctaccgtttcaagtaggctcggtctacgtaccttataggaggtaaaaaactcatgaaagtaagaccatctgtaaagccaatgtgcgaacactgcaaagttattcgtcgtaaaggccgcgtgatgattatctgctctgctaatccaaagcataagcaacgccaaggtaaataatttaattaagttggaggtgaaatattaatggctcgtattgaagggattgacttaccacgtgacaagcgtattgtcattggtttgacttatatctacggtatcggtaacacttctgcacagaagatccttgctgaagccggcgtttcagaagacgttcgtgtacgtgatttaactcctgaccaggaagacaaaatccgtgccgttgtcgatggctacaaaactgaaggtgacttacgtcgtgaagtcagcttaaacatcaagttattgcaagaaatcggttcataccgtggcatgcgtcatcgtcgtggtttaccagttcgtggtcaacacacgaagaacaatgctcgtactcgtaagggtaaaaaggtcagcatcgctggacgtaaaaaataataataaaggaggttttcgaattttatggcaactagaaagacaacccgtcgtcgtcgggtaaagaagaacattgaatctggtgtggctcacatccattcaacgttcaacaacacacttgttatgatcactgatatgcaagggaacgccattgcatggtcatcagctggttcattaggtttcaaaggtagtcgtaagtcaacaccttttgctgctcaaatggctgcagaagctgctgctaaggcatcaatggaacatggtatgaagactgttgaagtcgctgttaagggtcctggttcaggccgtgaagccgctatccgtgctttacaagctactggtttggaagttagcgcaattcgcgatgttacgccagtgcctcacaatggttctcgtcctccaaagcgtcgtcgtgtttaatctgtgacgttcattttgagggcaaacttcattttgtacgcacaactactaaacaccacgcgttttgaaaggggtaaaagataagaatgattgaatttgaaaaacctaacattcataaaattgatgaaaacgacaactatggtaagtttgttgtagaaccgcttgaacgcggttatggtacaactttagggaattcacttcgtcggattcttctttcttctttacctggcgctgctgttactagtattcaaattgatggtgttcttcatgaattttcaacgattgagggcgtaacggaagacgttacagcaattatcttgaatgttaagaagattgcacttaagttggaatcagacgaaaccaagacgttggaaatcgacgttaagggtcctgctaacgttactgccggtgatatcattggcgatgcggacgtagaagtcttgaatccagacttaccaatttgtaccgtagcagacggggcacacttccatatgcgtatgaccgcaaatactggtcgtggttatgtttccgctgaggataacaaacatcgtgaagatgacatgccaattggcgttttagctgttgattcattgtattctccaatcgaacgtgtcaactatcaagttgaaaacacgcgggttggtcaacgtgatgatttcgataagttaaccttagacgtttggacaaatggttcaatcactccaagtgaagccattagtctatcagccaaaatcctgactgatcacctttcaatcttcgtaaatctcaccgatgaagctaaaaacactgacgtgatggtcgagaaggaagaaacgcataaggaaaagatgttagaaatgacgattgaagagttagatctctccgtccgttcatacaattgcttgaagcgtgctggcatcaacacggtccaagaattaactaacaaaactgaagctgatatgatgaaggttcgcaaccttggacgcaagtcactcgaggaagttaaggcaaaattagctgaccttgggttatcattacgcaaagaagactaatacaagggaggatatccgttcatgagttaccgtaaattacaacgtacaagttcacaacgtcgtgccttattacgcgatttgacaacgtcattgatcgttaacggcaagatcgaaacgaccgaagcccgtgctaaggaagttcgttcaactgctgacaaaatgatctctttggccaagaagggtgatttaagcgcccgtcggaaggctgccgcattcatgcgggacgtcgttgccgatgttaaggaagatggcgacaacgtggctgtacaaactgcattgcaaaagctatttagtgacttaggtcctcaatatgctgaccgcaatggtggttacacacgaatttacaagactatgcctcgtcgtggcgacggtgcacaaatggttgtcttggaactcgttgactagttaagattgttttacggatcactgggactgatgattgacgggcgttatgatggtggctactggcaaaatagtagctaagtctagttcggaagttatttatggttagacatagatggcatatcgcagttctaagtgattttttttggtgctagttacgagcaaccgctgatttagggattgattccctaaatcagcggttttttgttggaatggataggtgtttttaatactcgtgatgacaacggtttgttatttgcagattatgacctgttgaatcgggaaagtggatatagtggtctcaggtactgactgtgaagatgaagcacatgggcgtttagctgtgtctgggcgacaaaaaaggtatcaaacaggatgcttgataccttagtcgattgattactagttaattatgccggtccaacagccgtttggttagactaatcagatccgtcttcgcaggctggtctggaagtttacgcatgattgccagcgcgtcttgagtgtacttggtagcgagttcttgggcttgcaccacaccgccggcattgatgacaagtcgttgtacttcctggcgctgagtgtccgaaattgccccctgtagtcgcatcagcggcaataaatcgtgcttagcttctgtctgtaaggcaaaaatcaacggcgaggtgtagacaccttcagcaacgtcttcgaggatgggtttgcccgtttcctgactgacttcttgatagtctaaaatatcgtcaagaatttggaaggccatcccaattgcgagacctgctttacgagcgcgctgggcgaaatgactactttgaccagattcataagcacctagaaaacaactcagtgcgaataactcggcggtcttaccttgaatttgttgcaagtattctgccatggtaatgtcaaggtggtagtggcggtccttttgttggacctcgcccactagaatcttttccatgttctcagagttcatctggatgcttttgaaactgcttgaatagtgcgctagaatcttgaataccacaacgaataggtagtcgcccgcatacacagcagtatctttaccaaaacgttcttgaatcgtgacatggtgccgacgtagtgcagcatcgtcaacaatgtcatcatggatcagcgtagcggtatggagcgtttctaatgacgccgctaaggccaccatccgttgccgatcagttgttgtaaattgtgagaataggaggcagtatgccgggcgtaagagcttaccaccaccatgaatcatttctaaaatcgcgtcattgatgtcggcatcttgaatattgatgttcgccgtcatcagctgcatcacttgttgcagctccggttgtagtgccgggtaatcacgccaaattgggtgtaattgtgttgccgattgcatatgggttactcctttgtttgatctggatggtgttctcgattgaatttgagatagcgtaagatcgtgacgtgggtgaacaagtagttggcggcgattccgagagcacttcccgctgctagtccaataatcgaaagcactggcaagtagagcatgaccgtccacgtctgtgcaataagactcgcgaccaatagctgaccaacattatgcataacgccaccagttgctgaaattccaataatactaacgcgtttaggccctaattgtttgaccaacagcatggcaaacaggctgagaaaggcgcccccaaaactatacagaaaggttgataaagtgccacctaggagggccgttaaaatcaaacggagccaggttagggttatcacgtcagttaatgataatgtatagattgcaacaatggtaatcagattggctaaaccaagcttggcacctggggcaaaggcaaacgggaatggaatcatccgttcaaggatgccgatgatcacgccttgtgcaaccagtaacgcgatataaatattacgatgagttttgtttgatcgttcaaatgaattattcatattctactccgtaactaaaccattaccgccagatttgacttgaccgttgctggccttaatttcaaccaagagtttgtggggcaaacaaacaatcgtttgaccaggtttatgaatccagcctcggcggacacatacttggtcagaacagttggctttcgtaatcgcaacgcgcttaggtttaaatgtgatcgtgttgtagtgcccatggttatcgcgataggtgaagtgcttagtcgttttcagattcgtaatattgacacgcttcaagacggtcccattatgtgagaccacggcgttatacgtggtttcactgctcgtggcctttcgcttagccactagtgccgcatgttcagcttgttgtttttgctggtatgaaaaaatcgctagtggggtgaacgataaaataattagcgcaacaataataataatatcaaacggcttgatcatatccccataacgtttgaatgtccggatcattgtccgtaatttacgcatcgttaaccctccaattcaatgaaataaaaaatggttcaaggggggaaaaacaacccttgaaccatcgggaaaggatttaattaattataacgcatctagcgggttttaacaccgtcgtaatgagaacgaacgttgccgtaccaccagtgtccaaggtgtttttgcatccacggaacgacccagtagtctaacccaaatgtccgtccggaaccgttcattaaggcgagggcaacaaagatcatccaaatgttgacccagtagaacatgccagataagcagaagacgacaactaagccaatggtgactgcgttagcaaaccaagtaaagagtccgaagaaaatacataatgcaatgacgatttcaacacaagtcatgaatttctggaagaagagggccatttgcatgttcggaatgaagaccttggtaattgattcgaaccaatgtggcattttgtcaaagaccatcaggggttctttaccgtacatgtatgaaagactgaagacacccttagcggctttagcggttgacgtggcagtttcagaagcaccactggttgcagcggctttagttgcttgagaggcaccactggttgcggccacggtaatccattcgaatggtaaccgtaacttgtcagtgaaccaggattcagatccctgaactttagtccagcagtcccataaccacatggcaccatagaagaaccgcagtggcacactccagagtacgttaccagcccgtgagacccaaccgcggaagacgttacggttattacgagtccggaagaattcgtgcatgaagtactggaataggtagtaacctgagaaaatctgaacgtagtacatccagttgatggcgtgttttaaaagcacggcaataaaaccagagacgttccacttctctaaaacttgtgcaacggcatatttggaaccaattgagtcgacggatgcttgataagcgcccttaaatggcttgatcgtaacgtcagtctggtcaacgttcttaataataccttcgacggccttagctgcggtttcttcagccccttgaacgatttgtgggactggccgtggttggtcaggttcttggtagctggttgaatcaccggctaagaagatattgttacaatccttagcttgcatgaattcattggccatcaagcgaccaccgcgggggttagtttcaatgccgaactttttaacgatactattagcacgaacaccggctgtccagattaacgtgtaggttggaattggatccttgccttttaagttaacatggtcttcacagacttcggtaatcatggagttcgtcatgattttgacaccatgtttttccatgtacttagcggccttaccggcttgcgtccggttgagcatgttaataatagtcggcgctgcttcgaccaattggagcgtgatttcacttggatcgagcttgttgtctcgagccaaaacatcacgatattcgattaattcaccaatcagttcagaaccagtaaaaccagaaccacagactgtaaaggtcaacatggctttgcgcttagcagggtcgagctccgccgccccccgccgaataattgcagataagtgagcacgcaatgccatcgcttgttcgaaggaccacaattcgaagccgtgttccttaacaccgggagtcccaaagtcattggattccccacccaaactaattaaaagttgatcatattgataacttccgtgttcggtagtaactgtttgtgcctttttgtcgatgcccgtcacggtatcggtcacgagacgaacgttttttcgccgtgcgaacaaccgttgcaaatcatattggatatgctcaggttccacccgttcggtagcaacttcatgtaattcagtcatatacgtgaagtatgaatgccggtcaatcaacgtaatctcgacgtctgcattttttttgaaatgcttagacagtttcttggttgcgtaaacaccagcaaaccccgcaccgacaacgacaatatttttctttgccattgcgtaacaactcccttgaataatagtgtaaaaagataattccactaataattataacgataatgtaagcggttgtctatggattatgggaaagaatgcataaactatcacattatctaagccgcgaaaatagtggcatcgaggtttgaacggaaaacgttgtcaataccgctattattaggctaaaatatcatttttttaatggaatgggattgactattaccagtttaaacgttaagattaatgtgaattttcatacaaaaaggttaggagtgggatatcatgaaattcaaatcagttattacgggtgcttcagttgttgcaatttcagctttagctttagcaggttgtggcagcagttcttcaagttctagctcgagttcatccaagaagagttcatcttcaagctcatcagctaagacaactaaggttgctaaattaaccgctggcagcaaaatgaaagcgggtacttataaccttgaagaagaaaattattcacatggttatcggaccaagatgagtatcacagttaataacaacggtaaaatcactaagtccagttatgaccaagtgaacaagaacggcaagtccaaagttgatgatacttcatataacaaacaaatgaagaagatcgctgggactaaccccaagacttacatgcctaagttaaacaagacgctgacgggctctgccgctactggtaacgtgggctccattgatgttgtgactggtgcgactgaatcatcaaagaccttccaaaactacacacaacaattagttcaagctgcccaagcgggtaacaagtcgaccattaagattgacaatggtgccaagatgaaagatggtacctacaagttgaacgaaaagaactactcacacggttacaaagttactttcgcaatcacggtcaaggataataagattacgaagtctgaatataaccaagtgaacaagaatggcaagtccaaagttgacgatgcagcttacaacaagcaaatgaagaaggttgctaagactaaccctaagacttatcaaccagctttgaacaagtcattagttaagagtagtgatccaactaaggttgacgttgtcacgggtgccactgaatcttctaacacctttattatgtacgcggaacaattacaaaacgcggcacaaaagggtgacaccaacacgattactgttgacaacatgattttctctgaataagcaatttaattattagattcttttgaggcctgaggcgcatgctgagggccttttgtttttaattgaacaaccacaaaagtttgtcactcagttgggcacgactttgagcaagctaaatccatacatggatattggtttaaaaaataatagtggcggtgaatgttaagtgcaaaatggctgtggtaatacaaacccgaccgtcgagttgtaccgtttgctgtaggtgcgctgatgtcagactagcgtagaaaagcttggatgacgcgcaaacagtctcaccggatgaatcaagactttggtataatgacaattgaaattaaaaataggggaagtattggaatgaagctaaaaaaatgggttcgaattggattaattgttgcaatgatcgtgccattgacggcgtgtgggacgagtacgagtcgcaaaaatgctgctagtagccgacccaaaccaactaaggtcgtcaagacgccgatcgaggatacccagttcatgatgggcacagttgtcacgttgcggatttataataagggtaaggataacgtgttagctggggcgtttaagctgttgaaaacggaagctaaggaaattacggtcaatcaaaaaggatctgaaattgataagatcaacgccgctgccggtaaaaagccagtggctgtcagcaaggatatctacccaatgatcaaagcagcttactattatagtaagaattcagacgaatcctttgatttagccattggtccgatcacatcactctggcatattggattttccgatgccaaggtgcccactcaacaagaaattgataagaacgttaagctggtagactacaaaaaagttaaattaaatgacaagaaacggaccgtttatctagaagaaaagggaatgcaactagaccttggtgggattgccaagggttacatgaccgatcaagtgaagacgtacttattaaatcatggggtttcaacggccattattgacctcggtggtaatatttatgttctgggtgacagccctaaaggaacgaagtcaggtaactggacagtcggtatccaagatccaaaagcgtcacggggtacggccattggctcactacctgctaagaataagtcaatcgttacttctgggatctatgaacgctatttgaagaagaatggtaaagtttacagtcatttgatggacccacaaacaggggcaccttatcaaaacaatttgatgggcgtttccatcatctcgaagaagtcggtggatggcgatgcactatcgacggccacctttgacaaaggcctcaaaggcgggatgaagtacattaatggtaaagcggatcaaggtattggggccatttttattaccaaggataaaaaagtatacgtctccaataacttgaagaagcagttcacgctgtttggcgatgctggttacaaatacgggccagccactgatttaaagtaagattggacgtgaagttcagttactacaagttccgtcagatatgttatgataataaccatgaattttaaggaaatgagggacaatggtgagtccgattattgacgttaaacatttagattatcgttacccgcaacaagctacggatcagttaacgttacacgatatttcatttacggtcatgccgggtgaatgggtcgccattgtcggccataacggttctggtaagtcgaccttggccaagaatttaaacggactgttagcaccagcggccggaacgattacggttgatggtcaagtattatctgaagaaaccgtttgggacattcggcgcaaaattgggatggttttccaaaacccagataaccaattcgttggggcaaccgttgccgatgatgttgcgtttagccttgaaaaccagggcgtgccgcgtcctgagatgctaacgcgggtacaggcggctctagaacaagtcaacatgcaggattttgcgacacgtgaaccggcacgtttgtcaggtggtcaaaaacaacgggtggcgctggctggtatgatagcggcgcggcctcagattttgattctggacgaagcgacgtcaatgttggatccccgtggtcgtcaggaagtattgacgacgattcgcgatatgaaggctaattcagcgttaacggtcttgtcaattacgcatgatattgacgaagcggccagcgctaatcgggtcttagtgatcaatgacggtgaggttaaggaagaggggactccagcggaaatttttcagcatggagaagccttaattaagatgggattggacatgccatatgctgagcgcttaaaagcagcgctaaagcggcagggtgttcaagtgcccgcacagtatttaacagagaaaggaatggcggactggttatggcaattacgttcaaacaagtagattttacttaccaaccgggtacgccgttcgaaactaaggcgttaactgatattaacgtcaccattcccaccggctcttatacggctttgattggtcatacggggagtggtaagtctacacttttacagcatttgaacgccttactcaaaccgactagtggaacggtcacgattggtgaacgggtcattacgccaacgacgagtaataaggacttgaagcgattgcggcaacacgtgggcatcgtctttcagtttccagaaagtcagttgtttgaagaaacggtggccaaagacattgcgttcgggccccagaactttggggctagcgaagcggatgctttgaaaactgcggctgaaatgttggctttagttgggttagacgagtcgttactgacgcggtcaccgtttgacctctctggtggacagatgcggcgagtggccattgcgggggtccttgcgatgcagccacaagtcctagtcttggatgaaccgactgccggattggaccctcagggccgtttagatatgatggagatgtttgcccgtttgcgtcatgaacgtgatttgaccgtggtactagtgacccatcagatggatgatgttgctaattacgcggataatgtaatcgtgatggatcgtggacaaatcgtcaaaacggggacgcctcgtgagatcttcaaagatcctgcgtggctaactgcccatcaactgggcttaccgaaaacaacggcctttgcgcatacactccaaaagcaaggctggcaatttgatgagtggccgttgaccgaggacgaattagcagcagccatcgtccaacagttgccaccgaacgcgatgggggaggtggccgctcatgatgaataaattgatctttggtcgctacattccgggagactccgtggttcaccatatggacccccgggcgaaactgttattgagtttttatttcattgggattatttttattgccaataactgggcgacctatgccttgctatttgtctttacattggccgctatttacctatccggtgtgaaatggtcgttcttcatcaacggtgtcaaaccgctgatttggttgattttattcaccgtcatcctgcaagtgttgtttagtgcaagtggcgggcacgtttactttcaatggggcatcattacaatcagccaacttggattgatcaacggggtctatattttttgccggttcgtgttgattatttttatgtcaacgctgttaactctaacaacgccgccactggaattgtcggatgccatcgagtatatcttgatgccgctcaaagcggtccgttttccagtctatgaagtggcactgatgttgtcgattgccttacgctttgtgccaacgttgatggacgaaacggaaaaaattatgaatgcacaacgggcccggggggtcgactttggtgagggcaatatctttcaacaaatgcgtgccgtagttccgctgctgattccgctgtttgtcagctcattcaaccgggctgaggatttagcaacggcaatggaagcacgtggctatcaaggcggcgagggtcgcagtaagtaccggattcttaagtggcaccaacgtgatacgtgggctaccggatgctttgcgatcttgaccgttgcattgattttcttgcgtgcataaatgaagactgattaacgtgggcgtcgcactgatggcgacccacgtttttaactggagggatattgtgaccacgcggtataaagtagttttagcatatgacggcaccaattttgcgggctttcaacgccagccacaccagcgaactgtcgagcaggtcgtcactaaggcggtcaataagatggcgaaagatcccgttgaaccgattgtgatctacggcgcgggccgaacggatgctggtgtgcatgcgtttggacagacgttgcattttgacttgccgtacgaaattaatccagaaggggttcggcgcggcctgaacagcatgttaccgatggatacaatcgtaaaggccgtttccattgtgccgaatgattttcacgcgcgttatgatacggtcggtaagcggtactggtatcgggcctatcaaaatgaatttgtagatccatttaaacggcactatacggggcattttaagttcgctgcggatatcgaccgaattcagcaagccatcggtgacttagaaggacggcacgatttctcgaccttcgttgcgtccggttcacaagcacatgaccatgttcgtgagatctattcagccaaagcgtgggccttgccggatgaacgcgaaattcagtttgaattttgcggtagtggttttttatataaccaggttcgaatcatggtggctgttttgatggaaattggtcagggccggcgcgcagttgactgtattccagcgttactagcggctaaggaccgtgagcaagcgcggggaacggctcccgcggctggactttatatgaaaaaagtgtattatgaacaaaatgaattacaagctgatttgataaagtattgacttctgaggcgaaattaggtagactagtcgttggtattgtttgccccacgataagccccggaaatcttattgagtgtcaaacaaacacagaaaatggaggaacacaacgtgcgtacaacatatatggctaaaccaggtgaaattgatcgtaaatggtatgtagttgatgcaaccgatgtacctttgggtcgtctttcaactgtcgtcgcatcaatcttgcgtggtaagaacaaacctacctttacccctaacgtggatactggtgataacgttatcgttattaatgcaagcaaggtcgctttaactgggaagaaagcagaacggaagatttattatcatcatactgcttatgctggtggtttaaaggaacggactgccggtgacttcttggcaaaggaacctactaaattgattgaaacttcagttaagggtatgcttcctcacaactctttaggccacaagatgggcttgaagttgcatgtttatgctggtgcagaacatacgcaacaagcacaaaagcctgaagttttggacatcactaacttaatctaaggaggaaactacattggctcaagtacaatatcgcggcacaggccgtcgtaaagattcagtagcccgcgtacgcttagtaccaggtactggtaaaattgttatgaatgacaaatctgttgaagattacattccatttgcagatattcgcaaggaattgttacaaccattcgaagtaactgaaacaactgatcaatatgatgttttagttaacgttaatggtggtggcttccatggtcaagccggcgcaactcgtcatgggatcgctcgggcattgctcgaagttgacccagatttccgtactcctttgaagcgcgcgggtctcttaactcgtgatgctcgtatgaaggaacgtaagaagccaggtttgaagaaagcccggaaagcttcacaattctcaaaacgttaatattatccaaaaacgttgttttatcaacattttctggctatatgagaaagcacctgtctatggacgggtgctttttttttggttgagtgagaaaaaaaccacaaaaaaaccatatgacgtggctcaacgagataaataacccatttgggcaggttttatttgatactaattggttcgaatatagcccgccttgaaacaaactaagcaagtaacgctcggttacttaaaaatggattgggccattgacggctcaatccattttaattactgacgtttagttttaccaaaagagaagacggcaacgcaaccgaggccggtatggctagtgatggtcggcccaatgtgttcgagcaaaatttcagcatcaggaaccttggctaaaatcttttcacgaacggtttgggcggcttcctgagcgtcgctagtggcaatgataatgcgcggcttggtctgatcacgtaaatcggctagtgtgttgttaactagtgtggtcagtgaccggcgccgtgagcgcaccttttgtactggacgcaagtggccgagtgggtcgacgtccatgactggcttgatctgtaagagtgatccaaccgtcgcggaggtccgtgagacccggccgccgtgataaaggtaatttaagtcatcaacggtgaaccattggtgataatagaggcggttttcagtcagccaatccgccaattgggcgatcggcataccagcatcgcgcttgtcaatggcatctagtagcatcaggccttcaccgcagcaggctgctcgggaatccacgaggtagatctcggcatctggctggtcttgtaaaagcatggccttggcctgttgcgcattattgaaggtcccacttaagcctgatgaaaagccgaggtataggattggcgtatgtgcctgaacgtacggcttgaaaaattcaataaactggccgatattaatctgagcagtagaaggcatcacaccgttaccaatccgatgataaaagtcagtcaagtcaaagtggtgacccaaatcgtccgcgtattcctggtcgtcaatcgtgacgttcattgaaacaaaatcgacatgcttgtctttaagtagttgataaggtaaatcaacggttgaatctgttaatagctgatacatagttttctcccttaattgtacttactgttacattgtacgcttatttgggcggccatggaaaattaatacatgctgtatttttacgtacagcagtaatttacggtaacaactagttggttgtcgcaatcctggtagcagcgtgaatgctgatcaggaaattgaactgggcatgtcagtaaatactggacgcatcggaaggtcagttatgggttaactgcaataatggcgtagtgactaggaccgtgcttttcagtcatggtgatgaggttcgacgactaatttgcctattcaatgaggcgctgtaagttgattgaaatcagccgatcaatggcgtgattttgctgctggcggtagggggtggccccggtttcataaaggagttgcgcctggtgatgatgaacgctgatctgttcgagttgcggaggcaatcgaagaatcgcgataccggtggtcagttggtgctgttgaattaattggctgcgcttgaatagcagtaagtgtgaggcgctggggccgtatgactgtgataacaagacgtagtggtcatagaaggccattccttgaatattgggtgggagcttgccgtgccagtcactaactgcctttggtaaaatggcgtgactcgtggtcattctgtatggcgtgccggcgctcgtcagtggatagcgggcaaccaaggtggtctgtccaggtttgaactggccgacataaagggcctgatggtgataggtcagtagtgaagcattgctcagtgttggcagtgaccagcgttgctgatagtgaacggcaatggaagtggtcgggtcgaagtgccgtaatgcggccagactaacgctcacgatagccccatgaccgtggcgatgactgcacaaccaaatccgctggtggtgagggtcataagctagaccacccacatgtggtttaccatgcaataagacagtgttgcataattgatgtcggaaacgatcctgtacatataggacagattgggttcgaccagtggcatcgtaagcggtggttagacgataacgaccggcaataacaacgccctgtggaatcatcattgtcgtcgtcgtgagttgtttagtgacgaggtctctagtcagggtggcttgtagtcctggctgaatggtggtgccttgcaacataccgattgggtcgaattttgctagtttaaccagatccggatactgacggatggtttgataaaattcggttggtgaaaaaacagcttgggtggctgttctttgaagggtggttggtgggtacggtagtgtcggtcgtacgcgactagctagaccgccgaggggatggacccaaattaacaagcccgtgattagtcctgtataaaaatgataggtataacggtgcatcgcgggtccctcctctagtttaagtgtcttcaatatagcatggaaagacaggccgcttagcggatagtgaaaggttagttaaggaaagaaactgagtggggcataattaaaaaattaacgttttgcacatctgtttttaattatatttacataaaacattgaattttctaattaggaatcggataatgaacgtgttcaagctgtttagcaatctgaataaagtgtgatatcccggtgctcgccaagttaggcgagtgctggctgtcaaaaacggaggaaaatataacgatgcgaattagtgcggaaacggaacgacaatttttagaagcagtttttaaggcccaacggtttagtgccaaggatggggcactgctggcagacaccctggtcgatgcagatttacgtggaatctcgtcacatggtatccagcggctggcttggtatacgcggatgatcaaggatcataccttggaaccgacgcatcaaccgaagattttgaatgaaacacctaccagtctattgatcgatgcgaaccagagcatgggccagattgcgtcggcgtttacgatgaataaactgattgaaaagactaagcaactcggtgtttcattagcggttatccgcaattcgaatcactttggaacggcgggctattattcgcgcatggcttgcaaagcgggtttgatcggtatttcaacgactaatacgcggccgttggtggtgccgacgaatgcgacagaagcttttttgggttccaacgcattagcttttacttttccagccgacccgcatcctttcgtttttgacggcgcgactgcggtggtttcaagcgggaagattcaagtgctggccaaaaaaggtgcacagattccgggtgattgggcggttgatgagcatcgtcaagtcttgcatgatgcgcagacggtggaggataacttgactaaaattgcgttttctgagaatcgtcctggtggtggggtcctgaccctaggtggccagcaggaagtcaattcaaattacaaaggctttggcaactcactaattattgagttactcacgggaattttagcgcaagggtcgctgtcggctgatacgaacaccggtaagcatgactttagtcagttcttcatgacgattaatcccgccttatttggcgatcccgaggtgttgaaggccaacgtgacgactatgtttgaccgtattcggcatttgaagcatctaccaggtactaagatcatgataccaggtgaccgggaataccggcactatgatgaaaatttggtgcagggcgtcagtattgatccacagacgttgacggaaatgcagcaagttggtgctgaatttggagtggcagtccccgcagccttgaaagcgtagtttggtgtagttgcggcaattattgtgactaaaatggggatcacataaactgatgatagtgtggctggaatctgctctggatgctggcgacactatttttggttatcacgattatgtgcggtggtgaagaccagctagctggttgggaatagatggcggttcagacaattgacgagcggcgacggttagttatacggaacattgttgaaattgtaatcgaaaataaccgtttgtcagtcgttcgttgtgagaagtttagcgttggagtgcggcttttagattttaatgatttgcctggcggtggattataagttaagtcagtgcaagctactggctaaaaatattttcagaaagtggcagggaaccattttaatatctgtaaaatgatttgacacgcaaacttgctgatttaccagtatttattagcagttagcgaggatgatgacgactagcaaatcgagggtggaccaacatgtttttgttgattaatagaaaaagtttgcaaaaaccatttgacaattctattgattagccgtatattttaagtcagcaaatacacattataaattaaggagattttaatcatgacgattaataccaatttacaattgaattcgtattattattactggtttacttagtgccttggcatccactgcgaggcacgccctcgcaacggatgtgaccagtaaattttggaatgattaaaatttatggaaaagtcatatcagtgttgtgaacaaccactgtgtgacttttctgcttctgagtagcggtgtttttcgggcaccctgcgaagaattagtggactcacagttggtgtaactgtgagtcttttttattagccaaaatgagagggagcgaagttaatgcaagcatttgatgaaattgatgaattagcggtgaataatctacgagtactgagtgcggaaatgattgaacgggccggttctggtcatccaggattgccactcggcgcggctccaatgatgtgggcactgtggagccgacaattacgggtcgatccacagcagtctcaatgggctaatcgcgatcgctttgtcttatcagccggacacgggtcggcgttgttgtacagtctgctacatgtgagtggcttcaacgtgacaatgggcgagttacaacgttttcgtcaattcggcagtcacacgccaggccaccctgaactgggaatcgtggatggtgtggaagccacgaccggtccactgggacaggggttagggatggcggtgggcatggccctggctgaacggcaactagcggctcagttctccgaggcaccgcagttggtggatcactatacttatgcgttagtcggtgatggtgatttgatggaaggcgtctcccacgaagccgccagctttgccggtaatcaacaattgcaaaaattaattgtattgtacgacgataacgctgtttcgcttgatggccccaccagccggtcgtttcgtaccgatgtgaaccagcacttcgctagttatggttgggatacacaaacggtaggtgatggcaatgatttaacggcgattaatgccgccattgagcgtgccaaacacagttcacgtccaagcctgatcgctgttaaaacgacgattggatttggcgcaccacaagcgggtacgaatgcggtgcatggcaatccgttgggaacggccggtttaactagtttgcggcaacaattagggtggcaagccgcgccatttacggtaatgccggccgttgctaaacgcgcacagcaactaatcttgcaacgtggtcagcgtgcacattgccggtggcagtcacaacgagaggctttaccacaagccgtacaacaccgtttcgaacaacagctcagtatgcgtctgccagttgacttagccaccagtttaccgatctttgatgaaggcgcccaagcttcgcggatcacgagtcataccgtcattcagaagctagctgctcagttaccaggattagtcgggggcgcggctgatttagccagttcgaataagacgaccattgagcaggatcaattgtcgactccggtgaccccggatcagcgcaacgttgcctttggtgtccgggagtttggtatgggcaccattttgaatgggatgactttacacggtggcttgcgggtctttggtggcaccttccttgtcttttccgattacacgcgtgcggctattcgattggcggcgatgatgaagttaccagtcacttacgttttcacgcatgactcgattgcagtcggcgaggacggtccgactcatcagccaattgaacagctaatgagtttacgattgattccgaatctaacggtgatccggcccgctgacccgaatgaaacggtcgcagcttggtggcaagccatcaacgcgacggatcatccaaccgtgctcgtcttgacccgtcagaatttggcagtgctatccggatctaagactaaggccatgactggtgtggctcgtggcggttatgttctctcaccgcagcgtggccgccagccaatgggaatcttgattgcaagcgggtcagaagttgctttagctcttcaggcccaggcgaaactagctacgttaggtgaagatgtcagtgtcgtttcaatgccgtcgatggaaaactttgcgcgccaatcaacgaattaccaagctcaggtcttgccacctcaaattcggcggcgagttgcagtcgaaatgggcgcaacatctggctgggaacgttacgttgggttagatggggcggtactaggcttggaccactttggcgccagtggagcggccgaccaagtattagccgctaaccagttcacggtagcagacctagtgcggacgtatcaacaaacgcacgtggatcttggtcaacaattgcgagtcatttagaaaggaagttagttaaagcatgattgatggacaaacggcactctttggatttatcgcgcaccccgcacggcacagtcgctcaccgcgaatgcataatttgagttttgactactgggggctaaatgcgcgctacttggcgtttgatgtggcaccggatggattggctgatacgcttgctggaattcgtagcatgggtatcgcgggggtgaacctttcaatgccatacaaacaagccgttgtaccgctactagatggtttgacagtgcgagcgcaacggattcaagcggtcaatacgattaagaatgaagctggcaagctgattggtgacagcacggacggcgctggagtttttcaggatctcttacatcaaggtctgaacttggttgataagcacgtcatggttttaggcgcgggaggcgcaggtaaggcaatcattgcggcggctttagattatggtgtcgcgagtgtaacggtctttaaacgcaacaacgtacgctacgccggtgttcagcactggttggagcaactcagtaccacgacttcggtaccactccggctctgtgcctatgaagatcaagtacggatgcagcaagttgctcgtaccagcgatttgatcattaacgcgaccaatatcggcatgacgactgctggaacgccattaccaatctcaattatccagcaattagtcccacaacagacggtctatgatatgatttaccaaccgcttgaaacgacttttttgcgcttagcgcgtcagcaggggtgcgccacatataatggcttggggatgttaatttggcaaggtgccttggcttttgagttttggactggtaagcagatgccagttcaacaggtccgccaagatatgttagccagtattcaagcgactccgccgattacggcgcaggcttaggccttaacttttgagaattgattagtaggaggaaattattatgattattatattaaaaccagcaaccgctacggctatgcaggcaaagttagtgagtcaatttggtgcggatcacgagatcttcacgcacaataatcgaattgcaattcaaggattgcgtccagaagcacttcccgcggatgtgcaagcagccagtgaatcaatcttgacggcagttcccgcagcggtccaaagcagccgtctctttcacccagaagatacgattattaagacgccacacagtgtgattggcggtaatcaattcgtcatgatggctggcccgtgttcagtcgaaagcgctgaacacgtggaccagatggccgcggttgccaagcagggtggtgcgacgattgttcgtggcggagcattcaagccacggacgtcaccttacagcttccaaggcctcggggagacgggactccaatacttacggacggcggctgataaacatggccttgatatgattaccgaagtgatggatgatgaacacgtggcgatggtggcgaaatacacggatatttttcaaattggtgcacgcaatatgcaaaatttctcgttgcttaaagccgttggacagacccaaattccggttgcattaaagcgaggaatgtcggcaacaatcgacgatgtgctcaatgcagctgaatacattgcagctggtggtaatcatcagatcatgcttttggagcggggaattcgaacgtttgataataagtacacacgcaacacgtttgacttaggtgcagtgccagtcttgcaatcgttgacacattacccagtcatcgttgatccgagtcacgcggtcggtacctgggaactcgtgaccccgatggcgatggcaggtgtagcagctggcgccagtggcatgatcgttgaaattcatgaccagccaacgcaagctttatccgatgggccgcaagcgttaaaacccgcgacgtacttaaaaatggcgcaacaggctttccagttacatgatctgatgcaaacgtgggcgtaggatgtgcctatgacaaacattgaagtcaagacgcgagttaaacagtatcagatcaagatcatgattgacagtttacatcatctaggaacgttggtaactaaggtatggtgtgcccgtcaagtagcggtggtaacggataccaatgtgggcccgtactatgcgaagctggtaactgatgaactgacggcggctggattcaaggtgcgtgtgatgacggttccagccggtgaggcgagcaaaagttggtcacaagtccagtcgttaatcgatcagctgagtgccgcccattttagccgcagtgacggtgtcatcgctcttggtggcggggtggttggtgacttagcagggtttgtcgcttcgatttatatgcgcggtattgccttgattcaagtaccgacatcattattagcgcaagtcgatagttcggtgggcggtaagaccgcgattgacttaccaactggcaaaaacttagtgggcagtttttaccaaccagatttagtcgtcattgatccggcaattctggtgacgttaccgccgcggatgctcgcagaaggttatggcgaaatcgttaagtgcgcagcattagttggcggtgatttttggcaatccttgcagcaaattaccagtgtggcagcgattttaccagcagcaccagatttaattgcagctagtgtggcgttcaaagcgcgcgtcgttatggcggatgaacatgaacagggtcagcggcaattattgaattttggtcatacgattggtcacgcagtcgaactattggctgacggtcaactaatgcatggggaagcggtagcgattggtctagtacaggtttgtcggttgtttgcagcacatgggttagcgccgactagtttaacgtcgacgctcaaggcacgcttaatggcggtagggttgcccacggaattaccgccgatagcgccgcaagccgtggccgcagtgatgcaacacgacaaaaaagtgcacggtacagcgctgacctgggtctacttatcggcggttgggcaaccccacctgtatcccatagcggtcacggacttggcgacttggatgggtgacttgtggtcggtgtcgtgattagacgtaagtttacaatatgcttcagttcgacacatgacggttagccgggtgggatctgaaaatttgagggagcatcagaacttttgacgtccaggttctgatggacttacatggtagattaacaatcggctttccaagtaatagttggaaagccgattgttattggttagggcgtgatgtttgtatgatcaagtcgttagtcaggagtaagttcacattgtgcgcgttaattttcatgaagcatgcattaaaatatgccagtcttgagtttaaaaagccagtttagggtcaccggcaaaagttctgatttgcgtaaacttgctcggctagatcgtccttcccccagaaatgggcactcagcccggagtcgggaaatacgtgaatgagtgtctgaacctgtcaaatggtatagttgaaaaacaactagtttaccaatagcctaaaagtttcatccagagtgtgccaccaacgcctcatactaatagatagaaaccaccaaggcacagattcagacgccaccattcggactgcgttatgtaacctgatccgaacataatcgaggcgggaccgttggcgtaatgggtggtcgaactgaaaatggcaccgtcaaagcctaatagtagggctgctagcattgggggggcgccggctgaaattgccacacccaagaaggcgccgtacatggcggagacgtgagcagtggcgccggcaaacaggtagtggctgtaaaagtaaacgagcatcaaagctgccaagacccatagccaactgattccttgcagggcctggcccatagtttgtgaaagccatggaataaagccaagactgttcagtttgccagccataaaaataagaattgaaaaccaaacgagtgtgttccaagccccagtttcatgtaataagtcgtcaacggataatacaccggttaataagagcaaagtgacggctatgaaggccactaaggtcgcgtctagcccagtgagactagctgagatccaaagaaagagggccaacataaaaataccgcccatgagtttttcggccaaagtcatggcccccatctgctcaagttcgttggcagcccacgcatgcgcgttgggtgtatccttaatttctggcggatagagccaataaataatagctggaacgctaattaagcaaataagaccaggtaatagagcggcgagtaaccagtccatccatgtgatgtgaatctgcattgcttgggccaaggccacggcaacgagatttggtgccatcgcggtcatgaataagccactggtggcaatattaccatggaaagctgacataatgagaaaactaccaaccttacgctgcgtaccgttttgtgggtcagagccgtatgctttagctaaagattcaataattgggaagacgattccaccggcgcgggcggtattgctaggcgtggccggactagtgacgagatcgacaccaatcagcgcgtaggctaatccaagggtctttttaccaaataatttgacgaagaccagcgcgactcgtcgccctagccccgtttttacgaagcctcgtgataggaagtaagccattgcaatcatccaaaccgtgttatcaccaaagccggccatggcatccgtcatcgaggtaacaccaagtaagacaccaagtgtgagaccaataattgcgacaccggcaataggtaacggctgggtaatgcaaccaatgatagtgccaacaaagagagccagcatgtgccatgctaatagactgagccccgcgggacgaaatggcgcgctcagccaaataatcaaaccaattatcagcggccatgtaagttgctggtagttgacggattgtaatttggtcatcgaaaacgaccacctttctagtcaaacgttaaaatcgtctcacggtgactgctgaaactagtcagcaaatgatgctaatccggacacgatttctaaattagaattaatgcaaccctaatgtcatttttgctgcccgtgacattttatcaagcgaccaggccggttcccagacaaggttgatgagtatctgatcgatacccgcgacggtcattaatgcgtttttgatatggtcattcaaatagcctgtcagtggacagcccatgatggtcagtgtcatggtaacggtgcagagctttaggtcagcatcgtaagcaacatcgtagatcaaaccgaggtcaacaatgttcacaccaagttcaggatcaatcacggtattcagagcggctaaagcttgggtttttaaagtagattgtgtatccatactaatcatgagaaagactcctttagaccaacagcctaagcagggtgatccgcttaggctgttaatggtcggttatttaatgaatttaacttgttcgttgatttttttaatctcagcttctttacgttcgttgaagatgaccttgttcttttcaaacaagttgtcgccattcgtatcgatggagacaattaacggaccgaagtctttgacctcacacgcccagagtgtttcgggcattccgaggtctttccactgggcatcaacaatcttattgacgtgcagggcggcataaacagcattgccagcggggtaaacgaggtgtaaggcgtgatatttcttgcaggcccgttcggttcccggtcccatgccgcctttaccaacgattagtttgacacgggtttgttttacgaattcttcttcaaatttttccatccgcatactagtcgttggcccgactgcgaccatttcgtacttgtcatggccgagatctttaatgatcgggccagcgtggagaattgctcggtctgtcacgttaacgggtaggggacgatgttcttcgacgagccgccgatgggcaacatcccgacaggttgttagtgagccattcaagtagacgatgtcgccgatacgaatgtccttaatatcgtcatcagaaattggggtggttaagtggtaagttttcatgataattcgactcctttgttcagtggtaagtcatagtttagatctgcgtcaaagttgataagtccgcgccggtgtgaccagcagccggtactaacagcgacgccaattgttgatgggtgtcgggcggtattctcgacattgacacccattactgacttttgaccgccaaacccctgtggtcccaggccaatgtgattgatgccgtcttctaataagtgttcgagtttggcagcattagcgtttggattttcactatcgacgcgccgcattaaagctaatttagaattaagcgcagccgtttcaacggatgtggcgacgccgacaccgacgagtaaaggtgggcaagcgttaatgccgaagctcgtcatgcgatccatcacgaaacggacgacgccttcgtaaccttcaccaggcatcaggactttggcagccccgggtaatgtgcagccaccgccggccatgtacacgtacattgagatgtcagtgccattaccatcaacttgcagaaaaatcgaggggatgccgtcaccaatgttcataccggtattgtattcgtcaaatgtctgaacagcattatgtcggagtggcgctttttttgtcccacgataaacggcgtctttcaaaatttgattgagttcgcctaatagtgggaactgcgcgccgcatttaatgaagaattgtaacgcaccggtatcttggcaacttgggcgtttaagtttattggcaagtaattggttttccatcatcgtgtcgtagacgagcttttggagtggatcgacttcgatcttactgagttcttcgagtttggcagtcacatcatctggtagtcgatgactgatgagcgcaatataatcggccaaaatgtcgcgcatccgttggcccttagttgataatgttggttcggtatagtcgtatgtcattgtatccatgctggtttcctcctatcaatttacagctacattgtaagtaactgtgtgatacaaaactaaccgctactcgccgagttatgccaggtattggattgtgaaagtgatggtaagcggacaggtagccggttaaaaatgacaaaaaaataccaaggccttctgacgagtgatgccgtcgtaccttggtatgacccaatatttgatcaaaatatcggtaagttcagttgttcgtaatcacaaaaattgttatgccattaattattgattaagcaatgtttttaattgcgcgatcttttgtttgagtgcctgatattcttgaaaatgtagtttatacatgcaactttcacaagcactgagttgatcagtacttgtgagttgggcccagtgcttgagttgcttttggacaatggtagtttgtgtgggagtgagcggttgcttgaactggtcatattcaggacgttgcccgtgtgacaaatgttgacggtaactggaaggtgtctgaccaaaatgcttcttaaacattagattgaaggacttgacctcctgaaccccattggctaaggctagatcggcgactcttgtggttgggttttccagatcgtagatggcgtgttgtagtcggcagcgggttagatattcgtaaaaattcaggccgagttccgctttgaagatgcgtgagagataggctggtgaatagtgactgatttttgccgcttcgtttaaggtaattggtcgatcgtaagcctggttaatgtaatcaatgacccggtttagtgaactctgcgtcttgggttggggataagtcatcgtgattccagtatcaaagaaatcgtgatgtagcaggttcgccaattgaaagtacagggcgttcaagtcaaaaattggccagtcctgctgatgtaatcctagatagagttgtgccagaatttggcgaatcgtttggtagtcacggtgttggggcgtcgtcacgctgttgagtagaaaagcacctgaactgaggtcgatgccctgactagtgtagaaatcgggcagaatatgtaaacggagcgcgatacattctggggtcaaggcaaaggtggcatggccgcgattggcattgatcaagatgaggtcatttgcgtgtaattgatgacgcgtcccgtcaacattcacttcgacggtaccttgcaataaccataagagttcgatttgcggatgccagttgtagtggtaactaccaatcatgtatgttaataagtcaaattggacggttggagtggattgaaaatgctgactaggtatcatgacagtgtcctccttaggaataactttgattagctctagcttacacgttcagaagatgcttgaacagcagtcgacaaaagaatacaaagaaaaatgacaaaaattgactagtatcagttatgatggaaatataagtaatggtaactgaatgttggttgtggtcacgcttaatcaagactgaaagtgacccaggcacatcatcgttgttagactaaggatgaaatggtggagaaatagtggatacgaagataattgtcaatcatgcgctacgagcgcttttatacgaagtgacggtcaaccctaagcccgggctggtcgacccgttgtcggcgggtccccatccagacatgaacgcttttatgtttattgatagtgctttgagtctagccccctactttaatgcttgtgcagcggcgggcgtcgcgtatacggctgtcgatttgacgggtttgttcaagcaaattcggggcattggtgttcaagcggaacaaaccatgtttgcggcgaccaagggcgtgaatacccataaaggggcggtgttctcactgggcgtgctagtgacagcggcggcgtatcagttgcagcaccccgacgtcgacttagcaacgattgtgcgcacaatgctggcggggttaacggcaaatgattttaatgatttaaacacgaaggatccaacgaccttaactgctggagaacgtcaatacttaacatatggcatcaagggaattcgtggtgaagccgaggcgggttatccgaccgtgatgcaagtggcactacccgcattgaggcgtagtcgtggcacgattaatcagcggttattagacacactgatggcgattgtccaggcgacggtcgataccaatctggtaaaacgggcacacgacccacacgtcattgactgggtccacgaccaagcacaccgctacttcgatttagggggaagccgcagtgaagctggaatggcgtttttacgcgaattgaatcagatttttgtcgaccataactatagtttaggtggctcggccgatttgttgattttgacgatttttattggatttcagacagatatattagcttaataatgagtgtcgtgattgtaggtgacgacacttttttaataccaaatattaatggaaattaaatgacgattgcaatgcttagttgatgagtggtcagtgctttttagtggtgatggcatcgaaagtcgtttcagtaggttctggattaagcttttagtatgttggttgtaacgccttggttaagtaaaaatagtattagaatgaacgaaaatttaataccgattataaaaaagttaactgtacctaacaattatttgcattagcgttaattatcagttatgcttatgacgatgtagaaaaccgactaccgcgatgaacggaggaaatgtgatgttaaaagtacaaaacctcaccgtggcatacagtgacacaccagtctttactgatgttgccgttaactttaacgccggcaaaattactggaatcattggtcccaacggtgcgggaaaatcaacgatgatcaaagcaatgcttggtctgatcaaatcccaaacgggaaccgtcgaatatgaaggtcgtgcgctaaaacaatttcaaaaacagattgcatatgtcgagcaacgtaaagatctcgacttaacctttccaatcaatgtttttgacgtcgttttgactgggacctatggcaaactcggacttttccgcgaaccaagcaaggcggatcgtcagcgttgccaagatgcacttgagcaacttgagttagctgatttagcacagcgccaaattagtcagctttctggaggacaattacaacgggtctttgtggctcgagccttagtccaagaagccgatatcattattcttgatgaacctttcgtcggcattgatttacagagtgagacggctatcatgacgatcttgcatcagtggcgtgatgccggcaaaatgattattgtcgtgcatcatgatttgaacaaagtttcacgttactttgatgatctcgtgattttaaatcacggtatcgttgattatggtcccgtggacgcggtctacacacccgcaaacattgaacggacgtttagtgctgatctttcggccgtcctgtttacgaaggaggaaacgcgatgatgcaatcaattacgacctttatggctgctttggggaagtatgatttcttacaaagtgcgctaattacggctattatggtcggggtcatgtcaggaattattggtagttttattattttacggggcatgtcgatgatgggcgaagccatctcgcatgccgttttacctggtgttgcggtagcttatatgctcggtatcaacgtcctaattggtgcttcggtttttggaattctagccgctagcttgatcggattcgttgcgagccgtagtaagattaagactgacacctcaattgggattgtcttcagtgcgttttacgcactcggttttatcctaatttcattagctgaaagttcgacgaacttgcaccacatcttattcggtaacatcctcgctgtgagtgatactgatatgatgacgacgacggtcgtgttaggactagtgattttattcgtggtcttcttctacaaggaattactgattacgtcatttgatccgacctttgcgaagacttatggtctcaaggtccaactgttacattacgcgttaatgctggtcttaacgctagtgaccgtttcagcgctacaaaccgtcgggatcattttagtggtcgcgatgttgattacaccggctgcgacggcctttctatggacagaacgactggcagtcatgcttggactgtcagccttaattggggtcttgtcctcagtggtgggcttatatctcagctacacgttgaactgggcttctggtccggccatcgtgctagtagcggctattttcttcggtatttctttcatcatctcacctaagcaggccttgttgccgacgctttggaaagggcaagcagcagcgcgacgggtgacagcatgaaaacgaaattaattgcactgattggagtcatcgcgatggttaccgggatggcagtatttctgaatcaacgccagcaaagtgccaaagcgacgaccactagtgccaaaatccgggtcgtaagtacgaactcgattctagatgatatggtgaaaaatgtgggtgggcagtacgtccaaaattacagtattgtgaagcgcggcactgacccgcatgagtatgaaccacggcccactgatattgcggcaactgccgaagctgacgtgattttttataatggcttaaaccttgaaactggcggtaatggctggtttaaaaagttagtgacggcttccaaaaaggactttgaccacgatgtttttgcggccagtaagggaattaaggtcaaatatttaacgacgaacgttaatgagccggacccccatgcttggttagatctcgccaacgggattcaatatgtcaagaacatcaaccggacgttgcaggccaaggatcctaagcacgccgctgtttatcaaaagaatacggatcgctacgtggtaaaactaacaaaactgcatgagagcgctcaaaccaaattcaagcagatcccgacgagtcaacgattattagtgacatccgaaggcgcctttaagtatttctcggcggcctaccatgtgcccgctgcttatatttgggaagtgaatacggaatcgcaaggcacgccagctcagatgcggacggcgttgaagaaaattgaaggaacccaggttcgaagtttgtttgtcgaatcatccgtatcaccgaaatcgatgaataagctttcacaggagacgggaatccccgttgctagtacgatttttaccgattcgctggcagctaaaggcaagccgggtgatacgtactactcaatgttgaagtggaatcttgataagatttatgctgggctgactcggtcgtagtacttgggcctataattcggttgtgttgatgtcatgtgatataagtttgttctaaaaaggaccgtggaagttaaatcttccacggtcctttctttattttgaactgctagtttagtcttccgattcgaatgacaattccgtcattgatagttccagatcatcaagtacgtcgttttcactcagaaattgttcccaggcagccggtgtttgttcgcgggtatgggggacgattttatcatgaatattggcaatcacatcatcgagcatcttatccgcttgccgggcgatttcagcatcgttatagcggcgtgctggcgcccggtcctcattttttcgattcagaaaatcggttgctttctccataaaaatggtaataacttgggagttgtttgcgagatagtcttttaaagtttcattatccaatgtattagtcctctctagtttgagtcgtacttctaatataccacgctaatcaggttttaactgtttcaagatcggttggcgggtaaaaagttttgtaacttgcgcagatgtttcgaattgacgccaatcaggcaatttaaacgcaggattgtaaccgcttacgaaaatgatttcacaagccgacactttagaaatagttcacaatcaaaataattttaaatgctgctacgcaggcgttttaaacaacaattatatttaaatttttcaaaaaaataatttatttttaaaaaattagcaaaaatgaaagcatttgcgttataatacttgtgagttaagtaactaagtagttggaaccacatgtgcagcacacatttttgatgaaagaaggatattgacatggataagaagcaacgcaaagtcgtaattgttggtgatggctcggtgggttcatcatttgccttttcattggtccaaaattgcgccctagatgaactcgttatcgttgacttggttaaaacgcacgcagagggggacgttaaggatttggaagatgttgccgcctttacgaatgcgaccaacattcataccggtgaatatgcggatgcgcgtgatgctgacatcgttgtcattacggctggtgtgcctcgtaagcctggtgagagtcgtttagatttgattaaccgcaatacgaagattctggaatccatcgtcaaaccagtggttgcgagtggttttaatggttgcttcgttatctcaagtaatcccgtcgatattttgacttcgatgacgcaacgtttatccggttttccacggcatcgggtcattggtaccgggacttccttggatacggcgcggttacgggtcgccttggctcagaagttgaatgttgccaccactgcagttgatgctgcggtacttggagaacatggtgatagttccatcgttaattttgatgaaattatgatcaatgctcagcccttaaagacggtcacaacggtcgatgatcagttcaaagctgaaatcgagcaagctgttcgtggtaaaggtggtcaaatcattagtcagaagggggccacgttctatggggtcgccgttagtttgatgcaaatctgccgagcaattttgaacgatgaaaatgctgagttgattgtctccgccgctttgtctggtcaatatggcattaacgatttgtacttggggtcacccgccattattaatcgcaacgggctccaaaaagtgatcgaagctgagctatcagatgatgagcgtgcccggatgcaacatttcgcagccaagatgctgaccatgatgaatgtggcatcataaaaatgatgagtaagtatgaggaggaattgagatgacactaaataaggtcaagtatcgtgattttattgcaccgttattggtgggcctgatcatttggttaagtagtcctatcaaaccagccagtgtttcgatgaacgcatggcatattctggcaatttttgtggcaaccattattggttgtattacgcggccgttaccaatcgccggggtcgcaatcattgggttgacactaaccgtgttattgggcatcgtgcctatggatacagcggttgccggatttgggagcagtacggtatggatgattgcgatggcgtattttatgtcacgtggtttcatcaatactggtttaggtcgacgtgtcgcgttggtatttgtacggctgtttgggaaacgaacgttgggtttggcatacgcactgattggcgtcgatttagtaacagcacccgcaacgccaagtaatacggcccgtgctggtgggattgtttatccaatcattcagtcgttagctgaaacgtttggctctgatcccaaggatggcacacaaagtaaaatcggttcattcttagtgttcgcagaatttcacggtgatttaatcaccagtacgatgttcatgacggcgatggcgcctaacttagttgctgtcacgttagccaagagtttacacatcacgttatcgtggatgcaatggttcttagccgggattgtcccaggacttatttgtttattggttgtgccatatttaatttataaaatgtatccaccagaaattaaagatacgcccaatgccaagcaatgggcggatgatgagctggcaaagatgggtaagatgagtcttccagaaaaaatcatgggtggcgtcttcttgctagccttagtcttatggatgttatccagctttatcggtctcgaagcttcattagttgcctttatggccgtctccttgctactcgttgctggggttctatcggtagatgacgtgctacacgaaactggtgcttggaataccttggtgtggttctcaattttgatcttcatggctaatgagttgaacaaactcggctttattccatggttgtctggcgcgattggtggtgccttgaaaggcttcagttggggcattgttttagcggcactcgtcttgttctacttctacagtcactacttgtttgctagtgggactgcccacgtttccgcaatgtacggtgccttacttggggtcgcggtttccgcgggagcgccagcaacctttgctgcactgatacttggctttactggttcgatcttcgcttcgacgacgcattatgcgaacggcccggcgagtgttctcttcggttctggatatgttactcagggaaaatggtggcagttaaactttattttaggtctcttctacctagtcgtttggggtggcattggcgccctctggatgaaagtgattggtatttggtagtctgattttaagcataaaaacaggtaccaagctgccggcaacggtcagcgttggtacctgttttcgaagaagcggattatttggatagtggtgtggcttgatcttcttggagaacccgattcgcgacggcttcatcaatgatgatgtcagtgagtaattgtccgcggagggcgccaagtaaggcttcgctcttgaacttacttttgatgatgccgaaacgacgcggcactttgagaatggcgggcattttagcgccaaagagtttgtcgtggtcggcgttcagaatgtgaccattgatgtcgtatggccgaccgtataacaggccgaccaccgcctgcggatcagcgccacccagaatggcttggcgatgttgatgccagacgggaatcgagtcaatggatgctaaggtgccaattccggcaaatagcatgtccattcggtcaaagttactgatggccggtgtaatggctggttcttgagccaatgcttggtgtgcttgatcattaaacaagtagagtggtgccgggatggtgacgtactgtgcgccgaacttagcggcggctttttgaactaacggtgttgagccgttcgctgcgttcgttttcaggttatcacccataaactgggtgaacagtaagtcatcacgagtgctcgtttgaaaattatcgatgacgctaaggacagtgccaccccatgccaccccaatcacgttactttgaataatctggcgctggattgtttcggcggcaaactcgattacgtggcgttcatcgtcactcgtggtatccgcgtctttgataatataaatatgttcaattggaaaacgatgcttaaatttagcctccagctcactatttcgttcgatgggggtgttaatgttaattttgactaggccggttgccatggcttcgtctaagtattttgaaattagataacgactgacttggtatttctttgaaatttcagcgatgttgattttggataagtaataatcatgtgcaattccaatcaacaggcggcgatgattcatatcgtccatatcgatgacctctttatcaacctaagatttaaaattttaaaactcgtttataatattttaagtttattataccagaaaagctgactttttaaaaattataaaaatccaatctaaatttgatgtttttaaaaaatggtcgtacactggggataacaaagtgaacggtattattttgagaagagaaggcagatattgatggtagaacaagatgagattttaaagttgcacgccgcccatacgggggttttggacattcattcagaccttgcagtgaccgataaggctgatttaggtaaagcatatacacctggtgttgcggtgatttccaagctgattgcggcgcatccggaattaaaggcaaaatacacgatgagtggtaaattagtagcgttgatcacggatgggtcagcagtactgggcctcggcaatattggtcccgcgggtggtttgccggtcgtagaaggtaaggcactcctatacaagaacctcgcagggattaatgcgattccgctggcgttaaatcaggtcagcgtgccagcaatggtggcgacaatcaaaaacatgtcgctctcatttgcgggcattcatctggaagatattacggcgcctaagtgttttgaactagaagcggccttgaaagatgagcttgatattccggtttatcatgacgatcaggaaggcaccgcaattgtcgtgttggcgggactgatcaatgccgctcacgtagtcggtaagtccttacggcagatgcgcatcgttgtcaacggcgtcggcgcatccgggttagctacagctcggttattagcagcggtcggtgtcaaacaactgaccttggtcgatgtttacggggtcgttacagcggatgatcagcggtacaaccagtatcaacggaatcttgccaaacagttgggaacacctgcacaactaaaggggcaaccactggcgaaggtcatggccgaccaggacatcttcattggcttgtcagacgccaacgtcttatcagcaggggccgtccacttgatgaatcatgatccaatcgtctttgcactcgctaatccagtgccagaaatcaatccagcagtagctgagaaggctggggccacagtcattgcaacaggttctagccagtatccaaaccaggtcaataatattctggctttcccggggatcttcaagggcttactcacaaatggggtcaagcaagttgataatgcgttgcagatccaagtggctcaggctttggctaagaccgtgtcgaacccaactgcgacgacgattgtgccgagcgtctttgattcacaagtggtaccgaacgtgacggcggccgttgcagcgtacgcgcaagcacagcattaatcataggaggttgtctgatggcagcacaagttgttgaaatgcaattaaataatccgcacgagcatgcccagtggcaacaattcttaacgtcattagggattactaattttagcccgcaagaggttgaacatattgatgtgaccttaggattgatcgaggatggccaacttgttgggaccggatcgttagctggcaacgtgcttaaatatgtgggtgtctgtaataagaatagtcagccgggggcccggtttaatcaaatcgtgagtgcactggtcaatcggctgtttcaagcacagatctttcatatgatggtatttaccaaggccaagtattcagcgagttttcaacacgtaggctttaaagaattagctcattcggatgaagcggccgtattagaaaacggcgcaccggatatgacggattttgtcaaacagttgccgatgattcccaaccaagcacaacagcgtgtcagcgcgattgtcatgaatgcgaacccgtttacgcggggacaccgctatttagtggaacaagccgcggcggtcagtgatttagtttacgtcttcgtcgttgcgacagatgcgagtctattccgtacggccgagcgcgttaagctggttcaacaagggacagccgacttggccaacgttcgggtcgtcagcgggcaggactatctcgtgagtgcagcgacctttccagcctacttcttggattcagcggcgagcgcaattgaggcgcagacgacgttggacgcccggatctttaagcagcaacttgcaccagcactgcacattacgacccggttcgttggtagtgaaccgacgtcgcggacgactgcgatttataaccgagttttgcagcgtgaattaccaccggcagttgctgtacgagtgatatcgcgaacgacggtggctaatcaaccaatttcggcgcggactgttcggcaacggattcaaagcggcaacttaactgagttaaaccaactggtaccggcaacaacggcccagtttataaaaaataacctaacaacattacaagcgcgaattcagaaaggaatgaaaattgatggaaattaagacaacggcagtcgccggaaccttggaatcatctgatattcaaattatgttaatggcgggagacaacggcattcaaatcgaccttgaatcagatgttatcaaacagttcggggcacaaataaagcacgtgatcacgacgacgcttcaacaattgaatatcgataatgtgaaggtgcgcgctgtcgataaaggggcgttggactgcgtcattaaagcgcggactattacggcagcacaacgggcgttagaaaccacgacaccagcatgggaggtattataatggctgaaaatgaagaacgcttacggcggacaatgatgtttgtacctggtaataatccagccatggtgaaggatgccgggatttacggtgcggactcgatcatgtttgacttggaagatgccgtctcaatggctgaaaaggacgcggcccgggtgctggtttacgaagcgttaaaaacgcaggactatggcaaggctgaattggtcgtccggatcaatggcttagacaccaagtattacgctgatgatgtcaaagcgatggtcaaggctggtattgacgttatccgtttaccaaaagtcgaatcggctgccatgattcaaacgttggaaaaggatgtcgcggcagctgaagctgaatttgatattccagtcggtacgactcatttgatggccgcaattgaaagcgctaagggcgtgcttaatgccccggcaatcgcggcagcctcggatcaaatgattgggattgccttgtcagcagaagattatacgacggacatgaagacccaccgttatcctgatggcgcggaactggaatttgcccgtaacatggtgcttcatgctgctcgtgccgctggaatcgccgcgttcgatacggtctttacaaacatggccgatcccgatggcttctaccgtgagacgcggcatattcatcaattaggatttgacggtaaatcattggtcaaccctcgacagattgcaatggtcaattcagtctatgaaccaaccaaggatgaagttattaaggcccaaaaagtcatcgccgcgattgaggaagcccggatcaagggttctggtgttatttccatgaatggccaaatggtagaccggcccgttgttttgcgggctcaacgtgtgatgagcttagccaaagtttccaacttactcgacgaggagggcaattacattgaaaaatagtgtagaccgcgaattaccagcagaattaatgacgaagttaaattaccaaggttttgagtcaactgaaatcggacatcctgaaattcaacgggtggcccccaaagttcacgtttcaacaggggacaacaaagtcgttgattccgttgctgacgtggtaaaagccactgtcaaagatggtatgacgatttcatttcaccaccattttcgtaatggggatttcgtcttcaatcaagtgatgcgggccattattgatgccggtattaaagatttgaccttggcgccatcctccttaacgggcgtgatgaacgatatggtgatcgaagcaattaaggccggaacgattacgaatattactagctcggggatgcggggctctcttggggacttcgtttcacacggtggtttaaagaaccccgtaatcttccgttctcatggtaatcgggcccgggccattgaacatggtgatattaaaattgatgtcgcctttctaggtgtgccgaatgctgaccgactaggaaatgcgaacgggatggctggtaaagcagtctttggttccttaggttacgccctgatggatgcgcaatacgccaaccaagttgtcttattgaccgataatattgtggcttatccaaatacaccggcctcaattaaacagacacaagtcgattacgtcgtgcaagtcgaccaagttggtgaccctgacaagattggttcaggtgcgacgcgcttcaccaaggacccaaaggaattgaagattgcccagaccgttaatgatgtgatcgtgaactcaccatactttaaaaacggcttctcattccaaactggttccggcggtgctgcgttggctgtcactcggtacttgcggcaagcaatgctcgataatcaaatcaaagcatcgtttgcacttggtggtattacgaaaccaaccactgatttgctcgaagaagggttagttgataaagtcatggatgttcaagactttgacaaaggggcggcagcatcgatgcacgccaatcctaatcaacaagaaattgacgcatcatggtacgctgaccctgataataaaggagcgatggttgatcaattggatgttgccattctgagtgcgttggaaattgatacgcacttcaatgtcaacgtcatgtccggttcggatggcgtgattcgtggcgccattggtggacatcaagacgcggctacggccaaactgaccattatctctgcaccacttgtccgtggtcggttagcgacgattgtgccagaagtaacaaccgttgtaacgccgggggactccattgacgttgttgtgacggaatacgggattgcaatcaacccgcggcgtcaagacctagttaaagcactcagtcatgtcccaggtgtgccggtctatacgattgaagaattacaacaattagccgaaaagaaagtcggccaaccccaaccacttgaatttacagatcgcaccgttgccttgattgaatatcgcgatggcacgattattgatacgattaaagcggtgaaggactaaagtatattgatgacaaaaatgaccttgcttggcaaattgctagctaggtcattttttgtatgacgaattgtcaaatcaagcgcaactttgtcccgaagaaaacttcaaatggactcttccagcctaagaccttacgtggtcggtgatttaaatccctgacaaacttgtcgatatcttgatcagtcagttggtctaggtcggttcctttggggaaatactcacggataagtccgttggtattctcattggttccccgttgctgaggcgcatgaggatctggaaaatagactgggatacttagctcttgactaacttcgcggtatcctgcgaattcagttccacgatccggcgtaagcgtccgaactcgtttgggcgtcacggtatgcaagaggtcaatcatcgcttgtgtgacgttcttggcgtttactttgggaacccgctgagataataaataccgagatttgcggtccaccaaggttaccagggccgaacgcccggttttaccgcgaacggtatcactttcccaatgaccaaaccagcttcgattctcacatgaaacaggtcgttcatgaacggaagggacgtcgttaaatcgtccccgacgttccttaatggttcccttgacctttcgggttttaccacggtgacggagcttacgggcaaagccatgagcctcgtgattcttacgtttgatgcctaaattatcacgttcaatcccacgataaatggtgttataactgacatgccattcactgttttcgtggactaaacgaccggaaatttgttccggggaccactgacgttgaacaatacagtgaaaaacaaaatcccgtaacttcaaatcagttagaagcctaggacgtcggctttttagccgccgtccctgatagttctcttgggctttgacggccgagtatgccttacgaccaccattgcgcttgatttcgcgcgatacggtggctttggaacacccaattttctccgcaataacttgataggtatcgtttaaagtgacgcccaacagtatgcattctcggtcttttaaggtaagatggttgtacggactcatagcctaggatctcctttagatgattgttgtggtgacttcattttataggactcaggctatgagttcttttttatttttttcttacttgttgcacttcaattgtaaattcgtcacttcagaagtatctgagatactttcaaactcatttatcagtgcctgatcggcagaaaattggtgcccctgtctgtactcctcaaaattgctaagcgaaattcctaatctctgaattattttgatcattgtggtatatggcaaatctttataaccgtgctcgacctcacctatggaacgtcgtgttgttatattttttgctaattcaagttgagacattcctttgtttttccgtaacatatgaatcatttctcctgtattcatgaattcacacctaattttaatattttgtgcgagttttgcacaaagttcacagtatcattgaactatgaaataaaatgaatataaatacgtattaggagggaatttttaatgaagattagacatatacgacgatattattcttttttagcctatttaccgatgcttggaattatgacgttaagctggattgttggtggataatcttatgaaaagcaaaaacgtgtattgggagctactgaagtataaatactgcaaaatgtttttgcgcttttttcaatagtgctcctttattaaatatgataatgattagttataaatatactctttgaggagaatataaagatgacattaaagaaattttttgctatgctgattttgaccactatgatactttcacttagtgtattttcaagttttgatggtttttcagaaagtataggtgaaatacatgcacaggcagccaagtataagagagttgcacctaagcctaagggaaaatggaaacttaggaaaaaattcaaaaaactgttaaaataacaaaaaagttaaagaagtctgggtctgcagcaatcatgacttacgtagtacaggcgcttgcgtccaaatatggcggacaagcaatttggatgttcgggggtacattttttgggagctattttcctgcaggaaatacttatttaactgcgtgggcgtataagcgcgctaacaagtatgtagtacaatataaaacagttattcatatttatacgaataaatctaggaaacacattcgtaaaaaggcttcacgtattcagtcgtttgtaaagaaatataaggtggttagggtggattaattatggatcaatacccaaattttaagctatttattgataaatatttaccatggctagccgttattggctttgttgtgacagttagtgttaatggcaatgtttggttgtattttatgtcggtgctgattgtatttgttgtgattgcaattattgacttgctgtttaagtattggaaccacgccaaaattttaggtatcatgattgttcttttagtacttggactatggttgaatcgctaagaaaataccaggattagtgtctgacgcggcattttcaatggatttataaagaggcattgtgcttttctgaaatgccatggctagcatcaataaggggcttctgtcaaccagtgtcgatgaagttatatctagaatccaattcatttatgaattggattcttttttgaagtgcgcccggcatgggtgataactaggcggtgtaagtccgctgtgggccgtagtagtcggaaccacgagttgagggcaagggcgttcgccgtgagacggagtctgaaggaagcctaagacaaaataccgaaccgatgtacaagaagtggctacaaggctgattagactggatgaagttgcttcacaaactgaagtcctacactacttgaagtcgaagttagtaaagccaacggttgcatggtatgaaagctatcattcttacccggggaggcctgtcggataagctcccaacaaggacgccgatatgggtttacaggagtaaactagtcagccgaggtcatagtaatctgccgtatggcagatgaaggactgaacaataataattctcaccgatactggaggtgttggtagtgcgaagattgcagaaaacagaacaagctgaccgccaagggatgaatagtctggaagacaaagagtatcttggggcgcatcgtactactaacggtgaaagtacggcgcaggatggcattcaatttgtagaccgggtccttccttgcaagtagtaatctgaacctagcgtttaagcgtgttcggaggaataagggcgtagctggaattgacggcatgaccgttgaccaactggccgaatatatttacaagaaccgggaagaactcctagagagtttacgtaatggaatatatcggccgcaaccagtcagacgggtagagataccaaaactcgatggctcaaccagaaaactgggagtacctacagttgttgatcgtatgatccaataagctgtggtacaggtgctttcgccgatatacgaacaagtattttccgacaatagctatggattccgaccaggtcggagtgcgcatgacgcgattcaaagtgtcaccgaactctacaatcaaggctaccactatgtggtagacctcgatttaaaggcatactttgatacggttaaccacgacttactaatgaacttcatcaaacaacgagtaactgatccatggctactccacctaattcggcgcttcctaacaagcggggtcatgaatggcgagctgtttcgaaagacgacgaagggaacaccacaaggtgggaacctgtcgccgctactggccaatatttatctcaacgagttggacaagctattgacccagcggggccaccgatttgtgcgctatgccgatgactgtaatatttatgccagaagtaagcgagcgggagaacgagtcttacgcaatgtcacaatctttcttgaaattaagttgaaactaacaattaactgtcataaaacgacggttggctcaccactccgactaaagtttctaggatttacgctcggtgtagaccgtaatggggcatatgcacgaccgcacaaggtcgtgaaacagcgaatcaaacaagcccttaagataatgactgggcgaagtcgtggaattagttggttaatgttgatgaagaaaattaaacagaaaatgcgaggatggctacagtactatgggattggcaagatgaagacgtttattcaacaactggaccaatggttgcgaagtaggattagacagttgatatggaaacggtggaagaaaatcaaaacccgatatcgtgagctaattaagctaggaatgacaccggaacaggccaagactaatgccaatacccgcaagggatattggcgaattgcccataataaaacactaacctatacgtatacaaatcaaaagctggagcgtcttggactaataaacctgtccaagacactccagcaaatacagagtgcttaaattattgaaccgccgtatacggaaccgtacgtacggtggtgtgagaggtcggtaattgaaataatcaattacctcctactcgattgcaaccgaatttgataaaaaagttttactagttaaccatacgtcgttcttttgatttgcctgatttcatctcttttcaactatgactcgatattttgtggtttggtatatttaggtctacaaataagaaaaagtgacaattatgagtaaaattaagcaagaggaataaataagaacatgtgaaaaaataaacatttttatctagaactcattctaagcaatctttgtatgctaatatactgatacataaacctcataactaatacttatagctaaaactgagtttgactatagctatatgggggcgctaaactaggattataaactaaatgttatttttttcacacacttagtaagcgcttaccaacacattaattggaggttatcaacatgacagaatatcgagttgaatcagatactttaggcgaagttaaaattcctgcgaacgccttatggggtgctcagacagaacggagtcgccataactttccgactggtacgaagatgccgttggaaatgattcgggcattacttcaaattaagcgggccgcagcgattgcgaataaagaagttgaagcaatgactgctgaaaaagctgatttaatcgtggctgccattgataagttattagcgctcgacgatgaagatttgcgtaaggactttccgctggttgtttaccaaactggttcggggacgcaaacgaatatgaacgttaatgaagtggtcgcacacatggctggtaagatcaatcctgatattgaaatcttgccgaacgacgatgttaaccatggtcaaagctctaacgatatcttcccaacggcgatgaacattacggccgcagttgccgtggataagctgattgccgcagcggaacacttattagcggaattgaagatcaaacaaaagaagtactggcgggtagtaaagatcggccggacccatcttcaagatgcaacgccattaacttttggccaagaagtgagtggttgggccagtgcgattgaacatgatattgcctacttaaaacagttgaatccaacgttaggcgagcttgcaatgggtgggaccgccgttgggactggtctaaatgctgcccctcattttgctgaaaatattgctgcggcgatgagcaaattgtatgggattgaatttacggctgattccaataagttctatggtttggcccatcattctggcttaaacgtggttcacggggccatcaagaccctagcagccgatttgatgaagattgccaatgatgtgcggttcttggcaagcggtccacgggccggttatgacgaattaaacattccggctaacgaacccggctcatcaatcatgcctgggaaagttaacccaacccaagctgaagccatcactatggcagcggtacgagttatggggaatgacgtggtcgtcgatttagcttctagccaaggtaattttgaaatgaacgtttacaagaccgttttgattgatgccttccttgaatctgctgaattgttagctggaacgattaccggcttcactgaccgaatgattgctggtttgacggtcaaccaagaccggatggcagagttagtcgacagttccttgatgacggttacggcattgtcaccacatattggctatcatgatagtgcgatgattgctcaagcagctgaaaaagcggggacgacattgcgtgaagcagccatcaagtctggcaaagtaaccgcggaacaattcgatgaatggatggttccactggatatgacgaatattgatgattaagctaaaataagtattgatcggcgttgaaccgttaacgtggatcaaggtggcacgggtcattgttcctagacttggaatggtggcccgtgtccagttaacgacaataataaatgagattttggttccatcctggggaataccccggacgaattgagaggagaagtggcaatcaatggctgaaaagtttacatttacaccaaccgccttagcggatctaaaaccgaactatgacgtagtgattattggatcggggggcgcgggtttgactgcggcaatccaggcacatgaattgggcctgaacccggttattttagaaaaaatgccgaaaatcggtggtaacaccacccgggcttcatccggtatgaatgcggcggagacgaatgtccaattgcatcaccatattgttgatagttttggcgatttctacggcgaaacccttaaaggtggtggcggtatgaataaccaagcactgttgaaattcttcacggaacacagtgcgctcgcaattgactggttagcagaccacggcattaagttggatgatttgacgattactggtgggatgagtgtgatgcggactcatcggccaagttccatggctcccattggtggtttcttagtcactgagttgttgaaacaagtggcggctgaccagttaccactcttcacagatgtcaaagtcgatgaactactcgtcgaagccggcaaaattagtggcgtcaaggcaacaaccccagatggagctgtcacgattacggctggagccgtcttgttagcaaccggtggcttcggtgcgaataagaccttgttaggccagtatcgtgatgatcttaaaaactatcagacgaccaatcagccgggcgcgactggagatgggattctgttggcacaagctattggggctaagttggttgatatggaccaagtccaagttcatccgacggtccaacaagatacagatcatgcttatttaatcggtgaagcggttcggggcgaaggtgcgattttggtcgataaccagggggctcgtttcgtcaatgaactcgacacgcgtaagaacgtgacggccgctatcgaccaactgggtggtactggtgcctacttgatctttgaccgcggtattcgtgaccgggtcaaagcggttgaattctatgatcacattggcctggtaaagactgggactgacttggaagcactggcgactgcgaccggcttagacgctgcgacgcttaaacagacggtggctgactggaatcaggcagtcgctaaccataatgatgcggcctttaaccggacgactgggatggatcgcgatattgcggcgggaccgttctactcaattcacattgcgccagctgttcactacacgatgggtgggattgccattaatccagcaacccaagtgttgaatcaggacgaacgaccaattgccggcctgtttgcagccggtgaagtggtcggcggtctccacggcaataaccggattggtggtaactcaatcgctgaaacggtaatctttggccgtcaagccggacaacagatgttcaaatatttacaataagttattttgactaacccaaatcaatagtccatgcacttgagtaatcggtgcgtgggctatttttgatttgggctgtagttagagaccaaagaaattagtttaaaaatcgactaatttcggttaagctggaaatataacaaacatataggaagaaagtgacaagcatggcgacgatttttacaaccggtgaaccgcaaacaatcacggcaatgctagcagcccgtgatcaacgggtcgcgtatcagcaacagttgacagcgactaacccccgggccacgattgcggcaattaagttgaatattccgggaccgattaagaataacgctgcactacgacggttgtttttggccggtgtccagcggtttgaagctgagttgtcgacatacacggtggcagctgattggaatcatccggcgggtaatgagcggttcttgattctgacgactgactttgcgactagcaaacggctggcggtcgcttttgaagaacacgatccgttaggtcgcttatatgatattgatatcttacaagcgggttcacagcgcgcgctgtcgcggacggatttggggctgccgaagcgtcgttgcttattatgtcaccgtgaagccaaggattgcgcgcgttcacggcggcattcagtggctgagctacagcaaaagattgcggcgatgtatatgaaggaatttggtgagcgcggatgaatacacgtgatttagattattttcgggcgttagttgattgccaaaattatacgatggtcgccaagcagtttgcggtttcacaaccggcagtgactcaagcaattcatcgattggaaaaagagtttgcagtcaaattggtgattcaagaccgtcgccatcaacagacaaatattacccgggccggtcagctgctttacaagaatgcacgccagatccaggcgagtttgcaacttgctcatcgcgaaattcagagtacgttacagactgatattcgttttggcttaccaccaattattggcactttatatttccctcaaattgcggaaaagttacttcagaacgggttactgcaacagttaaaaataacggaaacgggctcagatgagctattgcgtaagttagtgcatggtgagatcaacatcgcgttattagggtcctacttaccatttgatttgccgacagttagtgcggttcacttaggggcacggccattcagtattatcgtgagtcctcaaaatagtttggcgaaacaagccgccgttagttttaaggatctcggtcaggcacagttcattggattagatggcaaatacgtgcacccacaagccttccgagcctattgtgactttgccggggtacatccagaagttatctaccggacccccgatatctcatgggtcaaagccttagttaaagccaacttgggcattagcttactggttcgtgatgtggttaaagcggatgatggcgtcgtatgtttggaaatcaaagatcaattgccggtcagcttcaatatctcggtggtcacacgggctgggtacttaccaaccactgatgaacaacggtttattgatcaattacttaaaatgaagatttaaacgtcgcgactgagccatctgtctaagtgaacagcacgattccttgagtggttcaacttttactttgagattgacgtgtcttcacgattgtttcatttggatatatcgcaatttgtcttgattacgaaaactgcaccaccctcacagactattctgtaagggtggtgcagttttgcttaatcggtctgatcagtgtcaaccgctaatgtttcgtgcaaaatggtcagtagctgttgctgcacgggggtcagaatatgggttgttcggtagacgatgcttgtgatgaattcagggggttcaatgtccatcaagtccagtcgtacgacgtcagtacggtagtgatcgacgattttggtaaagaaaccgatgccgacattttcaccaatcaatttcattaaaacgtgggtatcgttggaacgaaagacgatgttggggcgaaagtgattccggcgcgtgagtttgttgaaggccgtattatggatgaaattactattaaagaaaacaaatttttcacgtcgtagttcgttaaagtagacccgtttacgttgtgctaacggatgttgtttggacacgtagatacagaagggctgacggtcaaattcttcggcaatcaacgtttggtaagcgagcggctccaccgaaccaagtagggtcatgtcaacgcgaccgtcccgcacagcgttacgtagccaaatcgagcccccctcaatggtttcgagaccggctaatagcccttccgcggccaatcgggcaccgatttttggaaaataatggttttcaataattggcggtaatcctaaaatcagtcgattttgggatagattgtcgatttcttggtgggcgaggcgtaactcatgtaaaacgattttagcgtgttcagcaagttgcgccccgctagcagtgacgtgtaacgtatttttaacacggtcacgaatcacgagtggtgccccgaattcagactccaggcgtttgattgcggtggtcacagttggttggctcacaccgaatgttttcgcaacttttgaaaaatttttttgagaaattaattcatcgaaataagctaagtcttttgtgttcatttttattcctttctaaatcagcttttgtagcgaccttatttaatatatttatatcatatcatagttttgactataacattttactggcgttacagtattacttgtaaattgataggacgtttttcctagcaatgaaaattgatgaaaatgtaaattaattaggaggccgcagtaatgacaaaaactgcaagtgaaattttaaataacccattcttaaataaaggcactgcctttaccaaagaggaacgtcaagcacttggtttgacggggacgttaccaagcaaggttcaaacaattgatgaacaggcgacgcaagcttatgcccaattcaagagcaagcccagtcgtttggaacaacggattttcttaatgaatctctttaacgaaaaccggacactattcttccatttgatggatgaacacgtggttgaatttatgccaatcgtttatgatcccgtcgttgccgattccattgaacaatataatgaattgttcttggacccacaaaatgcggcctttgtttccgtagatgcacctgaagatattgaagcaactttgaagaatgcagcggacggccgtgatattcggttagtcgttgttacggatgctgaaggtattcttggtatgggtgactggggtgttaacggtgttgatattgccattggtaaattaatggtttacaccgccgctgccggcattgacccatcacaagtactgccagttagcatcgatgctggaacaaacaaccagaaattattagatgatccattgtatcttggtaaccggcacaagcgtgtttccggcgaacaatactatgatgtgatcgacaagttcgttgctgctgaacaacaattattcccagattcattgttacactttgaagatttcggtcgcgacaatgctcaagtaatcttggacaagtacaaggatcaaatcgcaacctttaacgatgatatccaaggaaccgggatggttgttttagctggtatcttaggcgcattgaacatttcaaaggaaagcatcaaggaccaaaaaatcttatcatttggtgccggaacggccggtatgggaattgccaaccaaatcttggatgaattgatgcaagctggtttaacagaagaagaagctaaacaacacttctacgctgttgataagcaaggtttactatttgacgacacggaaagtttaaccccagcccaaaaagccttcacgcgcaaacggagtgaatttagcaacgccgacgaattaaccaacttggaagccgttgttaaagccgttcacccaaccgttatgattgggacatcgactcagcctggtacctttactgaaagcatcattaaggaaatggcggcgcacacggaacggccaatcatcttcccactttctaacccaaccaagttagcggaagctaaagcggaagacttaatcaaatggactgacggccgggccttagttgcgactgggattccagctgatgatgttgaatacaaaggtgtcacttaccaaatcggtcaaggaaacaacgccttgatgtaccctggtttaggatttggtttgattgcttcaacagccaaggtgctgaacgctgaaaccttgtcagcagcctgccacgcattaggtggaatcgttgatacgtcgaagccgggtgccgcagtattgccaccagttgcgaaaattactgaattttcacaaaaattagctgaagtcgtggcacaaagtgttatcgatcagaagctcaacaaagaaccaattgcagatgctaaacaagcggttgctgatatgaagtgggtcccagaataccgggccatcagcaaatagtgtcggtaaaataagagaattgtaagagggtataagagcacatgggagttttatggaattcaattcaaagcgtcttagttgtcgttttgatcatgatattaggtttcgtcctacgacgagcaggttggtttgatgataagtttgctggaacaatttccaaatttatcaaaaatatcgctttgccagcatcgattttcgtatctgtgctgagccgactaactcgtgggcaattaggatcatttgcaggttacttggcatatgcatttctagccgtgattattggctacttgattgcctttgcgctagttaaaattatgcgggtccgtccaggtcgtaaggggattttcatcaatgcgatcgtcaacgccaacacgattttcattgggttacctttgaacattgcgttgttcggtgacaagagtatgacgtatttccttgtttactatattgttaataccgtttcgacatgggcatttggggtcttcttgatttcaaacgacgacccgacgaaatctaaggaaaagacgcataacaagattgattggaagaaagtcattccaatgccattggttggtttcttagttgcattaattttcttactgctaaatattccaatcatgaaggtatcatttgtcagttcaacgttgacttacgttggaaacttagtaacaccactttccttgatttatatcgggatcgtgttagccgacgctggtctgaagagtattcgctttgaccgtgatacgattgttgcgttgattggtcgcttcatcttgtcaccaatcatcatgattcttgtcttgatggttgctggtaatctcggtgcaagtttcccaaccttagcatcgcaaaccttgattgttcaatcagcaacgccaatgctagccgtgttaccaatcttggctaacgaagcacatggtgacgtggaatacgccactaacatcgtgacaacgagtaccgtgttgttcatcgtggttgtgccagtcttgatgaccttgatccaatatatttaaagtttatttagaagtattccggttgaaagagacgggatgcttctttttttgatcaaaactgcttgagttgaacccgattaaaatatgttaaaggttaaaattaaggtcgatcagtcgaattatttcagctgaccgaccttaatcttttacgaaaggagtgcttgaagacacaagcttgtggcgattgcgtttaaacagatgaatatgatagaaacaaatttaagtcgtaacccataataatgcggttaaattaaaattagtgaatcttatggattattaataaatttgtttaaaataaccaatgctgtaaagtgctgccttgaaaggattcaattaggaattgattgaaattgttagatttacttgactaattgcacaaaaattaatagaattaacaacgttgcattattaagatttagattaggaggcgtaccggatgaaagcatcacaacgattgctggttaaaaaatcagtcaatccagctaattttaataagggtggcctcgaaaagacgttgagcgcatttagtttaaccatgatgggtgttggcgcaatcgtgggttctgggatttttatcaccccgggaattatcgccgctaagtatgccggtccggctgccatgctctcatttgtgattgctgcggtcgtgtgttcgctggccgcattatgttacgctgaattttcttcaaccattcccttggcggggagtgcttatacttacgtttataccgtttttggggaattcttagcgtggattcttggttggtctctgatctcagaatatttattcgcggtatcttcggtggcggtaagttggtcatcgtactttcagaatttaatgagcggctttggcctaaaactaccaacatttctgaccgccgcagctggtactgccggtgtcagtggtgctggattcaacttaattgcttttgtcgtggttttggctgtctcactgttattggtcggtgggttacaagagtcaacacgggtcaattcaattatggtaatcgttaagattctagtgattgttcttttcattggcgtggcaattttctttgtgaaacctgccaattatcatccgttcatgccccatggtgttagcggactggtcaaaggcgcgtcgttagcattctacgcgtatattgggtttgatgcggtgtcgactgcttcagaagaagtgaaaaatcctaagcgtaatatgccaatcggaattgtcggttcgttagtcgtagcatcgattttatacgtggcaatggccgccgttctggtcggggtcgtgcattacagtaagcttaacgtgggtgatcccgtggcgtatgccttagccgtcattcatcaaaactgggcggcggggattgtgtcactgggtgccgttgtcggtatgacgaccgttttgattgtcatgttatatggtgggacccggttactgtttgcgattagccgagatgggttgttaccaaaagtctttcggacggtcagtccccacaccaaagtgccggttaagagtacttggatttttggcattattgccagtgtatttgcggctgtgattccattagataaaattgcggagttagtcaatattggaacgctatttgcattcgctatggtgtccatcggtgttgtcttcctgcgtcgacacgaaacgctacaacaaatcaatagttcatttaaagtaccattttatccagtgttaccagttgtctcgttcctcgcatgtgtctacctgatgcttaatttgcaggcatttacgtggcatatgtttggtatttggctggttattggcatcgtgatttactttgcctatagttatcggcactcccgtattcgagcagggttacgtgccaaagaatcaaaatcgtaattaatagtgggtgcttaccggggcgggtaagcacccattcttttcgcggctactaagctttgagatatgctataattaagcgcataattcataaggtaaagagagttgaggtggctgatgatgcagagacgttcaaacgcctatcatatcagtgtattagcggtactaatggcaatcgtgatcattcagaatattgttccgttttttgggtacattccattaccaggattgagtattacgacaattcacgtgacggttatcctggccgccgtggtcttgggaccgcgtgatggggcaattattgggggcgcatggggaattattgcgtggatacgggcgttcgtcgcaccgacgagtcccttagcaccaatcgtatttaccaatccattgatttcggtgataccccggattctcgtcggtttgatagccggttgggtctttatttggtttcagaagcggcatcaaaaagtgttggggatgacgctggcgggcgtggccggggcattaacgaacacgattctagtcttaggtttgattgggctactctatagtcatcaagcagccggcttttatcaagttaatttgagcaaactaatgccgtacttgttaacgatcgtggcctcgaatgggattccggaagcgattttagctggaattctcacaccactgatcgggacaccattactacgttttaaaaaataagtcgctaaagtgacagctagcttgaatcaattcaaatttaaaacagccacccttgaaatctcctgaatttcaagggtggctgttttaaatcgctatttaacggcttgaacttgtttctgactaataattactttgttgtgatacttatcaacgatggctggatcaggacttgtaaaggtgattaaatacgaattagtgtaacttttcgcaatggtcccggtataagtctggccttccaaaatgaacgtcacttgtgttccaatatccatgatgatgcctcttttcgcacgatagttttattaaggataacacaccagtggacgtaacaggtaaaagttcactaattaaaacgtcgccgaacttgggcccaaattcccgttgctagggctaagagactggtacccagcgttgcgagccatgactgagttgtttcgtcggtctgcgggagctcagttgtggctttggatgctggtgaggagacggcaactaagtcggcactgtcagtattagttgttgtggcagataccgtggctggcgtcgtcacacttgcttcctggtcactataatcttgaagcagactagccgtgacggccgaaccgctgtcatcgtgattaactaaccagtcagtgttagtcgtggcggttgaactgaccataattgaatcactgacttggcccttaatcacgttgctctgatcgatagtgcttgtctggttcacagtggtcgtcgcacgtgttgcgtcaaccgccgtgtcggaatcactatccactgcgttatccgtgtcgttcaagtcaacgtaactagtcgttgaatcatcattaggtttcgcatgattggtcgtgtccggtgttgtatcactagttatgtcggtagtgtcagtggtcgtgttatccacgatagtttgatggtcactgatggcctcatcagccgtcgtttcatcggtaacattgtcctgtgctgtggaatcggtcgttgtaccgttgtcagccgctccctgattacgattatccgttacttgatcaacatcaactgcttcatcttcagcatccgctacggatagcaatggtgttaagaaagctaacaagtgttggcggtattgtaggatcgcgttattagccgcagcgtgaccaccgacagtccctggtaagatccaaacttcttggttggcagaatgattggcggccgctaattccaatgattgagtatatggaatgaaggcgtcgtcttgcgtgtggatcaagagtaacgggatagtgattttgctagctgcatcggttgctgataagtcatcgacactgaaaccttgttccttgatcaaacgagcgttcatcgcggccacgattttatcataggataagaagggcaggctcgtgatggctggcagaccaacggattgaagtgcgtttgaaacggcggtgatggctttgttgtatagcgaactacctagttctggtaaggttgcgtacccggcgtccgacacaactgctttaacggattttgaaagtccaggaactgaggctgcttctaacacggtgtcggcacctaatgattgaccataaaagacgacttgactgtcggcgccattgcgttcgtcgaccatcttaacccaattcagccagtcatacttgtcctgataaccaaacgttaagttatcaccgtcacttaggaactggccacgttgactcggcatgaggacgttataacccatgtcataccaagtctttgaaacgtagccgatccaatcaacatgttccgtccaaccttggccgatgatgacggtcttggtggaatcaccgttttgaatatagtaagcacggacagactgcgtcgggtcattgtattcaggcagggtccaggtttctttggtaacgttatcccaccaagtaactgttgtcggataatattcttcggccgcagcccggtcagcagcataagcgactggatcgaggccggtccacgtattggagatgtcatagcggtgctggttcatttcagtacgtagattagagagggcttctgagccagttcccgtgaagacgattgggtagagtacattacccacgatcgtgctggcgatatctgtggggagttctttcaactcgtcaagaattgtcgtcagtttggctttggctgctgctaattgttcttggccagacggggtcgctgcttgatttgctaagtccttgatcgtattaacgacggccacaatatcactggcatctaacgtgaccgtggtggtgtccgtcttatcagaggtagtaacttttttccaggtcacactgtaagggccactttgtgtaatggtgaccgtactcttttgattgccagtcgtgtcgttggtttcgtagattaagccatgaccgctgtcacttgtcgcggcactagccgcgctggtcgtcgccacactagttggcgttgccgcagcggtcgaatcggtgttggtactcgtatcatcagttgaatcaatagctgaatcaatagctgaatcggtcgttgacttagtcgtggctgtcgccatatccgtgacttgagtagcgtcactcgtcgctgagctagcggcctgttcgttaccacttatggtattgtctgccgtcgaattagtagcgctggtcgtctgactagttactgtgccactcgcactgttagcaacctcactagcttggtcggtagctgacgctgcacttgtggcttgttcagtcgcgctagtctcagtagcgttagtactagtcgtaatttgattggtgtcagtggtagcgctgctgtcggtatttgacgtggtattactgtcttcaccagtagtcatgctacttgtcgtggttgacacggttgccgttgccccggcggcttggctgagttgactggcaacgctagctggggcgttggccgcagaagtggtcgtggcactaacgggggtagccgttgctgctaaggcgttagtcgtcagcattaacgtactaccgagccccgcaatggtaatccccgcgtaaacccaatgtttgccatctttgaacattttataatgatcaacggtggttgattgttgtgaattccttttcattatatttactcctcgtaacgttttattctattgcacgttttaaaatatagcacgacaacccaggcttgtttgcgttttcgcgggctaaacttgttaaatgaggtacttttttaataacggcatcagttgtttattgtatgaactaatttgttaactgattgagtacgatgattgatttttatgatgcgacaagctcagttattcgcgggagtcacgcgtgattttaccagcagatgccagattgcaaaatgtgaacttacaaacgaataagcgtactaatagtggccttgaaaattagcggctttgactattttgggaataaaagttgagattgattgaaatttcacttatcacttgctattatgaaaggtgaataaagtgtttccgctttcgtagggaataaattaataaaggggggaccattatgaatctcggattaagtattttatccttggcgcgttttcagttcgcgatgaccacggtgtttcatttcttctttgtgccattatcaatcggcttagccttggttgttgccatcatggaaacggtgtatgttgtcaaaaaagacatcatgtacaagcacatggcacaattttggggccgcattttcttacttagctttgccgttggtgtcgtgacagggattatacaagaattccaatttgggatgaactggtctgattattcacggtttatgggtgacatttttggggcgccactagcgattgaagcgttagttgccttctttatggaatccacgtttattgggttatggatgtttggttgggatcggtttaatgccaagctccactgtgcgtttatctggctaacgtcgattgggacgatgatttccgcgatgtggattttagcagcgaacagtttcatgcaaaatccagttggtttcatgatcaataccaagactggtcgtgcacagatgacgagctttgcagcagtcgtcaagaacgaacagctctggtatgaattaccacatgtgttgtttggggcgtttgttaccggctcatttgtggttgctgggatggcggcgtttgcgttactcaaaaagaaaaacgtcacgttcttccgcaaatcgatcaaggtcagtttaatcgttggcctggttgcttccatcggtgtgattggaatgggagatttacagacgcgttacatcattaaagaacaaccgatgaagtttgccgcaacggaaggcttatataaggattccggctcgccagcttcatgggcagttattgaagggatggatactaagaaccataaggccaactggtcgattgaaatcccgtatgtgttggatattttaagctatcataagttgtccggtaatgtgaagggacaaaatacccttaacaaggaacttcatgccaagtatgacaagaaatttggtaaggacatgaactactacgtgccaacaaagacgcttttctggagcttccgggtcatgacggtagctggtgggctcttcgcactgattgccattatcggtctatacttcaaccgtgcaaagtcaacgctgattgagcggcagcgctggttcctgtgggtactaggaatctgtacgttcttaccattcgccgcaaacacggccgggtggctgattactgaattaggtcgttatccatgggttgtttatggtttactgacgattgcagatgccgtttcaccaaatgttagtgtcgcttcgttgctgatctctaacatcgtgtacttctgcttgttcagtggcttaggcattgtcatgatcgtcttatcacggcgtgccttacaccaaggacctgatgatttgttacaagctagcgatgacgcaccgtacgatccttatggtaaggaggcgttcagtcatgagtaatctacaattcttatggtttattctggtgggcgttctatttagtggtttcttcttccttgaaggttttgacttcggggttgggatgacgattaagagcttagcccaaacacgcgctgagcgcgatgttgtgattcatacgattggcccacattgggatgccaatgaagtgtggttgatcactgctggtggggcgatgtttgcgtcgttcccaatgtggtatgcttccttattctccggattctatcttatcttattgttgattctagtggccctcattatgcgaggggtctcatttgaatttagaagccggatggaaagtgacgccggccggaatttctgggaatgggccgcagccctaggtagtttctttgctgccttcctatttgggatgatgtttactgctttggtcaaagggatgccaatcaatgccaatggcgatatgactgcccacttcaccgattacgtgaacttgttctcaatcgttggtggggttgccgtaacgttactctgctatttgcacgggttaaactttattcgtctgaagacgaccgggacgttgcgtgaacgggcgctccagtgggccaaaccgttatactgggtcctgtttgccggtgaagttgtcttcgcaattctgctgttctttaacaccgatttctttaccaagaaaccaatctcaaccacgattttagtggtcgccttagtggctttgacggtcttggcaacttggggtgtttatggaaatcatgaatggctctcatttattagcagtggtctctcactgatcgacgtggtcgtgctcctgttcaatggactattcccacgtgtcatggtggcgaacaattctgcatacagcattctgattaaagatgcgtctaattcaccatatacgttgcatctgatgactgtaatctcattatcggtattaccgattatgttgatctactttatttggagttactgggtcttctataaacggttggcatcgtaattcaaatgcagatgacgacagtatcactggtgcggtggtacaattaatttaacagcaccaacggggtcgcgaccttggccaagtgccagggtgcgaccccgttcattttaagtagggagtgatcgaatgtgtttgatccggcattatttaaactaccagggatgcgccgagcagccacgattttagggttactggccatcgtcgagggtatttgtattgtctttcaggcctactatctatcagtggcgattgttggactgtggcacttgcattcattggcgtcgatcagtcagcccatgctatggttcgcattagcttgggtcggacggcagttactggtcgtcattaaaaatcgtgtgatgtacccgttagtcgaacagacgacgggtgacttgcggcgtaaagtgatgcagaagttataccaactcggcccaagttatgtagctaagactgggactggtaacgtggtgacgacagcgcttgaaggtatcgataaagttcagacatacttaatgttggttgtgattaaagtaatcgacatgatggttatcccgtggatcattttaatttacatcgcgtggttgcgttggcgtgaggccctttttctactggcaatttttccattaattattctatttatgattattttgggctatgccgctcaagctaaagcggataagcagtacgtgggctatcaacggatgtctaatcacttcgttgatacgctgcgcggtttaccgaccttgaagcagttaggactgagcaaacggtacgctgacaacgtttatcaggttagtgaaggttatcgtaaacaaacgatggcggtcatcaagattgcgatgttatcgactttcgccttggatttcttcacgaccttatcgattgcggttgtcgcggtcttccttggttttggtttgattaacggcacgattacgttgctaccagcgttggttattttggtcttatcgccagactatttcttgccattacgaacatttgctaatgattatcatgccactttaaatggcaagaatgcgtttgcggatgtccagaagatgctagctttgccggtgccaactgaacgtcaacagctcggtactcagcctgtgcaatggcaaagtgatagtacgttaagtttacatgacgttgattttaagtatgatgatgatcagctggccttaaaacacattaatattgatgtgcatggttaccaacggatcgggattattggggcatccggatccggcaaatcaactttgatcaatttgttaggtggctttctaaccccggtcgctgatcagggtaaaattcaagtcaacgggaaaacagtctcgcatttgagccaggacgcctggcagcagagctttttctacattccgcaaaacccatatctgttccatgcaacgttagcagagaacatcgctttttatcagccagacgcttcacgtcaagcgattgaacgagctgctgaaaacgccggattaacggcctggattgcaacgttaccagcggggttggatacggcgattggtgaaggctcccgtggtgtcagtggtggtcaggcgcaacggattgctttggcgcgggcctttcttgacgactcgcggcgagttctgttatttgatgaaccaactgcccacttggatattgaaactgaagcggaactgaaaacgacgattttacccgtacttgataatcacttagttttctttgcgactcaccggttacactggattaatcagatggattacgtgttagtgatggatcatggggaaatcgttgaacaagggacaccgacggaattggccgcgcatgacggggcgtacgttcggttacgtgatgaaatggtaggtgcgatctaatgaaagattttttggcaacttttaaaaatgatacttgggtcatgccgtatttgcgcaagtataaaaagttactagccctgacgctgtttttgggtctaatgacatttttctgcggttcagcgctgatgttcaactcgggctacttgatcagtaaagccgcacgacacccgtataatattctgatgatttatgtgccaatcgttctaacgagagcgtttgggattggtcggcctgcctttcgctatgcggagcgaattacgagtcataactgggtgctacggatcgtgtcagattttcgtaagaaactgtaccaatccgtcgccaagcacgccgtagcgattcgccaaaatttccagactggtgatgtcctgagcattttagctgacgatattgaccatattgaaaatttatatttacggaccgtttttccaacggtgattgcctggttgatgacgctagtgattgtgattggtctgggctactttagctggtggttcgggctattgatgttgttgatgttaggattggtcgttgtgataatgccgctatggtcggtcttactgaatggtgctcgtgaatcacgcagtcgtcagattcaacagggcttttatacgcagctgactgattcggtaatggggctcggtgattggttgattgccggacgtcaaacggatttctatgagcggcaaacccagcctatcgaagcaattgcggcacttcgtaaacaggaccatcgctttcagtggtggcgagattttacgattcagatcattttcggggtgatttgtttggcgctcttgatctggagtagtttttactggacaacgaatgcggccagttccaattggattgcggcgtttgtcctctccgtattcccgttggtcgatgccatgcagtctgttagtcagggtgttagtgagtggccaagttatcaacggtcaatcaaacgagtcaacgccttagacaccacgcctgaagatgaacacgatcagacagtcttaacggagccatttcaagtattgcgtattgcggaccttgactttaaatatgcggaaggtggtcacgcgatttttgacggtttgaatctgactttaaaagccggtgaaaagttagccctgctaggaccttccggaacgggaaagagtaccttgctcaagctgattttaggtgacctgacaccggatagtgggacggttcaattgaatgatgtgcccatcacacggttacaaaatgagcgcgcccagttattcggcgtcttggatcagcagccgtacttgttcaataccacgattatgaacaatgtgcggatgggtaacttgcaagcgactgacgaacaagttaaagccgcactagcagcagtcgagttagcgcccttgatcgacacgctccccgatgattacgagacagttgtagaagagggcggtgcgcgcttttctggtggcgaacgacaacggctcgcgctagcccgcatcttattacaagatgcgcccatcatcattttagatgaaccgacagttagtcttgatccgattaccgaggcccatttgctgaccacggtgttccgggtcttgcatgataagacgattctgtgggtcacgcaccatttggccggggtcaaccatgtcgaccaagttcgcttcttggaagatggtcaattcgatatggccggtacgccgagcgaattgtatgcgaacgcaccgcggtttaaacgcctttatgatttggatcaagggcgtgatgatgcgaacaatgatcggtaatccggttgatagcagtcttcacgtgcaccttgggcttgtgaaacagacttttaattactgcgctgaatgggtattcagcctacgaatgtagtggtcatgatgaccattactgattacaccgccgatttagagcgtaaaaaggacttggtcgctgtgaccaagtcctttttatatgcaattaatcgccaggttatgatttaacctgttagtaattttgtaattgtgcccgattctgaacgtcgaccacgtaggctttcgtgcctaagcggctgagtaaggtccgtacatcattgtaattgattgagacgcaaccagccgttgcccattgattcttgacgtgaataaagaagcccgagccattatgctgaccgtgattgtccatcacaatcgctaattgatactgattgtggggcgcggccttcgtgtaatcgatcagatgctcgttcttattattggcccagtttcggttctgccaagtgttatattgccggtcatgtggatcttcaatccagtaagatttccggttgatctgtcgataggccataccactagttcttgcactggcagctttaccaaatgcgaagcttaagtgataaacgcctttgggtgtggtactgctgccttcgtgagaattgccgatgccagcggccccgatgcgacttgcggaagttagtgtattcttccagccgcgattggttttttgccaaagtttaagagtggccgtggatgagccattttgaatgaccgtcacgatttgctgagcctttttggacacgcgcattctggagacgagtgttgcttcggatggggtggcagctttggctttaactggctttaagtagccactccaaatccagccagtggccccattcttgctattgtgaacccagtagtaacgaacctttttgccgtgcatgataatatcagtttgctgagtcgttgtccagacggtgttgcaatagttcttcaaatcatgattggccctgaatgtccaacgattataattaccattagccctaaaggtatgtgatttggtatcggtcgtataataggcctttctagccgttgcccgcgttggcgtgcgatgatagtaagtgctggcattcgcagatactgaacttagcattgtgaccgctgcgatcattagtacgctccccagcaaccaattaacaatctttttcatgaaacccctcctagtaaaaatagccccgttattacaatttttatacaaacactataatactatttatctcggcggaatggataacaattttgactaaatcgcggcggtgtagggtgagtaatggttgtagctgaaaaaacagcgcgtcagagtaataggttactttgacgcgctgatttaatttgtgtattaatggttgcgaaccagtaattcagtcactagccggcgtaaagtttgttgtgtttcaccagttggtagctgatcgattaggttcagtgcggttttggtatagtgagtagccaattgttgtgcctgggtaacgccccccaaagcaatgacctgatcgcgaattgtcagtagctgttcattactgatgtggtcgccgggttggggtaattgttcggccaattgtggttcagcggtcagggcgtagataagtggcagtgaataaacgccgtcccgtaagtcattaagcaccggcttttgagttaaggcctcatcaccggcgtagtcaaggacgtcatctaacatctggtaggctaaccccatcctttcaccaatctgttgcgctagtttaacgacgcttgcgtcggcacccgcgaagtgggcaccttgttcacaactgaggctgaacagacgggccgttttgccacgagcaattgccaagtagtcatcgaccgtggtcgtcggatcgaagttatgtgccatttgatccagttcgccttggaggatggctcgcatcgccgcagtattgattttaacgtcgtcagctgtcttggcagcaatcaggacttgatcgaaatagcaggtaaacaacagatcaccggcgtaaatagcattacgttgaccgtagtcttggtggatcgttgtcacatggcggcgttctggcgattcatcaattacatcatcgtgaatcagtgttgccacgtgtagtagttccatagccgctgcgccagcacgtaaccgggccgtgttatgatccggtccaaattgactaaacaagtaaaagaagcccgggcgtaaaaacttaccacccgcagcgagtaagtcgtgtacgcggtcattaatggcggcgttatcaatttttacgttagtagctagatacggcttcagcgctgctagctcctttgcgacaagactttccggttgccaaatggtttgcatcataatcaaaataccccgctttatttgagagatggctccgggacgttttgacgccaacacttgcagccagtcacattctaaaatacaatctatattaaaggtacaaataacttgtttcgttgtcaaacaaaaggatggtgtaaatcattgaaaccaaaagtgtttcttgaatttgttgaaattaaatcattaattgcgagcgtgttaccgttcgttttggggagtatgtacgcctattataattatcatcagttacatcttggttatttattgctatttttcattgcatcttcactttttcatatggcgactaatgcgaatgataattaccaagacttcctacacgcgccacgtaatgacgacaatcaagaatttttgcaagagactaatgtggtcggtgttaaccagatttccattggtcaggcccggacgattacgtttggtttagccggaatctcattgattatcggactatggttagtaacacaaaccgggttgccgttgttgtggatggggctatattcatatgcggtcggttacttttacgctggcggtccgaagccaatttcacaaggcccgtttggcgaatttttctcgggctttacgatgggctttatgatcttctggattgccgtctttattaatacgtatgacacggcagccattacttggcagtcaacgctggctgttttaattgcgtcaggtctggccatttttgcaatttttaacattatgttagctaataatatttgtgatatggacgaggacattgcgttaggccgacacacgattttgtattaccttggcaaaccggtgatgcttcaggtatttgcatggagttacgttgctggttatgcttgtctggtgatcgcggtcttgatgggtgtgctgccaaagtttagtttactaacgttgctcagtattattccagtttggaaaaatacgcgggtcttcttgcacaaacaggtcaaacgagaaactttcacgatttcaattaaaaacgcaacgttgatttgtctttcatttatcgttttcatgggcttaggactgatttttaactagtccttcaataaacgagtatggctttgagaaagcgccaactaaccaagttgatactaagcagtatttttcccagcgagtccaagctggctttctgattttatggcttagggtttttcaatggtatttcacgggggtaaaaaaagcttggatatcgtgtgaaaaaacacacggtatctaagcttttttaatttacataaagatgttattcataactagttttcaaatggatagcggaagtcccattgtgcacgagcggcagtcatgatatccataacgtcagtcgttttagcaagactcgtgttgtgtaattcgccagcaaccattttttgcatgtcagcaatttcgtaattcatggcgttagtgctatcgccggctgtgatggtttcagtatggccttcgctgtcggtgaaagtggcactgtcggcacgtggataggtatcaacggtaaagtaaccattctcatacgcgacgataccgcgtttaggcattttagctcggaacgttaaggcaacggtggccagttcatcattggcgtttcgtaacgtgattgtcgaagattcatcgacgccactgctgaatcggtgcatggttgttccggtaatgtatggtttagcagtcaagaattcttccacgaaggctagggcatagacaccaatgtccagtaaagcaccgccggcaaggtcgggattaaagaagcgattagttgggtctggttctttaaaactaccaaagctagcttggatcattttcagatcaccaagatgacgttctgccgcaaaatcatggagcttctcgtataatggcatgtgatacagggtcatcgcttccgctaagataaggtggttgctagcagccacttccttggcgattgcgagttgggtactagacattgtgatggccttttcactgaggacgtgtttgccagcacgtaaggcgggtaaaatcgtgtcaatgtgataattatggggcgttgccacgtaaacgatgtcgacttgttcatcagccagtagctcgtctaaattaccataagctttgggaatgttgtgttcggcagcaaaggcgttagctttttcctgcgaacgtgagcaaacggcgtagatttctccgtcaggttgatcaaaatatttaacgaaactgtgcgcgatgttaccaaggccaacaatggcccagcgataagttttcgacattataggttcctcctaggattaatcgaatgtgaccacttacattttagcaaaaaaataaggaattggcgcccaataatcatgtaaaattaattcaaaagtcggtaaaatagagtgtaatatgaccgatgctcattgcgatttaggcttacttagaattaaaacatgttggttagttggattcttattcgtcagcacgtgcgcgtcttatgccgactttcggggccgggtgacaattactggaacgcagccgatgtcgatttgagctaacgcccaagccgcttcatctcaaatacgagtcttattctaagcacgtttacgctaactcgaactttttacagcgggcctaagctggcagctttgaactaagaaaccagcatgttttaatcctaattcatgataaatgaacaggtgtaatctgtaaggtaattaccagaaaggaggcggctatgatggcgggtaagcggcgaaaatcgcgccggaagcaacggacaaagacacaattatttgtgaagaagggccgccttcagtgggtcaatatcttattagtgttggcggcgatggtggggatggtttggtatattcagcataattgggcggttaagtcgcgggttacggcgacagcacctacaacaacgcatgcggcatttattaaaaagctagtaccagctgcgcaacagcttgatcagcaataccacgtgctggctagtatcacgctaagtcaggcgattttggaatcggattggggacaaagtaccaatgcgacagagaataataatttatttggggttaagtccacgtcgggacggctcatgacgacgcaggagtattatgacggggcctatcatacggtcaaacggcgcttcgccgtttatgatagctggcacgcttcgctggtcgatcatgccaagaaattggcgtacggaacgacttgggattctcagcactacgctgcggtgattaaggcaactgattatcagacagctgcgcaagcattgcagacggctggatatgcgactgatccaagttatgcacaaaaattaattaatattattcaaaaatatgacttacaacggtatgatagaaagtaatgaaattaatagcagtatttcaatgtcgcttataattctaggagggtactatgcgagaacttgaagaacgcattttgaaagatggccgggtacttcccggtgaagtattgaaagtggacggctttttgaatcaccaagttgatcccgacctgatgtttgccatgggaacggaatttgcccacttgtttcaagatgcgggtgtaacgaaaatcttgacggttgaatcatcaggaattgcgccggcagtcatggcggggttagcaatgcacgtgcccgttgtgttcgcacgtaagcacaaatcagtcacgttaattgatgatttatatacagccgaagtttattcttacacgaagaagacgtctaaccacatctcgattgccaagaagttcttacaggcggatgacaaagtcttgttaattgacgactttttggccaatggtcaggcggttcaagggatgtttgaaatctgtgataaagcgcacgtaaaaattgcgggtgtcggtattgtgattgaaaaagtcttccaaacgggtcatcaactgattgctgatcggggtgtccgtttagaatcactagcacagattacgtcatttgatggtgaccgggtgcactttgcatcggaggacacccaggcttaagttaagaaagcgggggattgtgatgcacattgacatggggatgctagtccttattttcatcatcaactttgcttacattacgttaaacaccgtacgttttttgcttgtaatgcggggttatcggtattttgcagcttttgcaagtgtcattgagattacgatttatgtgctaggattatcattggtcttaaatcgtctcaataatccgattaatttagtcgtatacgcgttaggttacggtgtcggggtgtatgttgggatggtaattgaagatcgattagcgttagggtatacaatgatttcagtcattttacctgatcccaagtcgtcgttaccgggagtgctccgtgaaaatggctttggggtcacacaacacgctgcttatggcttagaaggtgagcggctagaactggaaattctggccccacggaagaacgaacggcggctgtatggcctgatcaaagacgcggcgcccaatgcgtttgtgattgcgtatgaaccacgctatatctccggtggcttttggctcaagcgagttaagcgacgcaatgctcgccgaaaaaagcagtgataaacttgcaactgtgcgtgtcagcaagtatgattgttacaggataatgagcgttaaaataattcaataatcagattataattatttaaagcataggaaagtagggactgaagtggacaactcgattttaaacccaggtggtacgcttggcattattggaagtagtactaatggtgttggattagtaattgccgcgcgtaatgctggcatcaatgtcggggtatacggcgataacgaaaatactgagaccatggaactggcagattttcgcgttgtcggggccctcaatgatcaacaacagttacagaacttcgcagaacgttgtgatatggtgacttacgagtcggaaaccattgatgcgtcggtcattaattttttggcggcccatacccgggttccacaaggcgccgatgcgcttgagattacacaggaccgctctttggaacgggcgtttttcagccaacttaacttgaatgtagcaccgtcagcgacaattgtcagtttggatgatgtctatcaatcgatcgggtcaattggatatcctagtattttgaagccgattcaaaagggcttgggtcaaaatcggcaactggtcattaagacgcagacggatattgtcaaggcggctgatctgttggattggggcacatacttgttagagtcattgattccatatgataaggaactctccgtttttggcgctaagagtggtgatacgacagctttcttcccaaccgttgaaaaccggtatcgtaatcatgagctagttgcctcgattgtgccagctcaaattgattcagctgtgaatgacgaaatgctgcggatcacaaaggaaattagtgataacttgagttatacgggtgtctttgaagttgccttcttcttaacgaagagtggtaatttatacgtgaagcggattgtccctgcgatgcatcaggcgggttatgtcttcgaacgtgctacgaatattagtatggcagaacaacacttgcgagcaattgcgggactgccgttaatgccagtcaagcagttgatgcccgtggttgctgcttactttacaccggctcaggagagtggcattcgcacgcagtggcagattaagacgaactggttctttaatttctatcaccgaacgttgttacaagcgcaccgggcaccagtcgctggccacgtgctagtcgaagcaccaagtgttaaagaagcactcgaacagatcgaagacacaagtatttggcagtttgggcaaacgacgccggctgataatgaacctgaagctgagtagtgtatgatcagaacctagttttacggattattacggttaaactaatcgtactgttcgcaccgggtgaccagctattatgggtaaccgtcgtgaataaataaagttcgaaatccaattcattttgtgaattggatttttttagcggttggggagaagccagccaaatggcgagatacggttatctgagggggaatcgttgagattggcgtggcgggtattttggttagaaattgagggagtctcaaaattacttaaagttacgcaatattgccgtcaattcgtttcccgtgaatagtagaagttgtaaaattaacataggtgtcactgacaatggaaaaaccgcgatttttgtatgagatgctgaccttaaagtacagcaatcacggccaaaatttgctataatgtttggtgactgatttttagaaagggtggcgaacagcgtgtcgaaagaaagcctattggcaggaatgaatgacaagcagcaagaagccgttttagacacagaaggaccgctactaattatggccggtgcgggctcggggaagacccgtgtattgacgcaccgggtagcttatttaattgaagagcaaggggtcaacccctggaatgttttagcgattacgtttacgaacaaggccgcacgcgaaatgcgtgaacgggttggtaagctgttaggtgaatcggcgcaggaggtctgggtctcaacgttccatgccctgtgtgtccgaattttacgacgtgacattgaacaaatcgggtataaccgagcgttcacaatcgccggcactagcgagcaacggaccttagtcaaacgaatcttgacggaacaaaatatcgattcgaaaaaatttgatccacggtcaatcttatccgcaatttcaaatgcgaaaaatgacttacaaacgccggagatgtataaagaatcggctgccagtccctttgagagtgtcgtggcagacgtttatttgcaataccaacgtgaattagcggctgatcaagccgttgactttgatgatctgatcatgctgacgattcaattattcaagcagaatccagaaacgctggcgtggtaccaaaacaaattccattatattcacgtggatgaatatcaagatactaataacgcacagtatacgttagtcaacttgttagctgacaaatataaaaatttgtgtgtagttggggatgcggatcaatccatctatggttggcggggtgccaacatggaaaatattctcgatttcgaaaaggattatccgcaagctgacacggtgatgttggagcaaaactatcgttcgacaaagacaattttgtcggcggctaatgcagttattaacaataattcaacgcggcggccgaagaaattatggactgagaatgaaccgggtgacaagatttcttattatcgtggtcagagtgaaagtgatgaaactcactttgtcattgccaagattcaagaaagcatgcagcaggacaaaatggactacggcgattttgcgatcctttatcggacgaacgcacaatcccgggtaatggaagagtcactcgttaaggcgaacatcccctatacaatggtcggtggtaataagttctatgaccgtaaagaaattcgggacgtcttatcctacttgactttggcagtgaacgatcaagattcaatgaactttgaacgggtcgttaatgaacctaagcgcggcattggtcaaacgagtgttgaaaaattgcggttgttcgcggatgaagcgggttattccatgttggaagcagctagcaatgttgatatggctaatggcatttcagcacgagcgaagggtgctttagcgaagtttgcagcgacaatgaatgaattgcgcgctatgcgggaatacttatccgtgacggatttaacacaagagattcttgaccgcacgggttacatgaaggcgttgaaagatgctaaggcaacgaaatcgttagaggcacaagcccgtatcgaaaacattgaagaattcttgtctgtcaccaaacaattcgatgatagttatcaacctgaagatgaagatagtgacaaattcgtggacttcttagcggatttagcactggtttcggatgtggataacgttgaggaagaaccccaagccgtgacgctgatgacgttacatgcagcgaaggggctagaatttccggttgttttcttgattgggatggaagaaggtatcttcccactgtcccgggcaatgatggatgaagacgagctggaagaagaacggcggttagcatacgttgggattacgcgggctgagaagaagctgtacttgaccaatgcatactcacggatgctttacggtcggcggcagaataatccggcttcccgtttcgttgaagaaatcgaaccagaattactcaaaaatgaaaatacgttggatggtgcaagtagcactggtcctaaagttccatttggtgcggatcgtgaacggcgtgcttttacaccttcatataaaaagaatccagtggggacgcgggccacggtcaagaaggctagtggcacgggtgctgacaagaatagttggtcgatcggtgataaagtcaagcatcgtaagtggggaaccggaacggtcgtgaaggtctccggtgctggtgaagatgctgaactagacattgctttcaaatctgaaggaatcaagcggttattagccgcatttgcaccgatccaaaaagtacaggactagttaggaggactggctgatggcggacaaacccaacacaatgacggttgagcaggcggctgatgaagcggctgctttacggcaaacgttaaatgaatggcgtcggcagtactatgacgaagatgcgccgaacgttgaagatagtgtgtatgatcaaaagtatgaacggttggtcgaactcgaacaaacttttccacagctcgttacaccggattcaccgacgcaattagttggtggaacggttaaagcaggctttgataaagtgacccatgagattccgatgttgtcattgggcgacgtcttttcacaagctgagttacaagagtttgttgatcgcttggaacaaaacgttggtcatccagtcgattataattgtgagttgaaaattgatggtttagcgctgtcgttacgttacgaagatggggtgctcgttcaagggtccacgcggggtaacggtacggttggcgaagatattacggctaatattaagacaatcaagtcgattccacaacggttgacccgaccactgacgatcgatgtacgtggggaatgttatatgcctaaggcagcgtttgctgccttgaatgaacgccgagaagcagcgggagaaccagtctttgcgaatccacgcaatgctgcggccggtacgttacggcagctagattcacgagtcgtggcggaacgacagctcagcacgtttatgtataacattgccgactacgaaccgttaaccgcccgtacgcagagtgacatgttaacggagttcgcagatcttggttttgccatcaatcctgactttaaggtggcccattcgatggccgatgtctttagttacattgaccattatcaaaatgaacggccagaattagcatatggcattgatggcatcgtgatcaaagctaacccgttaccgctgcaacgctcactaggagcgacagtcaaggtgccacgatgggcgattgcctttaagtttccacctgatgagcagccgacccttttaaaggatgttgaatggaccgttggccgtacaggagtcgttacgccaactgcggttatggaacccgttcaactagctgggacgacggttgcgcgggcttcgttacacaatcccgattacgtggcggccaaagatgtccgcatcggtgatacggtcttgctacacaaggctggcgatattattccggaaatttcatcggttgatttagccaaacgacccaaggatgcgcaaccattagttattccaaccacgtgtccgtcttgtggggcgccgctggttcatttggaagacgaagtggctttacggtgtattaacccgaaatgtccagcacaagtccaagaagggctggttcattttgcctctcgcaatgccatgaatatcgatggcttgggaccacgaatcattgcgcaactctatgcaaatcggctggttagtgacgttgctggtttgtaccgattaactaaggcacaactgttaacattagataaaataaaagataaatctgctgaaaagctcttgacagcaattgaccgtagccgtgataattcacttgaacggttattgttcggtcttggtattcggcacgttggtgctaaagtggcgcggttaatcgcgcagcattttgggacgattgaggcgttgatggcagctagccaagaagagattgcggcgatcgattcgatgggcgatgtgattgcgaacgcagtggttcaatattttgagagcgacgaagttcatacactcatccgcgaattgcaagcagtcaacgtgaataccacttatcaaggccctagtgccaccgtggcagaagatagtaacagttggtttgcaggcaagcgggtcgtgttaactggtaagctggaaagctttacgaggccagatgcgactcaatggctacaagctcacggcgccacggttacgggaagcgtctctaaaaagacggatctcgtgattgcaggtagcgatgccggaagcaagttgcaaaaagcacagcagctggacattactgtatgggatgaagcccggttcagcgaaacaatgagggaggatgcacaagcgtgaatgttaaacgcatacgcacgattggcttagtggcagtagctgccattgttctagccgcctgcggtaatttaaagaattcgtcctttgggtcgactagtagtagcaccacaacgaccggaacgaaaacaacgaccaccactggaactgctgatagtgagttctatcaaggcgtcatcaaaaatggccgttatcggacgagtaagtcgcgaggcgtggtcgtttcgcaaaatgataacgtcatgaatttgaagagcttcgaaagtggcttattggacgtgtctaaaaaggtctttccaacgagtaagtatgtctttcaagaagggcagtatttgagctcatcgacagttgaaaattggctcggacggaaatcaagcagcaattcggagggcttgaacccagagaataacggtaagaaggatccgaatactcggaatccgatttacttacaacagcttgaagaacaagattatatggttcaaaatggtagtaagttatcgcttggcggggtcacgattggcttgggaatgaactcggtcgattattatactaaggtcgaatatggggcaacatacgaaacggacatctcaacgactgagttaacggcgcaaggtaagaagatggcgaatactgtcttacagcggttgcggcaacgttcagctttgaagaatgtgccgattgtcttggcactctataagcagtcttcgaatgatagtttagttgggggcgacatgattgcctacgcggtttctaagaacggctccacttcgatctcaaactggacgtcgttgaattggaagaattatgtcttcccagcgacctctgagtcaaagaactcaggtgcgaatagtaatgatgagtcggactttagtcagtttaagtcccacgtgcagaatttcttcccgaacttgtctggcgtaacggcgaatgctcattacaaggacaaatcgttgagtaaattaagtgtcaacatcacgactaagttctacagcgaaacggaaatcatcagtttcacgcagtacttagcaacggctgctaaacggtacttgccatctggtgtaccggttgaaattacggttaagagtgccaatggtgacattcaaagcttcttagccagaacggcgaagggtagttcgtattacacccatgtctttagtgaccagggcgacgattaaacaataatattgagtaagatttgagaaagaaggaaatctgatggctgaagaacgaattaatgccgaacaagtgcaacacgtggcgagcttagccaaattggagtttacaccagaccaattagcgatgttcacaccgcaactagaaaaaattatcggcatgttcgaagaattaagcacagttgataccacgggtgtacccgttacgtcacggatgagtgatcatacgaatacgctacgtgaagacgtggcagttaagagtgatgaagcactccgggaagcattgctgaagaatgccccagaaacggccaatggcttgatcaaagtgccagcaattattgatgaaagtggggacggtgaataatgacttatttcgaccaagatctaactagtctacacgctgacttggtagccaagaagatcagtgccacggaactagcgaaggccacttttgcgaatatgaatcaggttgaccctaagctaggggcgttcttgaatttaaatgaagaacaggccttacaacaggcggctgctttggatcagaatggcatcgacgcgaacaacgtttttgctgggattccgatggcagtcaaggataatattgtgacgaagggcctaacgacgacggcggcttctaaaatgttggaaaacttcgtgccggtctataatgccacggtggttgacaaactattagcaagcaacgcgttgatcgttggtaagaccaacatggatgaatttgccatgggagggtcaactgaaacgtcggcgttccatgtcactcgtaatccttgggacatcagccgggtgcccggtgggtcttcaggtggctcagctgtcgcagtggcttctggacaagtgccagttgcattcggttctgatacgggtggttcgattcggcaaccatcatcatttaacggaattgtcggtatgaaaccaacgtacggtcgggtctcacgctgggggctgattgcctttggatcttcattagatcaaattggcccaatgacacggacagtcaaggataacgcggccgctttgaatatgattgcaggtaacgatgtgcatgataccacgtcatccaaacaaactgtaccagactttacggctggtttgacgggtgatatcaagggtatgaagattgggttaccaaaagaatacatgggcgacgggatcgatcctaaagttcgtgaagtcattcaacaagcagtcaagcagtttgaagacttaggtgctacggttgaagaagtctccttaccaaacagtcgctacggtgtggctgcttattacatcattgcgtcttcagaagcttcttcaaacttacaacggtttgacgggattcgttatggtttccgggctgacgatgttaagaatttggaagatgtctatgtccgtagtcgttccgagggcttcggtgatgaagttaagcgccggattatgttagggaccttctccttgtcagctggttattacgatgcgtacttccacaaagctggtcaagttcggacgatgattatcaatgactttaataaggtctttgaagattacgatttgattatgggaccagttgcaccaacaccggcctttaagttgggtgacgaattatctgatccaattacgatgtatatgaacgatgtcttgacgattccagtcaacttggctgggttaccaggaatgtcagtaccagctgggtttgcagacgggttaccagttggcttgcaattaattggtaaggcgtttgatgaaagcacaatgtatcgagcgggctatgcctttgaacaagcaacgcaagtttacaagcaaaccccgaaagtcggaggtgctaactaatgaattttgtaaccacgattggtttggaagtccacgttgaattaaaaacgaactcaaaaatctttagtccttcacccgtgcaatttggttccgaaccaaatgccaacacgaacgtgatcgactgggggtatccgggggtattgccaacgcctaacaagggcgtggtcgaagctgggattaaagcagcaacggctttacatgctgaaatcgaacatcacacgtactttgaccggaagaactatttttacccggataacccgaaggcctaccaaattacgcaacatgaaaaaccaattgcgcatgatggttggattgaaatcgaagttgatggtaaaaagaaaaaaatcggtatcgaagagatgcatattgaagaagatgccgggaaaaacacccatgaaaacgactattcctatgtcgatttgaaccggcaagggacaccgctaattgaaattgtttctaagcctgacattgcctccccagaagaagcttatgcttactgtgaagcgttgcggcaacggatccaatttacgggcgtttcggacgttaagatggaagaaggttcaatgcgggtcgatgttaacatttcaattcggccggccggttccgacaagtatggtgtgaagaccgaaatgaagaacttgaactccttcaactacgtgcgcaagtcgttagaatatgaagaacaacgccaacaacaagttctcatggcgggtggcaagatccaacaagaaacgcggcgttttgatgaaacaacgggccaaacgatcttgatgcgggtcaaggaaggtagcgatgattaccgttacttcccagaacctgatattccagcagtcgatatcgatgatgactggattgcatccgttaagaagaccattccagaaatgcctggttcgcggcgtgaacgttacatcaatgaatttggtttaactgcttatgatgcgggtgtgttgacccaaactaaggaaatgtctgacttctttgatgcaaccgttgctgaaggtgcggatcctaaattagcttcaaactacttgcaaggggacgttaacgcgtacttgaacgagcataaagttgatttgttagcgactgacttaacgccaactaacttagctgggatgatcaagatgatttcagatgaaaccatctcaagtaagattgctaagaaggtctttaaggccattatggcgggctcagaacctgtccaatgggtcaacgacaagggcttagtccaattgtctgatccggcgaagttacaaccaatcgttgacgacgtattggataataatcaacaatcaattgatgactttaagaacgggaaagaccgggccgttgggttcctcgtgggtcaaatcatgaagaagacacgtggtcaagctaacccgaaagtcgtcaaccaactattaatgacatcattaaaagcacggtagaagcgttggtcgataaggtgttgagcctcgattgatgcatgtccagcgttggggtagagatgagacgctgaacgcttgaccgtgtgagcggaggaataggaaacatgcgtaaacgggcacgacttatttataacccgacttctggacgtgaggcattggcccacgatttagttgaaattcttggtatctttgaacaagctggttatgagaccagtgcgttcgcaacgacgcccgcccctaattcggcggctgatgaagcgcgacgttgtgccaaggacgggtttgaactgattgtagcagctggtggtgatgggaccatcaatcaagtagtaaacgggttagccgggttaaagcggcgacctaagatggctattattccggcgggtacgaccaacgattatgcccgggcactgcggattccgcgcaatgatccggttgcggcggccaaggtagtcctaaagaaccagacggttaagatggatatcggtcaggctggtgaacagtatttcattaacattgcggctgggggcatgttaacggagctgacctatgacgtaccatcacaattgaagtcgatttttgggtacgcggcatacttagccaagggtgctgagttattaccacgagtaaaaccagttgagatggatttgaaatatgatggtggtcattatcagggcaaggcttcgatgtttttcttagcgctgactaattcagttggtggctttgagcagttagtgccggacgcgtcattagatgatggtaaatttaccatgattattgtgaagacgagcaaccttgctaaaatgcttcacttaatgacattagtgctcaatggtggcaagcatatcaatgatccaagcattatttatgtgaagacgagcaaggtcgtcgccaaaccagctgacaaggatcgcttaatgatcaacttggatggggagtacggtggtgatgcaccgatgacgttccggaatttgaagcaacatatcgaaatgtttgccgatacggatcggatccccgatgaggcaatcacggatacggatccagagttggaagacgctgagcgacactttgtctcagctgttgatcagttgccagctgcaactgaggacgacgaaaaaacagaataacttgcttaaattaccgtttaccgatacaatggtggacggtaatttttttaaaagtgttaccgtcacagggacacgattgagcattgcctgacgatttaatcgtttgtcggtttagcaatgatttgtcagtggtgcaaagcatgagacagctcaaattcgcgcgttttgacactcacagtaagcaatttgaatagcatgtttaatcagtaaatgttaacgacactgccaagtgtggcagtattaatggccatatcattcgctgcccggagcagtggctaccaggcagtaactaaaaaataataagtcactaacaaagaaagcaagaggaaacaaatgaaagttaatttaccagtgcacaagggtgaagttttagacgtcactatcatggatttaacctatcagggtatgggtgttgctaaagtcgataattacccaatctttatcgaaaatgcattgccagaagaaaaaattacggtcaaggtcacgaagacgacgaagaactttgcgtttggtgatgtggaaaagattaaccaagtgagtcctcatcgggttaatcctaaagggcgcgtttatcgtcaaaccgggattgcaccactacaacacttggaatacagtgaacaattgaagtttaaacagcaccaggtggccgaattatttgcaaaggtccacatggatgatgtcgaagttttaccaacgattggtatggccaacccgacgcagtatcggaacaaggcccaagtacccgtacgacaagtccaaggacaactaacgactggtttttacaagaagaacagtcatcaattgatgccaattgaagattattatattcaagatcctgcaattgataaggctatcgtggtagtgcgcgacattttacggaaatatcatgaggcagcctacgatgaattccatcatagtgggacgattcggacgatcatggtgcggcgtgggtattacagccatgagatgatggttgttattgtgacgcgaacgaaacacttaccaatggctgacgtggtcacacaagagattcaagcagcgttacctgaagttgtcagtgtgattcaaaacgttaattctaagaagactaacgtgattttagggccagttaacaacgtgttagctggtaaggccactatcgatgatcagttactgggcctgacattcgccatttcagcccagtccttctatcaagtgaacccacaacagaccgaaaagctttatcagttagccattgatcaagctggtttgacgggtaatgagacagtgatcgatgcttattccggtatcggaacgatttcgttaacaatggcccaacatgccaagcaagtgtatggtgttgaaatcgtgccagcagccatcgataacgcacggcagaatgcggataagaatggtattacgaacgcgacctttgttttggatagcgctgaaaaagccatggctaaatggcaagcagatggcgttaagccggacgtgatcgtcgttgatccgccacgtaagggcttggacgccgactttatcaagagtgccggtgaaatggcgcctaaacgggtggtttacattagttgtaacccatcaaccttagttcgagacgtccaacggtttgcagaatacggctaccatattagtgccccagtccaacccgtggaccagttcccacaaacaccacatattgaatcggtaacggtgttagaacgcgaacaataagcattttaaaactggattattaatgaaattatgaaaagtgtgttgggtgcctgattatttgtcgggtaaccaacacacttttttactcagcttgagggctaactttgaattagaagcacaaaataaccgtttttaagcgctgatattgatttgaattcgtccgattttaatagacagatcatttagaatcggctaataaaacagtttattgataattataattattgctttaaataatttaataaataatgcgctgtaattgctgtaaactagttcactggagctgtttgagtcaaatttagcgtattaaattaaataattgtatttattggtcaaaaaacacccacaaaaaccatcaattgtattacttttgataaaagtatgtatttcatctcggtttttgaccagtttgggttataatgataaacgaaataaaccgataaatgggggagcatgatggtaaagagaagaacactgacacaggcaaaagtattagcaacagctaatcagttaattgaaagcaagggaattaacggattaacaattcgggatttagcgttagttttggatgtgcggccgcaatcgatttataattatgttgatagcttgagtgatttattagatcaggttggcctccaatttgttcaaaatgttgcggatcgtttaactgaaacaatctcagacgttgacggtgatgaggctttgatggcatttgctcaagaattccgggcggcctgcaaccagcatcgggggttggcaccgttattacttgacttaaatgataacctaagaatcccacggtctcgtaaagcaattgtgcagttataccaggatatgtttaaaccattacaattggatgattcggcgcgggtggagaataccttgtaccgttccacgttgttcggattcattatccaagagattggcggcttctttaagatgcaggggactgaacttgatgaacggttcacgaaggtgatgcagttagcgattgaccagacacacttacctgctgataagacgaaaaaataatttaagattcagtgcggctatcttagcagatagccgtttttttataggttaaattcgccaatatttagcagtaaatggggcgtaatacaataatctttgttaaggctgaaatcaaaatcaataatgatttattgaagtaattttatgatcaatcgtaatgaaaatcttaattctgcatggtaaacgctaaattagggcgttattttagccccaggcttaaaaaatcgtttacaataaggttaaagttaattttaagggggcccaccatgtcggaacgttatttatcagcaattgaacacgggttaacgactaagcaagttgaccagcgcctgacagcgggtctaaagaatgagccgttaccgcccttaacgcggtctgttaaacagatttttcgtgataatttgctaacactttttaactgtatcaatgttttgttagctgggttagtttttttgacaggaagctataagaacatgctgttcttattcgtggtcatcgtcaacacggccatcggtatttttcaggagattcgtgccaagcgccaggttgataagctatcactattatcggccactaagattcaagtccgccgtgacggtcaaacggtagcgatcggtcaggacgaaatcgttcaggatgatttactattagtgacccgtggcgagcagattcctgtggacgggctcgtgcgggcgaccgctggattagaggtcgatgagtcccagattacgggtgaggctgatccggtcattaaggggccgggtgatgagttggtttctgggagtgtcatccttggcggacacggaatcgtgcaggcgacgcaggttggtcacggtagttttatcaagcagatggcgcgagcagctaagcaaaaacggcggacgccaagtcaactgttaacgattatcaatcgaattatcaaaattttgacctttacgattattccactaggtgctggtctgttcatttccactatgatgcggggtgaaagtcagaaccgggcaatcctcgggacggtggccgcgatggtcgggatgattccggaaggactggtgctgttaacgtcagtcgctttagctgctggggcgttcactttaggccggcaccaggtattggtgcgggagctacccgccattgaagcactggcccgggtcgatacgttgtgcctcgacaagactggaacgattactagtggcaagttagtttttgaacgcgttgagccgtggaaccagcatgatttgacagcagtggagcaccggttagctgcgttagtcactgctattgatgatgataatgaaacggcccgggccatcaagactgcttttggtcagccaccagtgcaagcgacagaagttcttcccttttcttcaagtcgtaagtggagtggggccgcgtttgatggtcacgcttacgttatgggcgcaccggaatttatttttaccacggtacccggcgagttacagtctcgcatcaaaacgctcgcgcaacaaggttaccgggtattagtgttagccgaagtggccgccttaacgacgcccaaaccgactcgaccgatgactttgggattaattctgattacggatgagttgcggccacacgctaagacgacgtttggtttttttgctaatcaagacgtcgccctaaaagttatttctggtgataatccggtgacggtcgccagtattgcacaacgggctgagatcaaggacgctgatcggctggttgatatgagtcaagtggggactacccccgactatgatcagctagtgacaaattatacggtgttcggtcgagtgacgccgcaacaaaaagagcaactaattaaagcctatcagcgcaacggccataccgtagcgatgactggtgacggcgttaatgatttgttggcgctgaaacaggcggattgtagtatcgcgatggcgagtgggagtgaagccacgaagagtttggctgattttgtcttaatcgattcgaactttgatgcgatggtgcaagtgctgaacgagggtcgccgcgttatcaataatattgaacgggtcgccgcgctctacttgattaagacgatgtattcggtcgctctgacgttgatttttatcttcatgagccacagctacccgtttgagcccatccaattaacaccgatttcatcgttgatggttggtattccaacctttttcttggcgttacagcctgattatacgcgaattaccgggcgctttatgaaacaggtgatggagattgccgttcccgcggcgatctgcgtggtcggctatatcatggtcatcatggtgttaggtaataagttccagctgaatttcgaaacgaccgcgacattgagtgtgttgatgaccgggatctttagtttaaatgcgttattgattgcagcccggccgttgaaccggttcaaaattgggttagtcgtgttaatggcaacactgttcgtcctagtctttttgtttgccggccgaattttctcattggttaatctattagattggtcgttagctgtgatttacctaccactgatgatcagtgcgtatccggtgttcattgttctgcaaaatggcttaggaaaacgcgttctcagcaagatcaattggcgataatcgatcaaatttaggtgacggggccacgctgcaattacggcgtggccttttttggtgtaatcagattgctgtctcagcgtaagccacaccgttgttgaccagtcagattaaattaacaatccgatataagtatggttgataccagcatagcatgtaaatttataacagattttaataggcagcagcgtctaaaacggcttataatgaagttcagtagattaccggaatgggggcggtattgtgtggcttgatgaacaacggttaattcaacggttagtgccgcgcttgttgcgttttcggcaaactaacttctatcggattattcaacggaccttgatgttgacgttcccattcattttgattgggacgttcagtcaaatcattcaactgaccgtgttgacgaaaacggggtttattgccagtatctttcacctgtcaaaatgggtcccatactatcgttacttacactatccgtttgatagtttaacaaccttgacgctcaacggtgtggccgtagtagcagcatttggtgcggcaaaataccatgccaaactcaatcagcgcgatgaccaactagcgggattgaccgccgcgattgcgctattgatcgtggcttatcagtatacgaatcaaaaccaaattggtgtttttaatactttattgatcgggactaacggtctaacgggcgcattgattgtgggtggcttgaccggcctgtttttcaaatggttcagcaagccggttccggcacaaagtagtccgcatatggccgatatcttgacacggactttcagttcactacttccaatggccttaatactagtattggccgtgctagtgagcctcgctttgaactggctgatgattattacgtactctgctgaaagttggtcggcatttcaaaagtacgcaacgactagtcacagtctgtggctgacctttggcatggcagttgtgacgctgttgttagaaattcttggactagctggtccgtaccaagaacgcttggtgaccaacagtgcgacaatgacggccaatttgaattatgcactcacacatcactcggcgtatcacgtgccgtatccgtatacggccaacacgttgtatcacgcatttgggacgtttggcggaacggggatgttgctggccttagtgattgccatttatatcggtagcaacaatcataactaccacgtagtcgcgcggtggagtctattacctgcgctctttaatagtaatggaccgctactgacaggcttaccagttctatataatccaatctatctaataccatttgtgcttgtgcctgtcgtaaatatgggactggcggcgctggcaattgggtttcattggattccacccgtggtttatccggttcccgtgggtacgccgggaccgttgattgcctttatcggcactaacggtaacgtggtggcacttttacttggtatcgttgatttggcactatcagtggtgatctatttgccgttcatgcggttggcggaaaccattgtgcaggcggcgcaagcacaggtggggggtgctaagcatgtataatcgacctaattggcagcgacggcggcgaagtctgttagtgcttgtattaggcttactatttctgggctttttgattcagccctcataccagtggacgaaaaccaacgtggctgcgatggcaggacgccatgattcgcagatgtcaccaattattatgattcccggcagtagtgcgacccagaatcggtttgacaccttagtcaagcaacttaataaggctgatcatcgtcggcatagtttaattaagctgaccgtgatgacggatgatacgattaaaatgacggggtcgttgcgtgcccgtgataacgagccaatcatcgtcgttggctttcaaaataatcgtgacggctatgataatattaagcatcaggcccgttggttctcactagcctttaagaagttggctgccaagtatcaattcaataatttcaaagcaattggtcactcgaatggtggtttgatttatacgtactactttgaacactattttaatcgcgacgatattaaggtcaaacgaattatgaccattggctcaccttacaatttctcagaagctaatttgaatcataagacacaaatgttagctgactttattaagtaccgcgatcgattgcctaagtcggcgacgatgtattcggtcgcaggtaccgaaaactatgattcagatggtcttgttccagcgcgaagtgtcgaagctggtaagtatatttatcaagggcaagtcaagcattttacagagattacggttactggtacggatgcccagcactccgatttacctcaaaatgcgcaaattgtgacgttgatcagaacttacatgttggataagccgaaacagactcgtaagggcttagtatcagttggcaccacagaatgaatggtaacaaggtctaaccgctgcggattggtcagtaatcaatggcccacaacgatagcatttgtgaggaaatttagggtgttattaagaattgtggtaaaatttggtcatggaggtggccgaaatgtccacacaatcaccagtacatcgcaatcgggtcctgactttaattcggtcttattatccgaatctaagtgtgacggaccgcaagattgccgattatattattgccgacccaattaaaacggcagctcagtcgatttcagacttggccgcagcggttggcgtttcaacggccacagtttcacggtttgtcaaacggattagttttagtagtttccgggacttctcacgtgaactaacggcggccgaaccgattgaacaaactaatgctgaagcttttcaagatgtcgaaaaacaaacgacttttaaaggaattgcggaatcaacattcaatagtattcgtagttcgctagatcagacaagtcaggtaatgacggaagcggacctcaagcgggcagtggaattgttgctgaatgctcgctcgattggtttttatggtctcggcggctccgcagtcgctgccctagatggttatcataagtttgtgcgcaccggtattccgtgcgctcataatagtgactatgatatgcaactgatgcaggcagctcagatgaacgctaatgacgtggcagtggtgatctcacatactgggcgtaatcagcaaacactacaagtattggctaccctgaattcacaaaacgtgccaataatcgcgttgactagctttggtaattcccccctagccaaggacagtactgttgcctttatttcagttgcagaagaaattaattatcgttcggaaggactaacttctttgattgctcagatgagcattatcgatagtctcttcttgatgactgctgtccatggcaatatcgaaatggcagaaagtcttggccgggttcgcgaggccattagtcaaacgcgaacagagctttaatgctgtaggcaaaggattgatgagatgacaaagcggcaacattatcgaccagtatacgcgaaaacgcggtggcgttaccgaattggctggttattagttctattagtgattatgggcagtgtttggggcggcttggtctggctacgttggcgcagtaacgctgtcgtgagtggcttcaatgtgcgtggagttgccgtgtcacaaaatgacggttatttagactttgcgaccttgcaaaatgatggcctcaagtttgtctatctacatgccactcaaggggctagttatacggatgataacttcgcaagtaattatgagcgaatcgttggtacgagtttgggcgttggcgtgattcacacgtttagtttttcatcgactgctgcggcccaagcggcctatttcgagaaaacggtcggggatagcgtcggcaatttaccaattgcgattcaagtgcaatactacggtgactacacggaccagacgattgcggtccgaaaaagtcgtgctaagcttaaggcattagtgaccacgttgaaccaggattataatcgctcctgcgtcgtatggtcaacgcccgcagttgccaagcagatcgttaagcccgcactaaaagacactgacttatggctggacacggcgaagacccaccaacagggacgacgagtgatgtttatgcattattccgatcgcgccgtttaccgccagaacgggattcgtcaagagttcgctggaattctattcaacggtagtgtgacagcgtacaataaagttgtggcgcagggcttaaattaaggcctaatccttgaataatttatttcgcaaatcaaattaacagtttattagctgctaggctgactaaaaataagtcgcaagttcaagactcttcttgaacttgcgacttattttgatggcgacctattaaaatccttaggacgtcactagcgtcattaggtatttggcgataagatgacataactgcgatcatcggcttcgtcaaagagggttacaggtcgttgctcattagcccgcacctcaaggtgaaatccatattgatcaagtaagacgagcgcactcgatgagatggattcgacggtggctggtaccgagcgcccgtcgatgcgaatcatcatgttgggatcaatctccaacgtgtggtcccggtgatgcgcctcatcacgataggtccaagttcccgcgtagaaaaccgctaagtcaccgtcagcgatcgtactagggtgccgtttgtggagtagtgtactagaaagtcctgcaagtaatgataaaccaaataatattgcgccacgccgcttcactggatcaaccttctttctgaataaatctatagttaaaatataccactaaaacggcgttaacgtcacgtaataagtggattcttattaaagcctttatgtcactgttacctgcgggtaatgaacgtaatatttgatcaatttcggaagggcggtaactaatttttttgaattaatttgtgttctgattggaaattactgggtgagtgtgttaatctatataatgtgattggcatttatgtgaagttttaaagtatcatttaattgtgttaccgtaaattctttataggtgttaataacatgtgttagttactttttatttttatatcctaggaggatttagttcatgaaaaatggtactgtaaaatggttcaatgctgataagggttatggctttattactggtgaagatggcaacgatgtattcgttcacttctcagctatccaaactgacggtttcaagaccttagaagaaggccaaaaagttacctttgatgaagaatcaagcgatcgtggcccacaagctgctaacgttgttcctcaataagcttagcttttaaaagggctgcccgtgtggcggctctttttttatgcgcaaaatagcgggtgacttttgacccttatggcccaacttaacggcgaaaactggtaaaatagaattataaactaaacgcacgagtaagcgccaccaatcacgactggttgactagcgccgttgagaggagtcaaatcgatgttaaaattaggaattatcggaacgaattggattacgcaacaatttattgatgctgccgctgcctctggtgaatggcaattgacgagtgtttattcccgccatgctgagaccgcgcaggcttttgccgccaagaatcatgccgatgagacttttacggatttagatgcatttttcagtcggggtagttttgatacggtctacattgcgtcaccaaacagtctgcattttgcccaggctaaacaagcaatcgcctatggtaagcacgtcatcgtcgagaagccagccgtggcgaaccaacaagaatttgaacagttagatgccgttttaaaggctcaccctgatgtcctattatttgaagcagcacgccagattcacgaagttaatttccaacgcgtcaaggatcagattaaaaagttatccttagttcagggtgcgacgttgacttacatgaaatactcgtcacggtatgacgccgtcttggctggtgaagaaccgaatatcttctcgttgaactttgccggtggggcgcttcaggatttaggcgtgtacctggcctacgatgcggtcggctggttcggcatgccggaagaggtggcttactacccaaccttgattcgaacgggcgttgacggtaagggtgtggctattttacgctacgctgactttacggtgaccttgaacgttggtaagactagtaattcgttcttgccatctgaaatcaacggtctgcgcgacgctattgtgatggacaatcctgctgaacttggacaaatcacttatcaagataaggatggtcaggagcatgcgattggggcgcaacccgataccaatccaatgctggccgaggcgcgcgacttcgcaaccgttatcaatgacccaagtaatcaccagacggaatacttagcttggcggcaacttagtcgaaatgttaataaactattatttaatttgcggcagtcagggcacctatattttacgggtgaagcccctgataccgataaatagaaatgaggcactatgttagacgtatttaaaactaaatttgcggcggcggggttcaccgagttgtcgccgattcaaacggcagtggccgagccacttgcagctggtcaatcggtgttaggactcgcaccaacggggtctggtaagaccctagcgtttacgtggccaatgctcgaagcgttgcgggtcggagaaggcacgcaggcactgatcctagcgccatcacaagaactcgcgatgcaaacaaccaacgtggtgcgcgagtggggccaattgatcgatgccaaagtcctcgcgattaccgggggggctaatgttaagcggcagatggaaaagctcaaaaagcatcctgaagtaattgttgggacgccggggcggattactaacctgattgcggatgggaagatcaagcttgggcatctgaagatgatgatcgtcgacgaagccgatgaattactgacagatgaaaccttggatcagattcgtgaaattctcgacgctacatttgctgaaacgttacaattaggcttcttctcagcaaccgaaactaaaattttagatgagttgccacgctggtttggtcagcatgttgaaaaaattgatgtgcgggccattgatcagacccagggggtggttcggcaccggacgatgcaagtgggtaatcggcaccgggtggacttactgaaacggattagtcgtgttgaccatatgcgggccctcgttttcttcaataagatgcaggaactccaacatgtcgccttagaattacgacaccagcacgtgagttacgttgccttgaccagtaatcaacggcaggttgaacgtgaaaaagcgttgcggttattccggcaaggcaaggtcgggctgttgttgaccactgatttggcggctcggggtctagacgtgcccgaattgccagctgtgatcaactatcagttgcctaaagacgtcacgacttatattcaccggagtggtcggacaggccgcatgggtgctgatggactagtcttgacgttcggtgacgaccatgatgtccgcgactttaagaagctgatggcgacgactgactatgaaatcaagccgggttacttggtcgattatcatattgttgatacgaaaccagataaagttgttccaccgttaacgttcgaccatccagaaacggctggcaacgcggctaacggtcggcaccgggtcgtgagtgctggtcacccagatgaggttaagcgagtggagacgagccggaagcggcccgctgcggcaacacctaaaaagaagaaaggtcacaataagcattctaagaaaaaagggatgcgcaagaaaaatcgtgatcgctttagcaatcagtaattgccaaaatgcacaatccgtgagatgatattttacggattgttaatggcctcatagcacaactggatagggcacctgcctcctaagcggttgatcccggttcgagtccgggtggggtcagttgaatattagaaagcaccgtttcagggcagcgttttagtgacgttaccttgaaacggtgctttgggtttaagtagccacaaatgatatgaaatcgaaatgaatactgtattagtctaaacgcccgctaccagtccaaatgactagtagcgggcgttgcgattaacgaatgacgatgacgttgcaaggggcgtgatccacgacgtagctggtcgttgaaccaacggctacgcgatggggcgagttggtaccagtggcgccgagcacgatcaagtcaatttcgggatgttgcttggcatagtcctcaatggtgtgttttggaatcccgtagctgatttcagtttttaaattcggtgcggacgtggtggcgacgaattgttgtcgctgccgcatggcatcctttgcgtgagcggcttccgcgtctagtaattcagatagaaccgggtcgagtgcgggggtgtggtaggcgctgtcatccaccacgtagagcgcagtcaggtttgcttggtgccgctgggcaatgttgaccgcttcagtaaaagcggcttgtgcagcatcggaactgtcaacaggtactaaaatatttgtgtaacggcttggcattataaccacctccagttatctttacgataattataatggattagtgttgggcaataaaattaaacgcacctagtgggcaaggtcgatgaactagcgtatattatagacagtaaatttcttttgggggttaggtatgttaaagcatgtacagaacggcctattgacctttgaacgggtcgttgagcggcaacgttattggcgcgccttacgtgatacgttgacgctgctttttccattcgcattagttggggcgtacgttagttttatgaaccaggcaatctttcagcgcaatggttttttgaatcatatttattatctcagtcactggctgccggggtttaaacatttggcaacttacacgacgatgcttaatctgagtatcaacggcatccttgccgtgattgcggctttttcagccgctaattttgtcgcgcggagtgcccagcgtgataatctgttagcgggattgacggcggcaattagttttatcatgcttaatatcaattataatttttttagtacccagggtcagcctgctggcagtcggtttttagaagataatttgggaactcagggcatcttcctcgcactattggtgggcctgttgactggttggttgttcagtcatttgacacggtatccacacatccaccaggagatcgagacccagacccacttgctagcgcgggcacacgcgaactggttaccgatagtcgctgctttgctggtgttcagtgccatcgggtatggtattagttttgtcagtaaagggggattaaacggcctgttttacgcggtcttcaccttaccattcagtaatccgggggcgtcgctactagcgataattggcgtggcatcactcagcaatttatactggttaattgggattatcggtccggttgactttagtggtaacagtactacgagtacggttcaaaatttggaatatgcgttgcaacacggttcggcgtggggcgcgccaaatccagtaacgctccatacgttatttgatgcgtttgcgaacgtaggtggtcccggaatgacgttagcgttattgattgcaattttgtggcgttcacgtaaccgtaattatcgaacggtggccaagaccagtgccttgccagtactgtttaatatcaaccaaccgttgctcgtcggcttaccgattgcttatagtccgattttagcgattccgtttttgttagcgccactggctagtatggtcatcacgtggtgcgcgttgaagcttcaatggatgccgccggtcgtttatccggttggtagaacgatgccgggcttcttgaccggttggctgggaactggtggcgactggcgggctttcatcgttagtctgatcaatatagcggtggccacagcaatctacttgccatttgtcttactggcaaaccaggttgagggggaggcgaaggcggatgcttaaacgatattggtggcggtggctcctcggaatcggtttgttaatcgggatttgttggccggcctacacgtggagtcaagcgaatatcaagacgctgaaaaacactggtcggacgcggatggcaccagttattatggtccccggatcgagtgcgtcacaaaaccggtttgatagtttgattaccgagttggggaaggaaacgccgaaaaaacacagtgtattgaagctgacagttcagacggatgggacaattaagtatagtggttcgattgctgctaatgataatgagccgttcatcgtgattggcttcgcgaataatcgtgatggtaaagctaatattgataagcaagctgtctggttgaatacagcattcaaggcgctggtcaaaacgtatcactttaatcacttctatgcgctaggtcattccaatggtggcctcatttggaccctctttttagagcgctatctaaaggaaagcccgaaggttcatattgaccggttaatgacgattgcctcgccgtacaatatggaatcgacaagtacgaccgccaagacgagcatgttcaaggaactttaccgttatcggactggtttgccggaatcgttaaccgtttactcgattgcggggacggaaaactataccagtgatgggacggtgccgtataacagcgttaactacggtaagtacatctttcaagatcaggtcaagcattttacggagattactgtaacgggggcgaatacggcgcactccgatctaccacagaataagcaaatcgtcagcctgattcgacagtatttattggctgaaacgatgcctgacaaggttcgtcaaaaaaacgcacaacgggtacaaaattagttacgttgtgtggcagtgctactgctgttaagacaacactggtgaacgatctggttaagaaagttatacatgcagtgaatagaacaacaaaaacgattagcgtctcgtaaccgggacgctaatcgttttttagttagatttgcaataaattaatgatgatgcctggcgttgtgtgagcgggctgaccgtttcgaatagtggtgcttcgacggcttcgcccggtgcttgactcgcattgtgacacgggttccccgaactcgcaaggcttgtgcattggttgccggcagagtcagtaaaccgccacagacggccaggatgacgagcactggtaatcctcggtggatcgacatgatagaacgcccccttaactaaaatccttatttagtgtataagtaattcgagtcagcgtcaacctaaggtccgttactgactttacaaaacgttaacggcatattaacggattattcacaaaaagccggcaaatttgattgtattttgccaagttttcctttatggtgggagtaatatataaaagggagtttggctaaatgaatattgaaatcttaaactcagcaatccaagacttacatttccaaatcgtttatgatcgttctgaagacgatgacaatcctggtcagggtcaattcagctatacgaccgccaatccagatgttaagaagacgtttggcgatgacgttgtgcagacccaattacaagtgacctataaagaagaaatgttcgacttatccgcgaccgtttttgcgattgtacgcctaagtggtgagatggtgggaattattgaacgtcaatctgacaacaaatcaattgaagacgacgaacaagaaatgttgaacaatttgaatggtgccatcattccagcgttgtctgccaaagtccgggcctatgcagcattattgtcaactgaagctagcaactttgccatcatgccagctgactttgatgatagccagcccaatgatgctgaataagcgtaatccaagagcttgtcaaactggcaagctttttttgatggcttaaggaatgagttctagcgttgtgtaaccgttaacaaaggtgctataataatgatggtcagagttgactaggcaactgcggttgcaatgacgaggtcagaaggtctgattggtgacttcagcaattattactttgatccaggcttatcggaatggttcaaagcgggggtgaccgcgagtcggtcagcacacataggggcagtgaatattgacacatagtttgagccaagctggtaagtattgtggtggccaagttacgctgtaatttggccgctatttttatcttgttttcagccgaacactgcgacaaaaaatgaaaactgtcgtgatgaaatcactgtaaattgtcacatgaaagcgtatactgacggtgagaggggtgagcgttatgtttaaaccaatggcatctgtttttacgaaccatcaaattgcgggtcattatcgggccattgagcgggcgcaaaagtgcgtggtcccatttcattttgagattcagggacaggagtatccaaagccaaaaccagaacgtaactggttacggcgcttatcggggacgtcgagcgaaaagtacgcaatggtcgaactgaccccgacaaaggtcgttttgtggtcaccagaaggacgcaatctgggtgaaatgccattgagtgcggtgcggcgaattcagatcggtgcgattcggtgtcacgtaacggaaggactcgacccacgccacgcatttcgggcgacgatctttgtgctgactgatagcggtaattattattttgctaattctgatatggaagttttaccggcgatttgtaagttcgcccatgaacatcaagtgccggtagaagacccactgcggttgattccgcttttgaaggtcggctggcgggtcgcggccgtgacgttacatgaaacctatgcgcaactggttgcgcacacgggttatccggctgataaggtttaacttaattttatgattaataataatgaaaaacggactgtcgataatgacggatatactcctctttgggtagacaagcaaataatcaaagcttgcctacctaaggaggagtttttctatgggcagaaaaggttctcgctatacgattaaagagaagttgttttacattggtctagttactcagggaatggctcctaatgccgttca

SEQ ID NO: 6 - DNA, 190422 bp, synthetic construct
  source 1..190422: mol_type = other DNA; note = Lactobacillus plantarum PDA6 - Contig 6
ttcgccaacaactggcatcagacctatcccaaattaatcaaagatctgcttaaaatgccgaatttactcactttcatggactttccaccagctatccggcaatcactatactccactaacctgattgagaactttaataagcatctcaagcgcaccacccatcacaaagaacaatttccaacggaagattcactggatcgcttcctggtttctcagtttaatgtttataacgagaagtctctgaagcggatccaccgagggttcaaaggactccaggacaccttggaagcatcatttatttaagttagatacatattatatgtacgaaggcatttcatttacacaagattcttgacactcccgtatcaaactgtagtgattatcggttagggctgtttgaattatgctatgcagatgagcgtttattcaatttgaatcaatttcaaaatttaatatttttaaaattaaaacacaaaaaatgatacagagaataggcttgatgtttgtcaatgtcgcaattaaagcgttttgataatcattatcgtccttattgacttcgactctaaaaaaatcaaaacatttactaactcctaggcccgtcagcaaagcaaaagtaacaccatgaattagaaaaatcaattcatggttctggcctaacttaatgctcaaaataataaaagagaatgcagccattgcaccacaagctatattattatctaaagatttgatcacatttcttgagaactggacagcaattattgtgttggcaaaaacttgtaatagctgaactaatacagtcagctgatttatcaaaacagcattacttgcaacaaagtgttctaagtgaaagataacgacaaaaaatccattgtcagtcattaaggcttgtaagatagtttcaagaaaaccattaacaacaattattggaaaagcagctattaatgcgtcttgcaaataattaaaccattttaaagtactgattctgtaaagccaatcaattatggactgaatattatatttcttcattgattgtttcaccatttaaatcatacaaaagtttcattttcccaagttagctcaatgtagcatatcactccatcaataccttacttttttattgactagaaatttctcaataccctttcaatagtatccactaaaagagtcaggcgcagctaaatctcaacaaaaaaacaccacatattatttaacttatacgtaataatactagttctgtcgacaatatatttcatactttaatagaatttattataaaatatcgaaatggaatattacacgattggctaccgcaaaatccctgaaaatggcacttattcaatacaagttagtttcttatctttgtttaattcaaaaataaacttgcaaaccagactcctcttaaagatacacgttaagattagatatacatgttgtttttaaatttctaagattttagtaaagtgcaaaaagatttagtttttaaaatttagacagtcataacgtgtcgtcacgttatttcgcccgcgcaattcgaatttgcacatggttacccatgcgctgaataatttgataatagttatgctcgtcaacataaccaatttcaccctgattaccggtgtgaccgcttgacaattcacgtgcaattgcttaaacagcactggaacgattcaaataagcaggccagttggtgccccttcactgtggtcgtaatccgccgtgcgactaggttattttgcaaattactatgattagaagatttaattctaactgactgcgatcgtctcaactgatttacgctttgaccacatactgataatcctaatacacccatcaatagattaaaaaacactaataacagggcgtaactttaaaaacactaaagtcatgccctgttattaattggccttatataacgatgcgacttatcacgccactctttttaatttgtttgttaccacgattattaattatcctgtttatttaactgcttcaaccaagtcgccgttgcaagtaggcccacaactgcttcaaaatctgagcgagtatcgccaacgtacaagagttccgcggcgtctaacgacttagtgcgcatcaattgtcgcagattgtcagctttattaggttgacaatcagaaccatacaaccgcgtggagaaataggacgtcaggccagtcacgtccaaggaaatttgacaactcttagccgccttacccgtaatcagagctagcgccaccccttgctgctgcaacagttctaaaagtgtgacgattcccggatacggtgctgacacccgtaaatgtgcgcgagcgtattcttgataaaaggcggccaaagcgaccggccaccgttgaccagccactgctttgaccatcccaacctcatttagcccaaacgtctggacgatagcttgcttggtcagttcgtgctcaacgtacggtgcaacgctacgacgaaagacgtcaatcaccattggaatcgtcggcgcgagcgtgccgtcaaagtcaaaggcgatcatcttaagcatgcggttcaccttgattaatctgccgaatcacacgacaaggattgcctaccgccaacgaattagctggaatgtctttgacgaccacactaccggcaccaatcacggatccccgaccaattgtcacgccgggaataataatcacgccaccgccaatccaacagccatcctcaattgtgactggccgcgctaacgtctggcaaaaatactgatcactatctggctgccagtccgcacgtaaacgttcatgcagttcgaccggatgggtagccgtataaatttgaacatttgaggcaatcaagacattattgccaatggtaatccgattacagtcgatcaaggtacagttcatattgattgaaacattctgaccaatcgaaatattacacccgtagtcacaaataaatgggctccccaccgaaacattcgatccaatcttggcaaacatagcctgcaatatcgtacgtttctcacttttttggtcataggcgagctggttatactggcttaaaagttgccgtgtacgccgttttagctctaaaaatactggtgcgtgtgcatcataggtctgaccgctcaaactccgctgtcgttcatccatcattaagcacccctttcacttccaagcttaaaaaacgaatcgttactattcaagtcacgattcgtttctttagttatagtcgttttgctaaggtctcaatcacatagaccacggggacctgggtcgttatattataattaccattaattctctggtgagccaattgatatgaaaaattccaatcggaaagcttcgctagcgtggattgggactggttagtaatgcttaagactgcgcaccggcgttgttgaaaatgctgaacaagtgcaattagttctggggtttcgccactctcagataacgcaaaaacgaccgtatcgtgaatctcaaaagtattcactggataattactatcctcaagtccaaacgcaaccttaccagcgttggtaaaacagcgcgcggcatagcgggccaaacttcctgaggaaccaatgccgacaaaaataaccagcgtggctcgacgcaaatacgtgagcgctggcatcaacttacgttcatacgcgctagaattagtttttgcaaaaaagtgtgctagctcactgacgtcgctcttgggctcgtaggtggacaactgttgttgttcacttttaagagcccgtttaaaatcacgataaccttcgaacccatttttaagacaaaaacgcaaaatcgtcgaggtcgacacgtgcaactcgtgagctaactcacgaatgctcatgtagccgaccctatccatattattaataacgtacctgtaaatttccacatcagtttcattatatttttcgagctgctcataactaaacatccgccactaccccccactccaataatccgttgcttggtcaccataatgacctggtttgttcgaccctcattagtcatacaatcgattggacgcgcaactactatcaatagcctactataatcagccactctgatcgcgctagcaaacgaccaacaccgttaccagtaatcagtctttatctatttaagcgcgaataccccgtcattacaagttggtagcaaccaaaaaactaggctaatcactgacaaacgtcagctgactaccccagtttctttagcgtcaattttaaaaatgcgaactcgccagtgcctgtccatcagactgccccactttaatgtgtgggccataaaaaatcaatcagtaaccggtcgacctgcgcattttcatgtaactggctgtgttgcgcatgtttcccagtaatcttaacctcgcgataagaacgcgcacgcgccgcaactaagtaccgtaaagagcgtgatgaagcgttactgacggacccatccgaatgcgtcccatcgcccttatcaccataaatattaaggacccgtacttgctgacgtggataaacccgccgtaatcctaataactggcggtaggccggtcgcaatttattcggtcgtcccgcagcgttcaacgtcatctggttagggctgtcgtccatgcctaaaataccattgaaatgtccagcaattgcgacttgttgcctgagctgcggcaaccgctcattttgcgcattcgccaatagataataggtaatcgccatattacccatggaatgaccaaccatgttaaacgacgtgatgccataagttcgttggagcgccaccaccacattttttgcccagcggcccacggttggataatctgaagaccggttattagcaaagttcacttcgacaattggtcgataatcacctgatctaaagtggcctttcaaagtcaccgtcccgtttttagcaaccatcgcgcgtacaatagtttttgttttgccggctttaacgatagcatctgccatgtgcgtctcagcatggtaactactgccccacccatggaaaaacagtgttggaatgtagcgatgcctctgagtcgtaaccggtttagtcaccccggtcgtctctgcacgaccacaaccaactaataataacagcaggcctgctatcagcccccataatcgtattcttttcaataactttcccctgaattctatttaataatctattcactgttagttcgtcatttaaatttgtgctaccccgcatcggcgtgcatgtcgtctgagcgttaacgcttattttagcattcaattaaggctcatgacaggaattacaaccaattaggccgatcacccgccgtaccaggtttatcaacccctaaactgacacgctgataattttcaggatgcaccattaatttaaagactaaatcggcaacactcgctcgcgatacctcagttcctttgaaaggttctgcgccgattgtcagttcataatcaatttcggcagcatccgttagccaggctggtcggatctccgtataaaccagtttggaagcactaagcaacctcgctgcttctcgaaaaccgggtaggaaatcggcaatggcttgttcgttccacgcgccaaattttcctggcacctcatgatgggcgccgagtgcgctaatgaagatcaaccgttgccgctgagttcgggccattgcggccaaaatgctcttcgtctgggctgctagatcagtcccaccaacattggaatagactatgtccaccggtgccattgctgtggcaagttcatccgtatcaagcacgttgccatcaatcagcgtgacccgtggttgctcccgatactgggctaaacgttccgctcgacgtaggaacaataccagttcatcgtcagtttctgctaataaccgttgcgtcagcttcctggcaatcccaccattagcaccaataatcattattttagtcatttctattcacctttcttagatattcgtggcatcacttggaccgtcgcctgccgcggtccacttgctagcatcggcattaaatacggactaccggcatatttttgtcgataagcttggtcaatctggttatttaactgttcatcacaaatgggcacaaaattcaccagatgattgctctcggccaagtgaatccggccagccctttgggttacggccgatcgataccagcgtgagcgcggaccgttccaagcacggataaatagttgctgccctaccacgaccgaccaaatccaggtcggtgtcccgtatgtctgcccatcactataaaatggggagacttgaaaatcatccgccgtgctaaaagcggctaactgtgctctggaccactgcatcgtggttacagtggttgacactacgggctgattactttttttcatcgttaacattcctccattctggcaaaatagtggtgcttaattcagagcacttcggttaaatggtgccctgccttgatgcttgacacgttattctctgaataaccaactattctgcactaacctcaagtttcatcttaaagcttgacagcaaccatgtcgaatgcttatatggtatttaaaattatacttaattgtaatagaaagaagtgctttagatggaattacgagttctacgttattttcaagcagtggtcgccgagttaaatatcagtcgggctgctgaacgcttacacgtctcgcagccaacaatttcacgacaattaaaggatttagaggatgagctgggcgtgaccctatttgaacgcaatggccgtcatatcagtctcacgagtagtggtgaatactttgccacgcaggcgaaccaaatcatcgccttagccgataagacgcttgccaacattaatacagccaaagaaatcagtggcacgattgaattagggagtgccgagatgcgcagttttttgacgattgctcagtcgattaagaaactacaacaacagtatccgaaaatcaggatcaatgtgacgagtagtaatgcgaatcagattcgaaccaacctcaaaaccgggaactttgactttggaatcgtcacggaaccaactgacaaacacgacttaaactttatccatctgcccggcgaaagtcgctggggattactggttccgcggcattcgccgctagctgaccatgattacattagcttagctgatcttgaaggccaaaagatcattgtttctgcacaacacggtacgatcaatcaacttcaggattggtatggtgaaagcacgcccaaattcaccatcgtcgccacttataatttactctataatgcctcgttactagtttctgcgggcgtcgggtacgcgttagggattgatggcatcatcaatacgaaccaatccgatttgattttcatcccactaacacctcgaataaccgcccgcactagcctagtctggactaagggacaacgcttgtcggaagccgccaaaacctttttaacgcaactggcgacagacctgcagcaacaaatacctactgactaacagtatcgactcagctctcaccaatcaccacaacacactacccaattgatggctgctgaagacgacgcgcatctaattcacgctaattcgaactaaataattgaattgagcacaactaaaatgctaagctaggttattcagtttcagggaggaattatttaaaatgaaagcagtcattattaatcagtacggtgggcccgaagaactccagatggccactatcgaacgtcccagcattgatcaggacgaggtcttagtcgccgttcaggcaacgagtatcaaccccatcgattggaaagctcgtcaagggttgcttaaaggcatgtttgactggaaaatgccagttgtccttggttgggacgtcgctgggaccattgttgaggctggcgcggccgtgaccaactttaaggttggtgatgaagtctttgcccgcccagacatttatgcggatggccggcgcgggacctacgctgaatatgccgcagtcaaagaagacaagttagcactaaaaccagccagtctttcttttgaacaagccgccgctttgccgttagcggggctaactgcttaccaagtcattcatgaccaattaaagattcaagctggcgagaaagtcttaattcaagccggtgctggcggggttggtttaaatgccatccagattgctaagtacctcggtgccgaggttgcgactactgcgagcgccaatcaccatacgctgttgaagcaaatcggcgctgaccacgtcattgattaccacacgacggctattcaagatgtccttacagactacgatgccgtctttgataccattgacgccattgatgagggcttggcaatcttaaagccaactggccgactcgtgacgattgatgggcaaccaacggcggctcaaaaatcccaaggtcccactgtctccagctggtggttacaacccaacggccgggagttagccatcttggggcagctcgccgttgaaggacacttacaagtcatcatcgaccaagtctttccgtttagtacggctggtctccaagccgcccaccggtatagcgaaaacagtcacagtgctggtaagctcatcatcaacgtcggcactgaagcttaatacggtatcggctccagcctcagccaattgaccaatcgccacattgactgtcaaacgacgcattaaagccttaaaagggcgcttcaagaatccactacgaattcctgaagcgcccttttttaagccccatcgcccgaataacgctagttgtcacccctgcattttcagccgcttgtcccatctgtgcctcggcgtgatacctattaccgccaccgtggaaaaataacgtaggcgtatttgactgtacatacttcatgcggtgttgttgtgccatacatccactgagccccagtactagcaaaaccactagcaaccccgacagccatttcacttttacttgcatgtcctgatccccacctttgattggaacctattatacagggttcctgtcagcgtaagtcaagctttttcaacaattatgggatgacgaacagtgctttcatcatttggatggcataaaaacagacttgggaaatgatcccaagtctgtgatttaatgcgcctgtgctgctttacgttaggtcaatgcttatcactactattcgaccagttaccacgagctgtaattcgtggtgtttgattgcctcgctgatattcttgtttgacggctagttgccccaccaaatttaaatagttgaacggttgattaaaattcggctgaaagaacatatccacgtaagccaaatcatcaatcgtattctgattttgaatcattactgagatcgtgtttgcagcttgggcaatgtcgtgacgactccagaattgcgcgccgagaagctgacgattctgataattataaactagttcaatcgtgactttggccgtcgtcggcatataagctggccgccaattgccttgatagacggcgtgtcgtactggtagttctcgtctttgcgcggctagataggtcaaaccagttgtggccatcgtgtgatcaaataattgcatggctgaggtggcttgcgttcccatgtacggctgtaaatctccgaaaacattgatccccgccaacgcaccttggcgcagtgcgttagttgccaatggtgtatacgccggctgtcccgtgggattataattgaccacgcaagcatccccagccgcataaatatccgggtcagaggtttgaacataatcattgatcaagatagcaccatggcggtccatagcgacctgcccgcgtaacaattccgtattcggcataaagcccgcgcaaacgacggccagatcaacctcataatcaccctgcgcggtttcaacgatcaactgatcattcgaaccgcttgcgaatccagtcacccgttcattgaggtggatatcgacctggtgatgttgtaagagtttagttgcagcatccgccatttgggggccaagataattattcaaaatatgtgaatgcgaatgaaataacatgacttgttggtccatactagcatagctttccgctaactcggtccccatatatccggccccaacaattgcaacgcgttggttggcctgtagagattgataaagttgttccgcctgctcgtagtttttgcacagtaatactttctcatgatcgatacccataattggtggcacaataactgatgaaccagttgccataatcagcttatcataagtgtcatcaaagacttcgccagtctgcatattggcgacctgcaccgttttatggcccgtatcaattcgtaaaacattatggcgggtcttaacttgagcgcctaactgcttcaagtcagacggcgaggtgtaaaacatgtcttccaggtgttggatgacacccgttaagtacaaataaatcccactcgaaacaaacgaaacgttatcattccgctcgtaaatcgtcaccgccgtctccggatgacgtgttaaaatttcgcgtgccgctgccgtaccagcgtgggtactaccgatgatcattactttcatcttaccggatcttccattcttccagatttgccacgtaattagtaagtgggctcaacattaaccactgttcaattaattatatcgcgcaccaaatcatttgtatatgtgttgatgaaaacaaacctagttggcccctcgttcaaacagcctagctttacaaccactgattagctttcgccacacgaatcgcttctaatcgattgtgaacccccaatttgctaaaaatggcggataagtaattacgggtcgtccccgctgacaagtataaattggccgcaatcgtcttcgtgggcaaccccttctcagcttcgaccaaaactgctagttcccgttcggtcaatggattgttgtctgctgacaacatattcgtgactagctcgggcgcatagatggtgcggccggtcatcacagctcgaattgcatcaattaggtcatcactcggactatcttttaacaaatatcccgcgacattggctttaactgctcgttcaaaataacggcgttgcgcaaaagtcgtcaaaactattactttcgtggctagctgcgaactgtccaatagatcagcaacatccaagccggttatccctggcatttcgatatccagaattgcgacatccggttgcagttcttgcaactcctgccaggcgtttatgccgtctactgcgctacccaccacgtgtagatcatcttctaattccagtaattgggtcaaggcagaattcaacatgctttggtcttctgctaagtataaagttatcatgctgactcactactcctttggtaaagttaagatcaactgggtgccgcgccgactactcgtgatggcaaaggtgccctgtttagcttgcaagcgggttcgcatcccggcaatcccgttggcgccctgacgaatcaaggttccacctttaccgtcatctttcagcttaatctgataaatttttgccgtctcgacaaaatcaatccgcacctcgtgcgcgtgtgcgtggcgcatcacattggtcatggcttcaactaacaccgccgcaaaacaactttggaccgttgtcggccacttggttgcctgtgtctcaccagtggtcgtcgtccagacaccaaccgctgctagattacgagtttgggccaataggacttctgtgagcgattgttcatgcaaattattgacgatttcgcgaactaactgtaaattttggcgactggtttgttcgatttcgtccaattctggtgccactttctccggtgctttgacgagtaattttttagctaattccgttttgagtgtaatcattgaaaagctttgtccaagggtatcgtgcaagtcacgcgcgattcgttcacgctcgttacgttccacaattgtttttaatcggcggttagtttggttgagttggcgctgtcgttcaactgaccacgaaaaggtatacgcgagtatgggtgataacaatggaaaaactaagcccatcacgtcaccattatgccacccaaacacaccaggatattgtaaatagtctcgtatacagccaccaattaaaaaggcataataccctaaagcaaaaccataaaattctcgtttaggacgacgaccaagtaaaaagctcacttgccagccgggaaagatgatcataaaattgttagccgcaaataccgcaaacagtcccgtcacaactaactccgctggcatcgtcactgcacgccaatgtggcttctcgacaaccaagatgtacaacacaagaaaaccaccaacaagcaatagccaaagccaatcatgccaagatttaacgggtatgtaagccgcaattgtatacggcaaataggcgagccacacgtagctcgtccattcaatcgtcttcaatttatttttatgatgcgtcaacaacgccattcccccgtttaagtccccgctgaatcacccaactaacaatcactaataggccgcacacccacagcccgataccaagcaaatcgattaattttagtgtaccatgggtgccccagttgaccaacaaatcgttcacataatatgttggcagtcgtttaccaatcacctgtagccagcttggtaataggctaatgggccaccatagaccactaataatggccattggaaaggtaattaaattactagcgacactcaacgtttcggcacgattcaaaaatgagagtccaacgcccataagcaatgtcggtaattgaccaatcagagcaattccaagtatccctagccattgaaccacggttaaatcaacgtggttcacaacgaccgcaatcgcgcctaaaataacgaccgttaacgcattcattcccaaactcatcatgccaatcgaacgatagtacggtactaccccgtgtggcgttaaccgtagccaccgtaatagtccccgttcccgatcatgcattagaatctgggcaatactgaacagcgtactgatcgtcccactataaacgatcatactgcccatataagaccgattaaaaagtgcgatttgagccgttgtgccaccggtaaccattacttttgtaaataacaagtaaaaagctgctggcatcaccaaggcaaaaaactgaaacgctgcgtttcgaataatcaaacgccgtgcatcaaatctcagttgagccattaaaattttcatgctgagactcccttcgtcagatgaacaaaaatatccgtcaatgattcacgactaattgagacttgatgcaactcactgattatgggcatcatcgcttgcagcgtagcgtcaccgtcttcactactcatgcgtagttcgtcgccttgcttagtaaccgcagttactgccgttaaatttgtaaaccgatccgctggcagtctcgtttggcaacgaatctccacttgttggtattgtttttgcaacacggcaaacgagccttgaaagacaaagcgcccgtccttcagcaacataattcgatcagcgatggcttcaatctccggtaggtaatgactggtaatgataatggttttaccagcggccttcaagcgcctaatctgttgccaaaatgtctgttgcgcattggtatccatgccaacggtcggctcgtctaaaaataacaaatcgggatcacctaccagtgccaaagcaaaggtgactcgtcgtaactgtcctccagataacgccgtcaagcgttgctgggctatgtcttgtagcttcaaggtggctaataatgcttgccaatcaaattcaggcagacgttgtgccgcagctagccttaacatatcacgcaccgtcacgccttgaattgtcatatcaccctgcatcattgacccaatctttaatcgcgccgccaggctaccggccgcttgcccgaacaccttgagatggccctgctgaactcgtttgattcctaataacaaatttaacaacgtcgttttgccggccccattttcaccaatcaagccaacaatctcgcccggcatgatcgtcatattaatatcagtcaaaactgactgttgaccataactaaatgcgaccttagttgcttcaatcaacggtgtcattatccccgcctcctttaatgactatagtgtacgccaacgtaatcgggtcgagtagtcgcgtttgtcataatgatcaggtgacaaatgtcattatttcaacagtattgataagttagcataattctttagaaaataacccagacaaaaagtgagcttctggatttacatcaaaagctcatttgaatcacaattaataacgctagttaccgtgctttcaatacccaatgtgccaattgcgaaacgataatgattccaataacaccaatgatacgcaaactcaatggcagtgttcgaccataaatgagccaggcagctaacaccagtaattcaccgccaaaaattacaaatttcattccaacacatccaatccacttttcgctagtatacgagccagccaatacaatgtcgattgatctgccattcctaactgagggtggtcgctgattaactgtgatttcacttcgtttagttgttactcgcctacgtatgtatgtctttaatccgccattctccagttggaaaatgattagtccatcaaaagttcaatacattcaaaggtcattccaaccgttaaattagttttggcactgacaccggctcttatgttaaacttaatcaatcacaacgaaaataaggaggtcgaccattgttaattaagtctttcccgcctgccgagcgaactccgcaattgattagccaattaactcaactctggcgacagtccgtcgacgccagtcaccactttctaacgcccgctgaaatcacaaccattgagcacgaagtccccacagcattacgaaccgttccacaactgctcgttgcagtggatgatcaaaataccccaactggtttcatcggtattgatggttcactagtagccatgctttttatcgccccagccgctagtggcgctggtattggaaccgccttactgcaaactagtattcaggattatggtgccacaacgcttacagtgaatgaacaaaacccacgggcgcgtcaattttatgaacaccgtggtttccaagtcactaatcgccaaccaactgatgatcagggccgtccatatccactattaactatgacttacaactgtgacccattaaacgactgacttgacaaggtcgttttttttataaataatagacttgtccactatttataaaaaaggagtgctgactatcgaatattttagtctaactaaatatattgcgggtatttaccgcgaatccaaaaacagcatcaacacccaactacaggcgctgaacattcgggcgaccgaaagtgacttattactggttgtttacgatcacccggcccaaactcaaaaggacttggctgccagtctgatgctcgatcctagtttattagctcgaactgttcgtcaacttgagcaacgccaactcgtcatccggtttcgtgatcctgccgatcagcgtagtctacgaattaacttgacaccggctggtgaacaaattgctatcgccattaagaaaacattgattgactggtggcatgacttcttcactgctcatccagaagtcaacgagcaagtgtttacgaaccaattacaacaagtttacctcgccttacaagagaaaagagattgaaatcgtcattgaaaaaattcattaaacactttggagtcctcgtaattggtatcctgtgcatgtcagctggcgtcgcactctctaaattatccttattaggaacgtccccaatttcaagtattccgaatgtcattagcaatattacggcaattccaattggccagttgacaattgcttttattttcattttagttctactagaagccatcgttttgcgccggcagttctcctggcaaaacttattgcaattaattccgggtagcctgttcggttggttcatcgatgcttttgtgcggtttttccatagtcttcctaatcaaacatacatcgagcaactcggacttgtcttaatgggaacggtgctcttatcgttaggtgtctttttagaagtcaattcacacgccattatcatgcctggtgaaggacttccgaacgccatcgcactgatgcatcaactcaagtttgccaaagtcaaagtttataatgatttcattctgattggcatttcactagtcctggcactcagctttactcattctttagcgggggttcgggaaggtaccctcattgcagcctttttaactgggcgactcgtaaatttctttaccgaacatgcaaatcgatttgttgcttggatgacaccagccgctgacgcgaacaactaatttccagaattatcaaataaaaacacggtcactggctagtgatcgtgttttttggcttgtgttcacgccaattcgttagtctgccagtgcccgaattctttcagccactaatgcaggtgaacatcggctatccgttaattattctcctaattgatttactttggacccacatgctcgttattacatgttgtagtaattgtcgatcattttcatcgctaccaaacgccacttagcgctggatccccagtcgttacaggcggaccatttattgaccctaatagcaatcaaatcaagattaccttctgtggtatgctgaacagtcatcaacatctcagttgccagcagttaagtacttaagcgcatactctgcatcttcatcaaccctcaataagataactttaatcacttcatccaatttcggcagtccaactctttgtggcaagtgtcgagaatcaagctggttgaaaatcgacttgagccgcacaatctcagcagccatccgcaatataactcaatcgctagcaaccatctcagtcacgagctgtaaatcatgcgaccgtattgatgcaactggtttgatttaccgattatctgcaattaacgccccattggcaccaatcagtagtccgtcctcaaagcccggaatcattggtatcaaatctcgaagcggttcaaaactgattgattttattttgatgctgtcaaaaaacactcacttaactaaaattagctaagtgagtgtctcgtcaactaatggccacgatgttgagcacgatgttttgccaaccgctttgctcgtatcaactgagcatggtcatgtcgggcacgacgctgctgccgcttcttcattaccaagttacgctgatgttctaacttcaacatttgcattgctctagtcggtttgaatcgaacgtgatgttgacgacattgtcgtgccgcacgacgatactcgcgaaccaattgctgctgagcaaccgcactagccgtcgtccattgcagcgttgaccaccgatcttgaattaacaacctaatctggggttcactaggattctgcgtcccaaaggtcactcgggcgacttgatacccgtccgtcgaccaacgctcaaaaacaccctgataaaattgttgatcaaaaaacaccgttaatttgcatcggttaatcaaattaacccctccttaatttcactaacgaaattcggacaaccaaggaaggcaggttactgacagccgttgctgcgtctggactaccgaccagaccgtgtttttaatttcgctaataattagtatgtcagattaagtcagtttgtcaaattagcacttatgtatcaatggaataattaatgcacttagttaatccgacatgaatcatgattaaaacgtgacagtcaatcagactcctgctcgtcagcttgggctactgagcactgtcaccctgccgctcccatcggtcaaccactcgaatggctgataattatgcctccagttagcgtggtaagaatccaccgaaaattggtgcaaactcaaactgtttccggttgatccaagctggcagttgctgaattttaaaatcaagacgttttaaccatagttattgctaaataataacgagtacaacaagtaataattaagattatattaaatatcgtaatactacactattacactgtgattaatagtatactttgtttgtaaaataccttgaagtggttattattagccgcttaaggtttagggggattccaatatgaacacaccactactgaccgtcacgcaattaaatcaatacttcagtcaccagcacattttaaaagccctgaccttcaccattcaaaaggggcatatcgtcgccttagttggtgcaaatggtgccggcaaaacgacactgatgaaatcaatcttagggctcacttcctttactggtcagatttatttaaatggtcagtcaattacgccatgccatcaccaagctttaagcgctgtgggcgccctaattgaatatcccggactctacccattcttgactggccggcaacaactctcactgttcgcaaccggtgccaatcgtacagcacgcattaccaaaatcattgaagcacttagcatgcaagcatttgccgatatactaacgaaacactactcactcggtatgcggcaaaaattgggtgtagccttggctttgctcaatcagcccgcactagtcatcttagatgaacccatgaatggtcttgatccacaggccacaaaagaattacgcgatttaattttatgggcgcaagctcaaggcaccacctttttaatttcaagtcatctcctgagtgaactgcaacgggtcgccaatgacgtcttagttcttgatcacgggcaactgatcgccaatatgagcatgccagcgtttcttgcccaacagcgccccacttatgaattagtaactaatcaagatcaacgggcttatcagctattgcgttctgctggataccacctagttgcagcaacaccaattcgtgtcttaataacgcccggatttcagcttaatccattactgcaactacttttgaccaatcagattcagttacagcggattcaaccccacactgaagacttagaatcatccttattaaccatgctgaaaacggtcaaccactaaggaggtcaatctaatgttcacattgttacgacaagaaaatcgaaaattaatgcaccatcgtgtgattcaactgtttattccatttataatgatttttcaattcataattgcgatatatgccgctcactacccacagctactaacgccatatgatgcatttgtaaacaacgactacggctttattccgctactatttttggcaatcacaattggcagcacttatttaacgaatgaacggcaaaatggcacgttacgagcgctactttatcgcagttattcgcggacccaagtcttagtcagcaaatggctcacgatactcggtctgatgattggcttatctggctttagcaccctcatgagtctcggactgaagttgagcttctttcggcggttacctaattacggtacaatttggcacacttggggtctgaacatgctatcaacaggactgaccctactatttttaatgagtgtcgtcttagaacctgtttaaaatctagctaatttggtatgatagttcaaaaaaggtgattagtcatgaactacccaagcaatatttcccgccaacaatttgaactcattcgtcccgacttagaagctgcacggcgttcaacgaggcctcgaaagtatgatctttatgagttgttctgtgcagttgtctatgttttaagaactggctgtcaatggcgcgagttaccagttgattttcctcgctggcaattggtctattactattatcgcgtatggtctgaggaacagattattgatgaactatcaatcttagatcagtgtttaaaaaaattgtctttaccctacgggaaaaacagtcacgctcggctagaacatctttcataatcattgacgcacaaagcgttaaaaataccgatactgctgagcatcgcggctacgacggtggtaaacgcatatccggcatcaaacgccacctagcggttgatattaacggcttaccacaagcaattcacatcaccacggccaatgtttccgaccgtaatggagccagtgccatgttagctctaaattctgggcatttacagcaagttaaatcggttcttgtcgatggtggctacactggatcgaattttgccgctgatgtttacactaatttaaacgccaccgtccaggtggctaaacgcaatgagcttcataaattcgaagtactgccacaacgctggatcgttgaacgttctttcagttggttggataaatgtcgacgactttggaagaactgtgagcataaactcaattcaagtcgtcaaatggttatcttagcgtttctggtattactcctaagaagattttaaacaggttcttactattgggcaccctattcaccagttcaacaccagccattctgaccggcatcattgggtactttattgtgaccattttcaatcaactttgtttttatttatacgccaaagtcagctggttaaagtggaatccgctcaacatgatcaatctaggcgagcaaatccaaacaccacaactacaacaattaacccgactaaatctatccacgctggcgattggttatatcgcctatctactgttattcttaacgcttgccaactattcttttcaaacccgtaacgtttaaaagcatccagccggtcaaataagattactgaccggctggatgctttatcgattaattgttaatttcatcatattagcgtaactgtcgcacaacttgccaaaagtagcgactccagcgcggttgataaatccaagcaatcagaccaattaatgttgctgaccaaactactgctacatatgaccaactcgtctgtggtgccagcataacgtcggtaatcaatttagtcagtatgatgctcaaccctatcagcattggtacccgccaagccggtaacaaaatcgcttggtggtcacgctccgtgatttgctgggcgctcaaataccgaccaagtatcccgcccaagccccagactagacatccaattgcgatacccaacaaccagtgttgattgaggaacgccaacaaataattaccaggttgaccgaatgaccgtatcaatacaaaccaactgattggtttaacgactgcatagccgacgagcattgccattaccaggttaggcgtgaccaataacactaatgcagaagcggtcatcaaaatcagtgcaacgagcgtggtactgattacattgccgccccagacccaccaattgaattgcgcgaaataaattccgggaatattctgtaccagcaccagcagaaccattaatttcgccaaactatacgcaatgatcgtcgttaaactatagctcaaaaacgtcgcaccaaaaatagctgctcggcgaaatcctaagctctgtaaccactcattctgatgccggtaacgtggaatggcaatgagtgctatgcccactaaaatactgattccccatagaaaatcatttggttcaacattactcccaacgcgcaaattcaccaataatccccgccgatcagcatgataaacttgtaaatattgattcaagtactgctgtttcgaaggtgctactaagccatctacatcctgatactgttgccgccggtggtcgtatttaagacctgaaattagcatgtcatgattctgatctagcatttgccagtgttgattcattctgaagccagtccacgcccccagtgctataaacaaaatcagcataccaatgagaagtggcgcatgctgccaaataatcaagtgccccaattttttattcatctcacaacttcccccagttgatggtaacgacggccaacacgatagacgagcagtgccatcatagtcagcacgattccgaccaattcataccacggcgcaattgttcccatcaaaggcagtagtaggatgtccccaagtgttgagccaatactcaaactaatcaaagcactggcgataaccccattaaatagcgattgttgccgcaatgtggtgatatccgctgaccattgacgacaggccacccaagttaatcccagtagcatcagcaagcccactaatgccatgattgccgctaccccgtagtgaacatgtaaccagatactaggcaacgactgaatgtgaaaccaccgcaaccacatatttgtccgcgttaacattcccgacgcccaacgccaggtcagagtgctgatcaggattgctaaccataaccgctgattaaagctccccaccagccaagcaagcataattaggcacccactgaccatcgtcactgccacactacttcccaagagggcggccccgttacggtattgctgataaacttgggggattgcagccgtgatccagccataataaatcacttgacttacaaaaacggtgaccattaatagcagcccgagccgcagctgttgccaccaaatttgccaacgcgtaacacctaaaccagccataaactcgaagcggtgtgtgcgacgaccccataatgcaagcagcaaaccgctgacgagtcccaaaacataatacaaacggttgggttgttgggcccgcactgcctgattgggatccgtagaagtgtattcgccaggccaaaaaaactggtcaagatgttcataataaacatgcaggctaaccgccggacgaccggcaactttatagtctttcgggtgtttaacaaaatccgcagcgttgatccgttcaccacgtacactccgggcatgttccacctgccaagtatgtgtcacattaattgccattaataagctcactaacagacacgttgccgtcacaagtcgcacccaaggccgattttgttgccaccataaccgtctcaattttacagttgccattctacacaccaccccaaacagcttgccggtcgcccaatttaactcggaaaacatctgtaatggtcaacggctggacggccatcatcaatggttgagtttgttggagcgctgtctcaattgtcggcgtgtagtccgcaaagtacacttctaagacccgaccgtaaactttaatcagctgcccatgctctttcacaaccgctggtatatgcttatctgcaaaaacaagctgaaacttgcgggccgttgctcgtaaactttctaggtcgtaatcagcaactaattcatgatgttgcaaaaacagcacttggtcgcataaaccgtcaagttcatcaagattatgtgatgaaatcaagaaactgacgccgtgttcggcgacctcctcaaccatataggctacaatccgctcgcgcacgatgatatccaaaccatcaaacggctcatccaaaataatatatggcacgtgactcgctaacgctagcaagatttgaaataacatctgctgaccctttgataaccgctggtagtagcttttggttgataaatgctcggccactaataacgctgttagttgcgattggtcaaagtcatcgtaagccaacgcgtatgtcgttatgatctgtcgcaaccgttgaccaccaaaaaagtgacgttgtgtatcaatataaaataatttttgccgacagtatggttgctgcaaagtcgactgcccctcaatcactaattcgccttcgtccgccaaatagtgatcagccatcgtccgaaagagcgtcgtctttccaacgccgttccgcccgaccaacccaacgattcgacctggctgccaagtaaaagtaatcccccttaatatttcacgattatcaatccgcttacttaatgctttaacttggatactcatcccgtgactcccccttttgataagccgtggtcacccacgcctgaacttgctgcgcactgattcctaaaaattgtgcttccgttaacagtgattgtaagcgcgtctgaagatcatcaaccgcattcgaatcagttgcaatctgactcgattcactcacaaacgtcccccgaccttttacagtatacacggctcgctgatgctccaagatttgataagccttactgaccgtgttcggattaaggtgtatttctgacgccattgctcgaattgaaggcaattgatcccctggtcgtaagacttcctgaacgatctgctgcttaatctgcataactaactgttcgtaatacggtgccccattagttgcaaacggcattttatcacctcggtattgtgtactacgtgtattactacaattagtacactaacatactaatttgagtttgacaactcaacaatcatattcctggcacaaaatgattacctcaaacgtgagtgcgacatcattacagtatgccaaattactgaaaagagtcttaaatttggttgccagttcatcagtgcttgttcatcctattccgacctccgggaaccctgctcgcatgacagatgaacggccactcaacttagtgcaattggtcgccgaattcaattactgcttggaacattgaacaaacgttaatgtggtctcagttgtttggaatctcagtcataatatggtgactgagaattaatgaacgaatcacagttcgattatcaaactgacagttactgataaaattgctgtctctaaaatagcaacgaccaagccagcaaaagttggggacatccctgtcagccattcgaataccttcccaactggaaggcatttcggccaatgctcagcactgccaaagtgtgtggttcagacggcttgagactgaggattagcccaactaaggtgttaagcggtaaactcatcgcgtcgctacccggaaggctcatcggacccgaacacgtttcgtcaatatggcattaagacgtgggttgcggcttaaatcagtgtccaccacgttttaacatctacataagcaaaaaaaacgcctgaccaatcagcacctttagctggttagtcagacgtcatcatctggtgattattccaagaaatcttttaactgtttactacgtgatgggtggcgtaacttccgtagcgccttggcttcgatttggcggatccgttcacgggtcacaccgaagacttttccaacttcttccagtgtccgggtccgaccatcatcaagtccgaaccgtaagcgtaagacgttttcttcccggtccgtcaaggtatcaaggacaccttccagttgttctttcaacaattcataagccgcggcatccgctggtgaggttgcgtcttggtcttcgatgaagtcacctaagtgtgaatcgtcctcttcaccaattggcgtttccaatgaaacgggttcttgtgcgatcttcaagatttcacgaaccttttccgttggcatgtccatttcagccccaatttcttcaggagttggttcgcgccctaaatcttgtaacagttgccgttgaattcgaattaatttgttaatagtttcgaccatgtgcactggaatccgaatggtccgcgcttggtcggcaattgcccgcgtaattgcttggcgaatccaccaagtcgcgtacgttgagaacttgaatcctttacggtaatcaaacttttcaacggccttcattagccccatgttaccttcttgaatcaaatcaaggaattgcattccccgacccacgtaacgtttggcaatcgaaacgaccaaccgtaagttggcttcggctaattcttgcttggcagattcatcaccttgttcgattcggagtgctaaagcgacttcttcgtcagccgttaacaagtcgacacgaccaatttctttcaaatacatccgcacgggatcattgattttaattccagaagccgagccagcgtcactaagttccttcttagaaacttttttgacacttttgaccgctcgagcatcaggatcacctttttcatcaacaacactaatcccagcatcttcaaccttttgtaataatttatcaatgccactagcatctagtttgtaaggcgctgctaatttatctgataattcatcatattgaatgctaccagttttcttatattccttaattaatgctttaacggctttgtcgtattccgtcgttgcttttgcctttgccatgtagtagcctcctatttagtatgcatctaccagctgatcggttgcaataccgagccaaccttaagtatatcattttcacgcctagttatcagctcgttggacctgctgttgttgccgatataggtcaattaatgccaacgttaactgctgaaccaaatcacgattaccgatctgcttggctgccattaactcggccttcttactgttgatttgttctaccagcggctgttgattcatgatcacgttgactagatcagcaatctcttccttggaagattcattggcaacgtccataaattccaaactcgtgacgacaggctgtaaatctgaatccgtcataaaatccgtaaagttgcccaaatcaaattgattatgcgttttaaaataagcctccgcatacaccaagatttgttgatacgaatcatgaacaaaatgaaaaccagcaatcgccatcactcgtaaccaaacatcgtggtcattcaacaaacggtacagtaacaaccgctccgctttctctacccgacttaacgggccactgttcgtactgccatccaccgtggctgggggtggccctagcggcgcaggtgctggtggcggagctacttgcgtttcatccgagtgaccaccaccacgtcgaacggcctgctgaccgaccagtgatcgtaactgttgctttaaatcatccttatcaagatcaaactccgccactaattggtttaaatataaatcctgttcgacactagaggacagttgtgctaattgttgcaaaaccgcctgtaaataagtcaattgatcgggcgtgttttgcaagttcaaatcatgttttaaatactgcatttcaaatgcagtgggcgtttgcttaccgtcttcaaatacttggacaaacttctcctgcccctgagcacgcaaatactcgtcgggatccatcccatcaggcatttggatcacacccagattaaggcgactgttaccacctagcaatttcagagcacgatcagtcgccttttgccccggcatatcgctatcgtaacagacatataaggtgtcggtaacgcgctcaagcatgtaaatctgctcatcagttaagctcgtccccattgatgcgaccccgttctgaataccagaacgataagccgcaatcacatccataaagccttcaaacagcaccaccgacttttgttgtcgaatggggccccgtgctaagtcaaagttaaataatactgaacgcttgttgaacagcttcgtttccggactattcaaatacttaggttcattaggtgactttttgaggattcgacctgagaaagcaatcacccgaccactcgcgtctttaatcggaaacaagacccggtcaacgaagcgatcacgtaagtcacccgcttgattttcaatgaacagtcccgactgccgtagtagttggtagtcggtctggtgttctttaaaaaaatctaacaagagctgattagcaggtgcatagccgataccaaacgttttaatcgtctcatcatccagcccgcgctcgtgcaagtacttaagcgccggttcacccagttcagtattcactaaaatatgttgatacatcttagcactatccgcgtacaactttaacagatcggcttgttgctgatccttaggtgcggccggttgtgactgcgccgtatagctcgccggcaagtcaatgtgcccaaaatcggccaccttgacgactgcttccggaaaagacaagttttcgagatccataatgaagctgaacacgttgcccccacggccacagctaaaacagtgaaaaatctgcttttgctcattgaccgaaaaggatggcgtgcgctcttcgtgaaagggacacaggccaaataaattcttaccagccttcttcaactgaacgtattttccaataaaatccgcaatgttgactgctgagcggacttgctcaaccttttcctcgggaattcgattggccactttgccaccccatttctactaactaaagtctgacaaaccaaccaaatcattgccgcaatcaaaagccgcatcacgaaatttggatgcgactttgtgcgtgcaaactcttacagaatatatattaccacaagtttgacagcagtgcaataataagttgcccttattagacacatttgtcaaatttgtttgtcagcaagctaaaaaagaagctacagcgcgcttgctgtaacttcttttgattatccacagtccgtgcttatttaacgattaattgattcaagtcacccatcacgttgatcatttgggcgatcgtcaagagttgctttaagtgattatcccgcaccttttcatccttactcatcaccatcgtctgttcaaagtaatcgacgatcaatggtcgtaaggcggccagggctttgaaacggtcctccatgctcatcgctggggtaaattgcttttgcaattcaagaacagcatcgtacaagtgttgttccgcttcattttcaaataaacttggatcaacagtcaaatcaccggctgccagcttagctttcgccgtgatccgcaacagacgagtaaaggcttcaattgtgtccttaaactgcggatcatcttgatgcgcattcagcacatcggctgctttgaacatttcacggatatcctgacgactccctttgataaccgtatcgacgatatcgtagcgaatcttacggttgttaaaccattgtttgacgcgatccgttaagaaatcagcaactggtgccgtttgcttttcgaagtctaagttgtacgtagcatcatgggccactaattccttttgaatatcggcctcgagttgacgaattgggaaatcccaaccttgttcccgtacgatccgtacgattccaaacgcttgacgacgcaaagcaaacggatcattagagccactaggagtcaagccaacggcaaagaagctcgtaatggaatcaactttgtccgcaatagctaacaccgcgccgaccttggacttaggtaagtcgccatcagcgctgattggcatgtaatgctcacgaatagctttaccgactgctggatcttcacccttcaagacagcatacttgtcacccatgaccccttgtaattcagggaattcgccaaccatccctgtcactaaatcaaatttatagatttgcgctgcccggtggagttggttcttttcagtctcagtcaaaccaaaccgatcagccaaaaaatcactgataaccatgacccgctgcatcttctcatacatcgtcccgattttatcatggaagctaacctttttgagtcgttccacatattcttgaatcgagtgttgttgatcttcatgatagaagaaagctgcatcttctaagcgtgccgtcaatactttttgattacctaaagccacgttttccaagtgatccgtgttcccgtttcgaacggaaacaaagtgtggtaataagttatcctcggcatccgttacgtagaagaaccgttgatgatcacgcatcgaagtaatcaagacttcatccgggatcgttaagtatttggtatcaaaatctcccgcaaatgcagttggatattccaccaagttattaacttcttccaacaagtcttcattaactttgatttgccagtcgcgttcattcgccaaggccgcgatctgttcacgaatcgttgccttacgcttagcggcatccgcaataacttgaacactagctaagtcagcttcatagtccgcagcagtagcaatttcaacgtcatggcccaagaaacggtggccccgtgaaacacggccagccgcaacgtccagaatttgaaccggcacaacctcgtcatctaataatgacacgatccaacgaatcggccgaatatacttgaaactgtacgtcgaccacttcatcatcgttgggaaattcatcttggtgatgacatccttgattccgcccgtcaatacttcggccgccgttttaccagccgtaaaggtttgtacaaagacatacggggtacccttaacatctttaaagacgatgtcatcagttgacgccccttggcccttagaaaaaccaatcgctgcctttgtccagttgccatccgcatcctgagcaatcttcttagctggaccccgaacttcttttttcacatcagcctgcttgtcagctaagcctaacacctgaaccgttaaccggcgtggtgttgagaaggttttaacatcttcaaaatcaagccgggcatcctttaagaacttgatcattcgttctttaagttgtaacacactcggtgtaacgacgtgggccggcatttcttccaaaccaatttcaagtaaataagttttcgccattatttcgtctcctcctgtgcgtgttttaataacgggaagccacgtttttcacgttgcgccacgaattccttggcaatcgacttcgccatgtttcggattcgatctaaatagccggcacgttccgtgactgaaaccataccgcgagcatccatcaagttgaaggtatgactacatttaagacagtagtcgtacgcggggtgaactaagccgttcttaatttgccgcttggcttccttttcatattcatcaaataacattaataataattcttcgttgctatcttcaaaagcgtacttagaattttcaaattctggttccaagaagatgtcgccatacttcacgccatcgccccattcaaggtcaaatacggaatttacatcctgaatgtaagatgagagtcgttccaaaccataggtgatttcagaagtgacgggatcaacttcaagaccaccaacttgttggaagtacgtgaattggctgatttccatcccgtcgagccaaacttcccaaccaacaccggcacaacccattgatgggttttcccagttatcttccacgaaacgaatatcgtgttctagcgggttaatgccaagtttttccaaactttgtaagtataaatcctgcacgttttctggtgagggtttcatgaccacttggaattggtggtgttggtacaaccggttggggttctcaccataccgaccatcggcaggccgacgtgaaggttcaacgtacgccgcgttccatggttcgggaccgattgcccgtaagaacgtgtaggggctcatcgttccggcccctttttctgtatcatatgattgcattaacatacaaccttgatccgaccaaaacttttgcaaggttaagataatctcttgcactgataactttttgctcattagtatcctcccaaaattagtgactgaacggctgatggctttgaaacgggggcatcgctattcccagacttatggcacaaaaaaagtcccctgtcgtcgacaataacgacatagggacgattggtttcgcggttccaccctacttctgagtaacctcagcagcttaattacacggtattaaagctccgaaagcgccaattaacaactttgactgaccgtttttcaccatcacggtctcactgtaagtcgaatccgttaaccttctctcatcaacacttaactattcagttcttcatcatcatagctgatggtcgttcgtttgtcaatcctcattcttccggggcgccaacggttggtaccaactgcccatctgatcgatgaagcgtttagatttcaatcgaacgcccactgagttctgatagatttcatccaaaatccggcgtaactccgccgctgtccgcggtttgaccttgatcgaatgaaccttagccaaatccaacacggaaaactgacgtagataaaagattgctgctggactagcatgcaagcggtggggatccaaatgccagtgctgttgacagagcaaaccgccgtaactttcagaataatctaacggtaaatcacttcgaccgcaaaccgtacaccaacgcaactctggggccaccccaaacggttgcagtaactgaatttcgaccacgttagccaccaacgcgggggccacatcttgatcaatcagttgcagcgcactggtcaactgttggtaccaccgccccaccggttgattatctggaaaagcgacgtccattaagttcataacgtacgtggcataagcgttcaaagcaatgtcttgactaatatgttcaagatactgtactgacttgacactattaatatacgagagaccttgatcacgtaaatcaccaacgtattcccccatcgtgaacggcaataactccgccgccattttgaagccacgccgacgcgcaccgcggataaaaaacatcttcttgccatactcggcagttaaaaacttgattagcatatcgcgttcccggtagtcccggcgaaagagcaaaatgccgttaaaattcgtgaccatttgttgggccatccggatcacctagcgattctaatagtcatcttgccgatagccatagctggctagcaagtcttgacggtccttccagttctcttggacttttacccagagctcaaggtagaccttatccccaagtaagtgttcaatatcacgccgagctaacgagccaatcttcttgagcatgctaccacccttaccgatgatgatgcccttttgcgaagaccgttcaataataatcgtggcctgaacgtgaattttttcttcatcttgacgtttgatcgaatcaatcacgaccgccgttgaatggggaacttcttgacgagtcaattcaagaaccttttcacgaatcaattcagaaatgataaaccgctctggatgatccgtaatttggtcggacggataatactgcggtccttccggcaattggcccttcaaggtcgtcagtagttcatcaacgttatttccttcaagcgcggaaattggataaacttccttccacggcaaagcgtctttatactgatccataatctccaagagatgatctggatggacttgatcaattttattaatcactaaataaatcggttgtttaaccgttttaagacgatcgataataaagttatccccggcaccacgccgttcgtccgcattaatcatgaatagtacggcatccacttcacccaaagttgacaaggcggacttgaccataaagtcacctaatcgactatgcggtttgtgaatcccaggggtatcaatgaagaccatctgcgtatccgcagtggtataaatcccctggatacggttccgcgtcgtttgggctttgtcagacataatggcgactttttgcccaacgacccgattcaatagtgttgatttaccgacattgggacgaccaataatcgccacaaagccggaatgaaatgcttgttgttctgccataattaattcctttcaatcttgtccaatcgttaaccaattactagtttaaccaactgacaattaagttccaaattttaggtgcaaacaacactaacccaactaagacggcaaaggccgcggcaaacactaccgcaccagccgcaatgtccttaatttttttagctaggggactgaaattaggcccagtgatcatatcggacaggttttctgcaatcgtattgttaatttcacataagatgaccagaaaaatcgctaatgctagccacagccattcgttaacgctcaagtgaacccaccagccagcaaacaaggccaccgcccccagtacaaggtgtgttcgcatattacgttcttcaatcacaaccgttttaagcccagtccacgcgtgtagccaggactgccaaaacgagtgatttttgccaacctgtagccgatctggtctatttttcgaggccataagcgtccaaaatctggcgttgcaatgtaaacatttcggtttcatccgctggctgaagatgatcatacccatttaaatgtaaaaagccgtgaacgaccaagtaacctagctcgcgcgcctccgaatggttcaaaaaagcggcttgttcgctaaccttatcaactgatatcataatatccccgagatttagtggcatttccgccgccatctccggatccatcacaatcaaatcatcctcgtcatcgtcgtgcatcgcaaaactaataacatcagttggacgatcgacaccccgatactgttcattgattttttgaatagcatcgttattcatcagggtcaccgagacctcggtatcatcccgtaactttaacgtctgaccagcaagatcaattaaatcccgaatcaattgcaactgttctggctgcgctcccgttgttgtttggtcgtataattctaaatccataagtgccccctagcgttgttccacacgatcgtacgccgtaataatcttggcaacgaccggatttctgaccacatcatccgccgtaaacttaacgaacgcgacattgctaatgccgcccaaaatctgttcggcttgaatcaagccactcttagtatggtgtggtagatcaatttgtgagatatcaccattaacaatcatcttggcaccgaaacctagccgcgtcaaaaacatcttcatctgggcattcgtcgtattctgtgcttcatccaagatgacgaacgcatggtcaagcgtccgtccccgcatataagccagcggtgcgatttcgatgataccacgatccattaagcgctgcgtatgttcagcgccataaatatcgtacaacgcatcataaattggccgcaggtacggatcgactttttcctttaaatcaccaggtagaaagccaagactctcaccagcttcaaccgctggccgcgtcaaaatcagcttctcgacatcgccccgttttaaggctgcaattgccatcacaacggcaagataggtcttcccagtcccggctggaccaataccaaacgtaatatcacttttagcaacggcttgcacatactgccgctgaccaaagtttttgacacgaatgggccgtccacgattgtccttaattaaggtctctgaatagaggtctttaaagtaatccaaagtcccccggttgaccatcttaatagcgctaataacatctggcgccccaatctgaataccttgtttaattaaactcgttaaattatctagtactgcttgcgtattatgaacagcaacctcgtcatcactgctgatcgtcatttgatccccaaacacgtgcaattgaacgtgtaacccatcctcaagcaaagctaagtgggcgtcttctggtcctaatagcgcgactgactgggccggatcggcaatgagaaatttttgttcatattttgagttttcggtcaaaaacatggactcctttattgacagatttaatcaccattatttaataatggcacccgcagttagcgtgataaccacgctgatttcagcaggtatttgttagttaatcatagcataaaagcccccatcgaaccagtacaaggacgcctcggcattcgacaacgattttctgaacagcatttttctttcgagcgattaaattggcacgctatcaatcaacgtaagcccagttagatcagtccctgcacccattgctgatacttaatctgaacaaccggtactgcatttctgatcaaccagaagaaacaaaaaaaccggagaaaaatttctccggttaaccgttaattcaataatgatttaactgtttggttgatcagcttgccatccgcctgacctttaagttttggcatcactgcccccatcaccttgccaaagtcacctttaccagtagctccgacttgttgaatggtgtcagcaacaatctgttgaacttcttcgtccgacaattgttttggcatgtactgctcaacaattgcaatttctgctttaacgccgtcgactaaatcttgacgacccgcattttcgaattcacttaatgattcgcgccgttgtttcagttcacgtgagagcacgcttacttcctcatcagccgttaaatcatggccaacattaatttgttcattcatcaatgctgacttaagcatccgtataacgctgagggcttgcttatcgcgtgccttcatcgcagcttttagatcaccattgagtgtatcgattaaactcattggttttccctcctcgttaggtcattagtaatcaatactaattacttgaaacgacgacggttcttacgcttacgtgctgcttcagattttaacttcttcttcacacttggtttttcgtagaattcccgtttgcggtattcttgtaaagtaccactctttgaaacggtacgcttaaagcgacgaagagcatcatcaagagattcgtttttacgaacgactgtttttgccatgttaaattccctccctccgagctcaaaaagtaaccgttaaattatgcatacttacacataacgcaactgttctagtaaattatacataaattgaaaaaggccgtcaaccaaagtttacaatttccttaaaataaatcgttaagagcaacgtcagttcggacagtaaatcgttttcatcccccgccagctatgctacactaagactattatcgaaccgaaatgaggttattctatgtcagcaattaaagtctttattttatctgattccatcggtgaaacagctcataacgtggccttagctgccgctgcacaattctccgactatgacattcgctatcagcgtttcccatttgtccgcaccgactcactgctccagacggttttgtcgcaggcactgaaggaacacgccgccatctttcatacgtttgtcgatcgccggctcagccaaatcgttaaccaattttgcgaagcgcacgagttgccttattatgacgtcattacaccagctttagatactttttcacagattacgcacgtccaaccgtccaatcaccccggtaccgtacacgcgttaaacaccaactacttcgaccggatcaacgcgatcgaatttgcggtcacttacgatgatggtaagaatccgagtggctttttagaggccgacgtggtcttactgggtgtctcccggacctctaagactcccctgtcactctacttagctaatcgtaacctgaaagtcgccaacttgccactagttcctcaggcccaaattcctgacgaaatttggaaagttgatccgaaaaagatttttggcctaactaacgatcctgaaaagttaaacgatattcgccggcagcgaatggtccaatatgggcttaatcccgacaccatgtattccaacacggataaaattaaagccgagttggaatacgccgacaagatcttcaaaaagattgggtgtttagttatcaatgtcgctaataagtcaatcgaagaaaccgccactttaattaccgaaagcttgaatactgacgacactaacaatggctagtatcactaattgccaactcaccgatgccgcctaagttttcctgacaatcagcgcgtgccaccttctaacggtcagcgcgcgcttttttgcatcatttttcttatcattaattaggtcagctactaatcatcagtcgtgtcactcacacgagctcgacaccaccgtcaacgtgcaacacttgcccagtcataaactcattttgcatcaaataaacatacgccgacgcgacttcggcgggcgttgccacgcgtttcaagggattaccagcactgacggtcgcagcctgggccgccaattgtgcgtccgatagttggcgccaaagaccagtcggcgtccaagtcggtgcaactgcattgacgcgatagtcagtcgccaactctacggcaagtccaacgaccatcgtattaatggcttgattgccaacaatcgctccggaggcattatctggccgcccaccagcacccgaagtaaaaatcagcgaaccgtgttggttaagatggtggctggctaattgggccacttgcagatttgcaaaaaatttatcttcaaccgtctgccgaatcgctgcaatcgaattgtccaagaaccccccacccattgcaccacctaacattgagacgacgtggtcaaatgcgggctgagctgcaaaaaaagtttttagttgcgccagattttgtgcgtctaacgccgttccagtcaaatggtctgatgggcctaattgggtgatggcagctgttacgtgcgccgccgtatgaccgataatatggacatcggcgccttcctgtaaggcttggcgagcaattgccatgccgaaacccgaagtaccaccaatcactaatagccgctgttttttcaattgcatcgtcattttcctccttctaaaacaaaaaacgacaaccgactagcgattatcgttcaattctcattaacgttgctgttcaatatcttcaatcaaatgcggattaaactccccggcccgaagcattgcaatctcatacttataaggtggcaattgatgtttcttatcttccccgacatacggcgtttctaaaatcttgctgatgtctggcaattgtggatgatgggcgaccttattcaaagtatcaaagccaatcgttcccataccgatattcgtgtgccggtccttgtgagcaccttgaggattcttagaatcattgagatggatcactttcaaacgatccagcccaatcacatgatcaaattcattcaggacaccgtcgaaatcgtccttaatcgcgtaaccggcatcactagtatggcaagtatcaaaggtaaccgataacttttcattataagtcaccccgtcgatcatctgtgcgagttcttcaaacgtccggccaacttcagttcctttgccagccatcgtttctagcgcgatttgaacgtgctgctctggccgaataaccgcgttcagtcccttgatgatctgcgcaatggcaacatccgctccggcaccaatatgtgctcccggatggagcgttaattgtgttgcgccaacggcatctgcacgctggatctcttgatagagaaagtccgttgcaaactcaaaataacccggctttttcgtattacctaaattaatgatgtatggggcatgtacgacgatctgccggaggtcatgagcctcgattatcggctgtgcttcgtcaattttcagttcgtcaattggtttacgccgtgtattttggggtgcgcccgtatagatcataaatgtgttggcgccgtaacttgccgcctcattggcagatccgagcaacatgtcgggtgccttcatcgaaacatgtgaacctaatctaagcattgtagtcccatccttttcgcaagtttactaattcctgtcataccttaaagttgccggatacatatgataccggcatgatcactcattatccaaataaatctgtcaagttattctaagcggttgtggtcacccgtggataaaagtacgccaaggtccgctcaatcgcatgaccgtcattacgcgtattccataactgattaaactgggttaactgtaacggcgcacccggcattgctaggacatgattcaagtccaccaccgtccggactaatggtcccggcgcccagtccctaaaatcagcttgcaggcccacttcttgctcatagtggtcccagtcaaagacataaaaaacgattttttgacaatttggtaacaacgcgtagtcaaacacaactgaggagtagtcactgaccaaagtattagcgaccgtcaacaattcatcggtactaaactcaggtaccaatgtcactaggtccgggtaacgggcttgcaaatcacgttcctgctcggccaaatggggatgtaacttaataatcaagtgttgatcgggccgcaactttaattgcttaaaatcagccggcaacgcaaattgaacaccggctcgataagtcggcgcatacaaaataacttcctgttgtttaaacgccggatacttctgataaatggccgttgcggtttgcatcacccagtcggacttacaataccgatccgaacgaggatatcccaagacccgcatccgcgtctgtgggacgtgataactcgctgcaaaaatcgttcccatcttctcagaaccaaccacgtaatcagtaatctgatcatacacggtctgaaatcgacgccgatcatctgcgggccgctgtgccgtctgtggatcaccccaaccaaatgttttgaccgcgccagcagcatgccagagttgaatcagtcgttgtggggcctgccgcgtcaagccagcggtaaagccataataattatcaagataaacgtccgctgcccgggtaatgacgggaattcccgtcaaggcaaatcgaactgaatcatgaaacggccgtgtcacaattcccgcctgtgccagttgtgccgccccggtggctgcactcggcaagtaataaacagtcaagcgcccgggaacgcgctggttcaactgctgaataaaatccaaattgtccgcaaagctcatcaaataaatcacctgatcatttttgctaaagtgcgctagccacgatacaactcgcaccagccagacataaattactttcttcacactggccatcctttcatttcatcattaattattggtaaagcgtgccctacgtgacaatcaaaaatgtgccagctcaattacgcttaaaaagttcagattagcgtcaacttacttgagccgtctgccttagtccactaaatataaacaactatttttcaagtctgttccccgttagttgttcattagctctgggtctaactgatatgcacttatgatccagcaataacacaatgcttgtattatataacagatgcccacacttcggctagtcgggtcactattaatagtggtgtaaaagtcgtccccgaacgcctaattaaaaagtgcttgcaaacaagtcccgaaagtcctgtttgcaaacacttttaatctgataaattcatcaaggcttcggttcataaaagtgaccgagaatcttgaccgtatctgaaatgctaacgaaagcgtgcgggtcagattcggccatggccgccttcaactcgcccatttcgtaacgcgtgatgactgtaaataaaatcgttttatcatcatgttgataagcaccttcagcgttgtgcacgatggtaacgccacgacgaatccgattttgaacgctatcaatcaccgttttagggcgactcgtaataatcatcacttgcatcttctgttggcgcgtatacgtcatatccatgacccgaccatttacaaacaacccgagtgcggaataaaaggcatatggccacccgtaaacaaagccagccgcaatgacaatgatcgagttgaacgccatgttgatcgtcccaatactgcgacccgttttacggcgtaacacgataccgataatatcgaggccaccggttgaaatcccatttttgagggccgttccggtcccgaaaccattaacagcacccccaaaaatcgcacaaatgatggggtcatgggtcaaaccaactggggcaatcagtttgatcataatactagatagcgtaacagctaagaacgtatacaacgtaaacttatgcccaatcgatcgccacgcaataataaacattggaacattcaaaataaacagtaacgccgcagttgaaatctgaacgggaagaaacttgctcatcaaactattaatcaattgtgcaagcccagtgattcctgaagaataaatatgccccggcgtccaaaagtagttcatggcaatggaaactaaaatggcgtatataaaagcagttgacgctttcacaacatcacgatggtgtttggataactgctgaaaatcatccatgaattaagtgtgctcctttacgtttttgctttcgttattgtaacacgccgattcgcaaacggccggtcttttgcagtattctgctaaaagtctcacgtttctcagcaaactcccattaatcaatccgactaatttccagaacgagccccgctacgatagttattattagatcacacctatcgcgatgaccagcaactcacgcttagtccactttaggtgcatcggcccactgctcggcgatgaaatcagcgcggccacccgcttcttgttccgcaaataccactggattatttttataaaagcgttggtggcgtgcctcggctggataaaatggtttagcatcctcaatcgccgttacgattggtttactaaatcgttcgctcacctgtaatgcccgtttagacgcttccgcgatccgccgttgttccggaccattcacaaaaatgaccggccgataattatcaccacgatcttgaaattgccccattgcatcggtaggatccgtttgatgccaataaatattgactaattccgtgtaactaatgatatcgggatcaaacgtaattttgacagcttcagtatgacccgtcgtatgcgctttgacgtcttcgtaagtgggatttttcgtgtgtccaccagtataacccgagacaacactgtcgattccgggttgactatcaaaaggctgaaccatgcaccaaaaacatccacccgcaaaaattgctgtttccatgagaattcctccaattaaatattaatataaatttaacactaattaaaaagaacgtccatttctggacgctcttaatatttttattcggttggttcatcatccgttacgggattggtaatattcaaatccaaatcagctaattgctggtcagaaacccgcgatggtgcattggtcattggttctgacgccttggaattcttagggaaggcgatcacttcacgaatgttgtcgttacctgataataacatcgcgaaccggtctaacccgattgctaagccaccatgaggcggaaagcccatgtcaagggcatccagtaagaacccaaattgttcttgggctcgttccttagtgaagtccaatgccttgaacatcttttcttgtaattcgcgggtatgaatccggatcgacccgcccccgagttcataaccattcaagatgatatcatatgattgtgcatgggctttgtgtggatcttcgccatcattcaagtaatgaacatcttcttcattgggcattgtgaatggatggtgagctggtacccagcgctcgatgccttcatcatattcaaacaatggccagtcaacgatccataggtaagcgtattgatcttgatcaatcaagtcaagttccttagcaatcgcggtccgtaagtaacccagcgtgtcagaaactactttgaaactgtcggcagcaaacaataataagtcgcctggtttagcagcagcagcactcgtaatggcttcaaagtcaccatcgttcttgaagaatttcgcaacgggaccactaaagccgtcgtcagtgaccttcatccaagctaagcccttagccccaaaccgtttaacgtactccgtgtacgcatcgatttgctttctagaatattgatcagcaccgccaggaactgcaatcgccttgaccaggccaccattagcgagtgcattatcaaagactttaaagccggcgttagaaacggccgcgcccatgtctttgagttccataccaaagcgcacatccggcttttcagaaccaaaacggtccatagcttcttgccaagtcatccgcgtaaacggcgtcttgatgtcaacacccttgacgtccttcatgacttgcttaatcaagccttcagtataggactgaatttcctcagccgttaagaaggatgtctccatatcaatctgggtaaattcaggctgacggtcaccccgcaaatcttcatcacggaaacagcgtgcaatttgatagtagcgatcaaaaccggcccccatcagcaattgcttaaagagttgtggtgattgtggtaacgcgtaaaaatgcccttgatagacccgcgaaggcactaagtaatcccgggccccttctggcgtcgacttcgttaagaacggcgtttcaatatcatagaacccgttggcatcaaaatagctatgaactgcttgggtgatgccattacgaattttcaatccacgttgcatttctggccgacgcaagtccaagtaacggtacttcaagcgcaattcatctgatacgttaatatcatcttgaatataaaatggcggggttttcgccttatttaagattttggcatcgtgaatctcaacttcaactttaccagtcttcatgcggtcattaacagcgtcagcattccgattaacaacggttccttgcacttcaatgacgtattcgccccgtaactgatctgctaccgccaaagcatccgctgaaaattcctgactaaagactaattgcacaattccttcacggtcccgtaaatcaataaaaatcaaactcccaaggtcgcggcgtttttgtacccaaccttgtaaagtgaccgtttggcctaaataatcctcattgatgagacccgcatatgtggtccgtttcataaacgcttcctccttataaatcggcaaacttgccgttcacactacttatctaaaacttgatgagcatcttgatagatgtccgccatcgcaaccttggtttcctcaccagtagccatagccttcaagttaacgacctgatcagccagctcggtttcgcccaccgtcatcgtgtaacgggcattcaagcgatcagcactcttgaactgagctttaggcttgcgatccaagtaatcccgttcggccttataaccggctgcccgtaatgcctgtaccagcttcaaagtcgtagcactagcagtgtcgccaattcccacaacatagacgtccaactgatcatcagttggtaccgcaatgttttcagcatccatcaacactaatagtcgttcaacacctaggccaaagccaacacccgaaacttcagggccacctaattccttaaccaatccgttgtaacgacccccagcacagatcgtcgtgtagcccttgcctaacgcttttgagtgggtcataatttcaaaaatcgtatggttataataatctaatccccggaccatcgtggcatcaatctcgtacggaattgctaatgcatctaaatacgtcttagtttgatcaaaatgcgcttgagcttccggagacaagtaatctaaaatcgatggtgcatcggccacaaattgttgatcttccggtgccttactatctaaaacccgcaatggattcttgtgtaaccgttccttggagtcatcactcaattcatcaaagtgtggttccaaataatcaatcaaggcttgtcggtaatcatcacgcgtttgttgatcacccaacgtgttgatgaccagtttcaaatcagtcaagccaaaggttttaagtaagttatagcccattgcaattacttcaacgtctagggcagcactttcactaccaaaagcttccacgcctaattggtggaactcacgtaaccgacctgattggggccgttcataacggaacattggtcccatgtaataaaccttgtatggtttgagaacttgcggaccgtacaacttgttttcaacgaacgcccggacgacgccggcagttccttctgggcggagcgtaatgtgccggtcacccttgtcatgaaaatcgtacatttccttcgttacaatatcagaagtatcccccgctgaacgtgagaagacctcgaagttttcaaacatcggtgtccggatctctttgaattgataagtcttgaagacggcacgagccgttgcttcaacgtattgccacttttcactatcgccaggcaaaatgtcggcggtgcctttaggccgttgatatctcattaatagttcctcccttgattgcaatcgacaaaaaaagcgcccttgattatttaccaagggcgctattagcgcggtaccacctttttgagtactaattgataacgtctgtaatcacaggcggaacgctgccgttcacctcaaaagcgtctcctcattgcgcactatccggaattctcagcactaccggtctctggttatagtggcgtacaatgctcttactttctctgcggtcgattgattaatatatggttaaagttacacgaaaatcacttaaaagtcaacgattctagttaaaattatctcaagatttcgtcggtcagctgtttttttggtatactatttgcagcacttcaaattgcaattatcttaaatctagttggtgacagagcatgcaagttttaaaacaattttggcgtcaaatcacagtcacggttatttttatcggcctagtgattggctttgtagtgctattagcgactaataacactgcgactgttaacattgccaacgtcaatattcgtagcggtccaggcatgagttatgcgatcgaggacgctacgtctaagggcaccaaggtccacattatgaaacgcaaaaataattggctatacgtccgttatgcggatcataaattcggctggattgctagttggttagtcaacgaacataacagtcagttgactaaaaccaccaaaatctctgaagccaccatcgttttagatcccggacacggcggttctgattccggggcgctctcgagcaagggcaagatggaaaaaacgtacacgttacgggtcgctaaagctgtagctaaaaagctccggactgctggcgcacacgttgttttaacccgtgattcagatgaatacgtcggcctgagtgcgcgtcccgcaatcgcaaacaagcttcatgcagacgccttcatcagcttccactttgacagctcaccagaaaaaaacacggcttctgggatcacgacctattactatcataagtcaacctcactagcactagccaaggcgttaaacaataacgtctcgaccttgccaattcctagtaaaggaacggacttcggtgactttctggtcattcgtgataattcacgaccatccgtattgatggaactgggttatattaatgataagtcggacttcaagacgatcagttctaaaaagtaccctcaagaagtagcgcacgcggtttacgccggattgagtacctacttcgccaatcaataataatgcagtcagcatgaagtctttgaaagtggccgttattccagtgactgggataacggccacttttcgcgactactcaatcgatgaatcgcatatcaactgacgcggtttacctaaataaccgtctatttgcctgcactttagctccgtaccggacgtctaacctcatttcacactcttacggatcagcgccactaattgttaataacaattaattgcgttacagtgatggtaaccgtatttaacatcgcagcaaggaggagttaacatgcacttaacaaaagcttggctcgcacaactaccactcactgacattcagcaagtgcaaccagtgagcggtggcgacatcaacgcggcctttcaaatcatcacccttcatcaccaatattttttaaaggtccagccgcacaacgacgttactttctttgaccacgaagtcgctggattgcgactacttggtgcagtgactaagacaccgcgtgtcatcgccagtggcacgattgccacggacggctatctcttattagattggctagcgaccgggactggcagtcaatccgcactgggagcggctgtcgccaaagttcatcatcaacaccacgcccaatttggtcttgaccacgacttcacagctggcaagttaccgaaaattaatcattggcagactgattgggcaactttctatacacaacaacgtttagatgtattagtcaatttggctaaggagaaccatttatggtcagaaacgcgtgaaatacattatcaccgcttacgacaacaactgttgcaagattcccacatgcatacggtaaaaccaagcctgttacatggcgatttgtggtcaggtaattacttatttgacacgaccggtacacccgttttgatcgatcccgacgtgttttacggtgaccgagagatggatctggccatgacgacgatttttggtggttttgatgctgatttttatcaggcctaccaagcggcctacccggttgcgcccggtatgcaagaccgcctaccaagctaccaactctattatttactggcccacctgaacctgtttggtgaaacatacggaccagccgttgaccgaatcctcatgcaatattaatacaagcctcgtgaccgaatcctctcaatgagctgtacgggtcgcgaggcttgtatataattttttagctacaatcatcagttatcacaatatttcgagtgtctagactagtcgacaaaggtcaataagtcgtttaaatccgtaacttgaacttccggggcactagtcaccgtaatcaggcggtcaatatcaaataaatatccggtaatcccagcattgtgaccggcatcgatgtccaagttgcgatcacccaccataacggcgcgttgacagtcgacctggtgtttattcaataaataattcaacgcagctggatcaggtttacgtgggaatggctgagcagccgtgaccgcatctgtgaaatattgggctaaacccgctcgttgtaaataggcttgtgcgctttcgtcacgatgggtcatcaaataattgtgaccaccaactgcgataactttttcaagcaccgcttgagcacccgcaaaggcggccggtgcatgctgtaattgtggctcccaacgttgatagcccgcccgtaaatcatgccaatcccaaccatactgagccgcaaccattctttccgcataaccaactgactgttgccgcatcagctggtacgttgtatcagccggaatagtcccacctaactcggcaactgctttttggaaagcttggaccatggctggataagtatctaacaaggttccatcgaggtcccataaaaactcacgcatctcattcactcccgctaataattgtaatagccaaaaagctgaaagtaccggattggtctttcagcttttacttcaacgttgatcagtatcataacaaatcgtgaccggcccatcgttaaccaaggaaacttgcatatcggcaccaaattcaccagtcgcaacggtcacgccactggcagctaattgctgattaaatgtatcatacaatttgctagccaattcaggattacccgccgctgtaaaacttggtcgattaccatggcgcgtctccgcgtataacgtaaactgcgatatcgacaagattgctccaccgacttgttgaatattcaaattcatttttccatctgcgtcactaaaaacgcggaggtttaaaatcttatgcgcgatgtaatccaattcggcttgaccatcgccatcttgaaaaccaaccaataggacgaaaccgtggtcaatcgtgccccgaactttcccatcaatactaacttgtgcctgctgtgaccgctgaacaatgactcgcatagaagcctcctaaaacattttccgttcgacaacgtaaaggtcctgaacatttttcagactgtcaatgattcgttggagatgttccaagttgcgaacccccaacgaaacactaataatgaccatcttgttgtgatcgaccttaccgttgacattggtcaaaaatttcgtgtgattattgataactttcaacacatcgttgagcatgccattacggttataaccttgaatttccaaatcagaattgtagttcgttcggtcaccctcgggattctcccactgaacatcaatcaaccgttcaccatttgcttctgcgctcttaacgttcggacaatcaacacggtgaaccgaaacaccgcgccccttcgtaatataaccaacaatctcatcacccggaattggagaacagcaatgacttagacgtacgagtaagttgtcgacgccttgaataatcaccccaccagaagatgagaccttttgccgcttccaatcctgcttctcctgatcctcattatgatgatctttcgatttcttcttcgctggcgcttccgtagagtctgccaaaatggcctcctcacgttcacgctgccgattagcctcgcgctgtttacgaacatcactcgttaaccggttagcaatccctaccggttggacgtcaccaaaccccaaggccgcgaacaaatcatcctcactaccgtagtgcatcttttgagcgaccgccgtcaccttgtccttagtcatgatttcttttggattaaactctaaatcacgtagctgcttctcaagcaaatcacgacccgtaatgatgttttcctcacggtcagcattgcggaagaactgtttgattttattacgggcccgccgcgtatagactaatttctgccaatcacggctaggaccagttgaactagtggacgttaaaatatccacgatatcaccatttttgatttggtaatccaatggaacgatcttgccattgactttcgcaccagtcgtatggttacccacttccgtatggatcgaatatgccatatccagtggtccagcgccctttggtaattctgtcacgtcacccttgggcgtaaaagcatagacccggtcactaaagaggtcgcccttgacgccctccataaagtcggcagcgtccttactttcatcctgtagctcaatgatttctttgactaagttcaacttgttgcccgactgagtctcttggacctcgtcgcgtttaccttccttatacgcccagtgtgctgcgaccccgtattcagcgacccggtgcatttcaaacgtccggatctgtatttcgaggggcttaccttcaggaccgaccaccgtggtatgcaaagattgatacatattggccttgggcatcgcaatataatctttaaaacgccccggcatgggcttccattgtgtgtgaatcgcacctaaaactgcataacagtccttgattgaatccacgactacccgaattgccagcagatcgtaaagttggctaaactgtttgtgtttgtcccgcatcttcttataaattgaatagatatgcttcggacgaccataaatttcagcttctggtagttccagatcatggagcgccttttgaatgtcttgaatggcaatctcgatgtacttttcacggtcctcacgccgcgaattcatcaagtggacaatgcgataatactgttgaggattcaaataacgtagtgaaatatcttctagttcccatttaatcgtgctgatccctaatcgatcggcaatgggggcgtaaatttccaacgtttcatttgcaattcgccgctgtttatcgggccgcagatgctgcaatgtccgcatattatgcaagcgatcagctaatttgacaatcatgactcgaatatctttagacatcgccaacagtaatttacggtgattttcagcaagctgttctttgttggacttgtaccgaatcttacccagcttggtgaccccgtcaacaataacggccacgtcatgaccaaacagttcttcaacgtctcctaaagtaacaccagtatcttccacaacgtcgtgtaagaaacccgaagcgacggtttcagggtccatcttcaattcagctaagataccagcaacttgaatcggatgcataatatacggctcaccagattggcgatactgatccttatgcacataagttgcaaaatcacacgcccgtttaactaacgcgacgtgatcactattcatatacttttgaaccatgtccaggacatcctgggcagtccaggtaggttgtttgggcattttatcaccacgacttccacaaagattctatttaataaaaggcacgtgaggttcccacccaacgtgccttgacaaccgttttaacgcaaactcgcgcggggaccagttaacccatatgctaagtaggatatgcctaaatcaactaacgctaagtaatagacatacgttgggaaaaatagatagagcccgacaaaacagcccactgggaatagccagactaaccagcccgtccgttcagtccgacgaatccaccagccaacgactgctgccagcacaaagtcaactacaaagagtagccatacaatctgatgaaaccggctaatactcgtaaatcgtagcaaccatggtatcatcaccccaacgacaagcgcaatcagccaatactggccattaaacttacgaattttttccgtcaaactaactccctcgcttacgctttattgctaaatgactatgattatttattgtacaccaccgaccgcaaaattacactagttcgcaccaaaaagaaacgctacttagtaagtagaggggtgccgtttcggcccgcatgattcgtggacccaggcccactgccgcgataccagcagtttgtaatgtcgccacttcttgtggtgccaagcccccttcaggaccaaaaatcgccagcagtcgttgtggtgcggtcatcgtttttaacgtctgcaccagttggctgctctcaccttgtttggctgattcctcccacgctacgaccccggtatcatatgacacgtgtgctaacaactggtttaaatccgttgcgtagctcacactaggaatcatcgtccggtgtgactgttcagccgcgccctgcgcaattttcgccaagcgggccaacttgcgggcccgcttattcgctgcccatttagccactgcccactgactatcgaaaaacacgaaggcgctcgcacctaattcagtaccacgttgtacgatctgttcgggtttatcgcctttagacaacccacaagcaatagtcactggcaacggcaattcaacatggggcgtcgtaacggccgtgattgtcgctgtagctgttcgaccatcgcttttcaccaaatccgccagcacgacttgatgtgtcgtcgtaacaaattccgcagtgtcccccggttgtgcgcgcatcaccttgacccagtgtttgaccgtctcacccgtgatagtgaacgtttgcccaatcgttgtcgtaatcggtgttgataaaaagtatcgttgcatttcagtcccccactaatcttcagctgttggtagataagccacaataccgtgccagtcacccatttgcgtatgttgtgtaatttggaagcccgcttccttaattgtcgtcatgacgacctggaacttatcatcgatgatgccagaggtaatgaaatagccgccccgttttaagttttgacgggcttgtggtaccaacggaataataatttcagccaaaatgttggcaacgataatatcagcctgcgtgtcaatcccagctagtaaatcattggcagccacgtgaacatctttggcaactggattcaagtccaaattcgtttgagctgatgccacagcgacatcgtcaagatcgtaagcttctactgcaccgacgcccatcgctttggccgcaatactcaataccccggacccagtacccacatcgatcaagtgttcaccaccattgatcacagtttcaagcgcctgcaaacagagcttggttgtcggatgcgttccggtaccaaaagcctgaccaggatctagtcgcaacacaagctcacctgattgcactggttggtactgttcccaacttggcacaatcgtcaaatagcgcgtaacccggacggggtgatagtattttttccaggccgtcgcccagtcttcatccgataaagccgtcatactgacttcattaggtgctggattcaacccaaaatcagtcagctgactaacccgctgcttgatcgttggaatgacttccggtacaaacaccgtctcaggataataagcagaaatcttcgccccactggtaacgtgtggaatcgtcgccaaatcgatgatctcaccataccgatcaggctttaaattctgataatccaaggcatcatcaattttgacgccactggccccggcttccattaaaatgtttgccaccgcttcgacagcttcattagaagtactgaccgttacttcagtccatttcatatctttatattttcctcccatcgaaagctagagcgccaagcgccatcgcttaagactatcacgtttttcttagtaacaattatataacaagcctgattaacttgacaatcacctggtcatccaaccatgatgttcatgatcgatagtccggcgagaaatcttggatacgaatggattgccggccacaaagtaccgcaatggtgccgttgtccattcacccttgttgacaattccaattcgcggagtcgccataacttgttccggttggcgataatgactcaaatccaatgataaggtcgccggttgcagcgtttgtccatttaacgttttatctaacccaagcgcctgcattagcttgcccggtccgttggtcaagttcgcaatgggcactggccgctgctgttgcattcgttcaagccccacatctggttcaattccgcgaatcaagacacattctggcgtaccggcagcttgtgtcacaatattcagtaagcaccaggccctcatttgataaatataaatcgttcccgctgattgccagagtgcgcgattgcgcggcgtttggtggttctggtacgcgtgagctcctgcatcacgggcgccaagatacgcttctgtttctgtgatccaggcggtcaatacaccgctagatgtctgtaggtgcaactgtttacccagtaggctcgccgcaatttcaggtgtcgtacgtgtgcttaaaaatcgttcgattgctgtcataacttgttttactcgcccctaatagaaaacggactagccaccttgctagtccgtcctcatgttcatttaatcattatttgcggtctttttggttagatgcttattcaaatacttaatcatgtcggcttcatgcttaaagatccgcgggtgcttttgcttgtgcaaccgaaccgcgatctcattgattttgattcgcccggtccaagtatgactgtacttaacgaccacccgattgttgcgatggtccttaccgaatttcaacacgtaaacgctgtcgggcaccatcagcggtctaatatatgttttatcgtagtcataatgtattgatcgcagaaactgtttcgtgcgttttaacatgtcgttgatctctccttcacaatgtgaaattgattaaataataaattaatttatcgttagtatattttcatatctagctattattatagcagactttaaacaagtagtgtaccaatttgccattggtttagcaagtatcgaactttaattcttataaatttgctaaccatttcagaattgtttttgccgcatatccgggtatggtaaaatatgattaaattagtaaggttatcaatattagggggaatttactgatgatactcatcgaaagaatttatcgtcgtggtcatgaacagttgacaacggtcgaccaaatcgaaaaatttcaaaccaatgacggttatgtcacatccaacgaagtcctcgcccgcgaaatcggtgcggatagtgaaaactgcttctacaaaaatcaagagggcaaacgcaaaaaagtcgttgcgaccaaggacgatcagggcacttggcatttaaagaccatcggcacaactgacccgactagcgatggcttattgcaactaccgcatatggatgatgtttggggttaattggtgcttcgtttagaagaactgataattagtgttcgtcagttagaactaccatcaaagactcaggtttctgatggtagtttttttatatacatatcgtacggtatacaagcaacgtaattaatagcaattagtatttttattgaattctaatctatcaatgatacttgcattgatataatctaataagcatgctcttttttattgttggcacagtctgacttcaatgtctttggagccaacactcataacaagctagaagtcattaaaagtcaacttgaaaaacaccttatttggaggagtcttatatgaaaaaagtagtcactggggctgccattgttgcgtcattatttatattaagcggttgtggtaatagttcaaaaacatctactcaatcaagctcacatcacaaagaaactgcgaccaatgtcaaaaaggaaaaaactattacggttaatcattcgagcattgtcacttctgacaatagcaagttctcagttcaaggaagaacggaagaaaatatcggtgtttatcttctcaataagagtggtcaagttaaggatacggttacaagtgattctaaaggcctatttcattttaatgaagacaacgatgatgcaaagactgtcccatattaccttacaatcgatgatattgacgcagatactgatcctatttccaacgaacctaataaaaataacgttaacaagcttaaggtttataaaaaaataattgttaaaccttcttctgaggccgttaattcttataaatcttcatctagttcggctatggattctatggttgctgccaattcttcatttgacgaatcggtatccaaaaataattctagtgatagttcgtcgtctgctgctaaatctactactcgtagtatccattatgataaagttgacttagaaacatttgcaactgaaactgataaatacatcggtaaaaacgtcgaaactagtggagaagttgcctacattcaaaagaatccagataatacagatatctattatgttgttatcctccctaaagatgaccatgcatcttcaggctactcatacgggactgttacagagatcaatgtggatacctttgatgaaactaacattaatgaaggcgataatattactgtaaaaggtggcgcactcacatctaccataaaattaaatggtaagaccttaaaatctgatattgttgttgattcagtatctgtaaattagaaaattggcccccaacacgggcttttatttaaaagtaaaaaagaacatacgtttggacattaggaggatattatcatgattattcaaaaaattaccggaaaagaacaaaaacaattggagctgcaggacaagttttatcccggaccaggacgctcaaaaactaccggctacatcgtcgatgataaatggtccgtgtacatcacctacgtaccatttacaggctatcacgtttctattggggatcatcgctatggacttgtccgacccaactatatcaccgttgacgctattgcacggttggacctattcccctatcgcaagaactacatgctttattctgctggtagtgaagttgttcattttgacattaaagactgaaaggaagtataaaaatgcgaggatcaattagaagacgtggcaaccgctggtattatgcatatgaaggccccaccatagacggtaaacggcagcgaatcgagcacgttggtggtcggacccgtgaagaagcagaacgggccctgcgcaaagcaattgatgagtttgagcgcggcggtgttgtcatcaagttgacagagatgagtgtagcagactacttcgattattggcacgagaattttgttgtaaagactcttaaatataacacgcaaacgaattatcgtaatattatcaacaattacattaagcccgatatcggcatgtaccgaatgaaatcaattggtccagcatcaattcaaaagttcgtaaatgacctacccacagacaagctctcaaagcacactattgagatcattgtttcagtcttacgtaagggctttaagatggccgtcttcccttaccaattaatcaaagaaaatccagcaaactacattgtaaagcccactaataataatgatgatgaaataacccagcaagctgctcgagataagctcaaaatcatcaatatgggccagttcaagcagatactagcacttgttcctgaatctaaccccttgtatctcccacttattatcagcttcaacactggcttgcgccgtggtgaggtttcaggactcacatgggacaacatcgattttgataacaaaaccttgaccgtgaacaagcaaatgattatgaagaaaaaagaatttgacgttacgtcacccaaaactaaggcaagctatcgtacaattgcagtcggaaattcactgctaactgttttaaagcgtttcagaacttaccagaaggaaaataaagtgcgttacggacaattttactttgatagcccatttgtttgtaccaaacaaaatggtaagccgattacccctagcgtaattaaatactacacaactaaactatcacaggaattagactttccatttaattttcactcattacggcacacacacgcaacgatgctgctagaaaatggagccaagtacaaagaaatacagcaacgccttggtcactcacgtatttcaacaacgctagatatctattcccacgtaaccaataagatgaaacgtgatactgttgatatcttcgaaaatatgttaaaaaacaacagttaaaaagatgatagacactttttcgatatatgtatattttgccaacatcacagtttcaatgttggcaaaatgttggcaaaacggaaaaataaaagagctccgcttacgcggaaccctatcagttcggcttttcgtcttcgtcggttttcagaacagccatgaacgcttcttgcgggatttcgactttaccgacagccttcatacgcttcttaccagctttttgcttttcaagtagcttcatccgccgcgtccggtcaccaccgtacagatgggccgtcacgtccttacggtaagctttaatattcgtccgagcaatgactttagaaccaatcgttgcctgtaccggaatttcaaagttttgccgggggataatcgtcttgagcttggcggcaatctcgcgtccacgcgcaggtgcaaagtcgcgatgtgcgataaaactcagagcatcaacttggtcaccgtttaataagatatcgatcttaacgaggtcactggcacggtagccgtctaaatcataatctaacgaggcatagccgcgcgtgttcgactttaatttatcaaagaagtcaaaaatgatttcggacaacggaatgtgataaaccacgttgacccgattactatccaagtactccatcgtatcaaactcgccccgtttacgctgggctaattccatgaccgcaccaacgtaatcattaggcaccataatctgagctttcacatacggttcacgaatttccttgattgcagacgcctcaggcatttcagccgggttttccacctttttctccgtgccatcagtcatccgcacatgatacgttacggacggcgccgtggtaattagttcaagattaaattcccgttcgaggcgctcctgaatgacgtccatgtgtagcagtcccaggaatccacaccggaacccaaagcccagtgcttgtgatgattccgcttcaaattccaatgcggcatcgttcaattttaatttttccaacgcttcccgtaaatcggtgaatttggcattatcagtcggataaatcccagcgtagaccatcggattcatttcacggtaacccgccaatggcttttcggccggatttttcgcgttcgtgaccgtatcacctactcgggtatcctgaatatccttgatgctagccgtaatgtaaccaacatcccccgccatcaaataatcccgtgctaacggtttcggtgaattaacgccgacttccgtcacttcatattcactaccactgttcatcaaccggatccgatctcctggacgaacgatgccttcatgaatccgaacactcagcaccacgccccgataatcatcatagacggaatcaaacactagggccttgagtggcgcatcaagatccccctgaggagccggaatcttatgcacgatttgctcgagcagatcttcgataccaataccggctttcgctgaagctagaacagcatcttccgcatcaatcccaatgtcatcttcaatttctttgcgcaccttttcaggttcagccgatggcaagtcaatcttgttgatcaccgggacaatttccaagtcatcatcaatggctaaatacacgttggctagcgtctgggcttcgaccccttgcgccgcatccacgactaaaaccgccccttcacaggctgcgaggctccgtgagacttcatacgtgaagtcaacatgtccaggtgtatcgatcaagtggaagatataagtctccccatcctttgcttgatagtgtaactctaccgcattcaatttgatcgtaatcccacgttcacgttccaagtccattgagtccaacacttggtcttgcatctcacgtttggaaatcgtatcagttagttccagaatacgatccgccaacgtcgatttgccgtgatcaatatgggcgacgattgaaaaattccgaatatgttgttgtcggtcttgcattgtcgctttatccattgattttcctactttcttcctaaatcctaatccctacaattataccaagttagtggcacaagcacaatttttctatcagaccgctccagacaccccgctgcgccactgaataaatgacgtaacaaaaaagtacaagccaatatggcctgtactttttagcaggttattcaaaatccttgatttcactgggtttgagtaattgccattcttttgaatagaagtcgtcattaatctgataatgaaccggcttcgtcttcttagtcaagaatggatcaaccttttgatccacggctaaccaaccacgccagccaagatgaatcgtatcagtcatgaagtagtccttaccaccgtcctgggtcaggtccaagacgttattaaacccttgactcttcaactggtactgaatcttcttgtcaaactgagcaatcatcttcattgacagtccggtataagcagaccagcgctgattgattggtggaatgatgaacaagacatcggtgtgtgtctttgcaaactgattcaaaaccagttgaaaatcggcaaattctggtgacttcgtgtaattcaagtgtcgctgtgaatctttgagtcgcttgtaattacgttttaacttcgtgttccaaaattgattgctgatttcaagactgttcgagtccgtttgcgccgcaccgattttaccggctaattggtttaactgattaaagttatatgtcgctggtaacttgttagcttgcgcattgacagtccgtaaatttttgcccgcaattccaaaacgtgagaagaactcatcctcactgccaaggacacgtgccttatagttaatatacgtcatttgtgcgctcgttggtttaaacccagctgccacacgtgccagggcgccttccaaaatgcgatcagaagaacccgatggcatctgtaacaaacgttgagcggcataccggtccattgccgtattctgctcatcctgtaaccaatcaatggtctgcagtggtgagtaatagtacgaaaacgcatctttccgcgttccttgtggcacaaaccattgtggcgaaattacaaagacggccttcttatttgtaatctgctttttcaccgattgcatcgcgaaatactgcgtcaacgactgggtcccccgcgcaccgagtagaaatggtcggtaattgcggtgatattttgttgccagtacggacggatgcattggatcaaatcgtgaccattctgaagaaccaaagaacgggacatagccatcatccagcgcctgtcgtttaactaaccgaccttttaatacgttggctgacaaggaaacggccgcttttttctcagtatccttagaaatatggtttaatccaaatgagaacggtgaaagcagtacggccaataataagacggctgccaaaataattggcccaaaaatcttaaaaaggcgtttggcaacgttcattgcaagttctcaacctttgcaacaatcttagccggtgtatcccattctgaccgttgaaattcagagaccggcacttcgattcctaattgattttgaagttccaataaaagttggacggaacccattgaatctaagattccttcatcaaacaggttaacgtccatgttactggaaacatcttcccccgttaagtctgctaaaattgataaaaccgttgcttttgtatcatccattgtcattacgctcccttattgtaattatattatggccgggctccaaagaataacgtgttcaagaatcctgagaagatcaagaaactgaaacaaacgacgttaaacgttaggaaaatcgcaaagtattccgtaaatttattagacggcaactgcgcttgatgtttcttcttgtaccgtaaccaagcatcgttgacaaccattgctaaaccatggaatagcccataaacgatgtaataccatgtttccccgtgccaaaaccccatgatcaacatattaataacgtatgccacgttggccgttgtgatccggctcttaaagaccttgtgtttcatcataaagaataccaaccgcatgtagatgaaatcacggaaccagaaggacaacgtcatgtgccaacgattccagaagtctttgatgttctttgacttaaacggttgattgaagttcatcggagtttcaacacccatcaggtaactgataccgacggcaaacaaactgtaacccgcaaaatcaaagaataaatccatactatagacgtacatcacaccgactaacgcccatgacatgccgtgagcttgcaaggccgcgtgttcaacgacaggtagcatccgcgtaccaaagatataagccaaaatgaacttatataagaatcccaagaaaatgtagcggacccctttttcaactaacccgagatacttttcacgggtcgggacactatcgtaatccttaacgaaccgccgataccggtcaatcggcccagacgagatcgttgggaaaaacagcaagaactggccaaacagtaccggatggaattctttaatcaccccatcacgggtctccatgatcatctggaccactttgaaagtcaggtaggaaattcctaagaaaccaataattgaattagcaccatgtgccacggctggtgtgatcttaacgacagctagtggaataatcgctaaaatcacactgacaacgaaaacccagcccttattaggtgaatctggtcgttgtcgatactttgagtacaaccaaactagtgtgatctgatagaccaaatagataattaacgcgatcccagtgcgccacttaacaccgccaaaggtcagcattaagaagataaacgatatcaatgattcataccaatgggatcgccgaccatataacagaccaatcattaacggtaacaacgcgataaagagcagcacaaagtacgttgggttaccatatgggtcaaaagaaatcattctgggttaacctctttaatgatcgacttgacatcaatcttaccgttaggcgttaatggcaagctcgtttgatagacgaaccgttgtggaatcatgtattccatcatcattccttgtaggtcctttttaattgcagtggtcaaagcaaagtcactttcgaagtcattcggctttggtaccacgtacgcaatcatttgcgttactttgtgctctttatcgtattttggaacggcaacggcttgtttaatatgctgttgctgtgctaagaagtgatccacttcttctagttcgatgcggtaaccatgcattttaatttgaaaatcaacgcggccacgataacggaacagaccgtccgcatccatcgtgccaatatcaccagaatgataggcgggttgcccgtctaattcaaagaaagccttggcagttttttcagagttgttcaaataccccttcgaaacggatggtccggcgataatcagttcaccttccgtgccatttggaaccgcctcaccattttcatcaaccacaagtatccgcgtatcagctttggcataaccaattggtagccgatcatactgcgctaatgcggcatccgtaatttcaatttgagttaccgcgacgcaggtttcagttggcccgtacgtattgaagatccgggcatctgggaaccgtttcttgagtgtcgccgccgtcttatgtgtgagttcctcaccacagaacaagaagtgcgtcaaagttggcaagttttcagcattaaactttggttctagcaaacaaatgtccataaatgatggtgttgagacccaaacgttgattggtaacgtcggcaacgcagcaaataattgtttgaaatcatctgtcacggccttcggtaatgcgtatagtgtcccacctaacgctaaggttgggtaaacgtccatcacggataggtcaaatgaatatggtggttgcgacagcgagttcggctggtcaggcaatccgaagtcatcactcaacatccagtcaacgtaactgaccaagttatcatgactaatttggaccccctttggcatcccagtggtaccagaagtaaagataatatagtaattatcatcgccactaacgacatgatccgcttgataatcaacgggagtcgcaaagatagccgccaattgatctggtgtaatcacgggggttgtcccgacaccggttggcaaatcagcaacagcaataacggcagctggcttagcaatctcattaatcattgttaaccgctcatttggtgaatgtgtatcgattggaatatatgcccgacctgacttaacaactcctaagaaagtcgcaatcatttcaaacgtctgaccaccaaacacaataattggatccttggctggtaaatcgagcgtgtcaagatgcgccgccaaggcatctgaataagcttttaattccgcataagtgtgcgttacaccttgcacatcataaaccacgttattgggttgcgtccgtgcataatcatcaatcgttgtaatgatgttcttaatcataattaaaactccccccaaacaatagtgttactgcatccatttttaaaattcgttgtaaataaacttcgcttggttgatcccactataaccgtaaagataaaccaaggcgagcatgacagcaaagtaaaatactgtaagtgcaatgaattgaacgaccggacgttgaaaccagcttttcaactttgcaaacatgccatcacctcctccactaacccaatgtcagttacttaatatcacccttcattaattccgtaaaaatcttgttggctgttgcttgaataccagcagctttgcgatagtagttactcattaatacaacaccagtcttcccatccggtgagaggaagatgctggattcatagccataaccaagtccgtgtgaccgaataccattactcatgttataaacaccaccgccatattcacctgtggctgtgcgcgtgtgcaaaattgcaacgttcttttttgacagcaactgccctttaagaatggcactttcaacggtaaataaatccgcggtactcatataaacttgcccagtacctaactcattggccatttgtgatttgctttctggcattgtttgatcataattcggaagtgtttggtctgcaagcgctcggtaaccagttgtcgcatcttgaccttgaccatgaatcaaaaagcccgtttcattcagattcaacttgtcaataaaatgtgttgtaaagaagtgctgatatgattgaccagttaccttgcgaataatgccagctagcaacagaaaattaacggatgaataattataaattccatttttatctgggtagtaaaaaacattgtgagccgcaaaatcaattacttgattttctggtaagaattcttttgaaccgctcttcaaacggaaccctgttgtcatatctaacatttggcgaagcgttgtctgacgcccatgctttaaagttggataatacttcgaaatcggatcagtcagcttaactttccccgcctgcaccaactgcataatgccaaccgccgtcattgacttttgaatcgataaaatttgatactttgaattgactttattacgttgatttttagccttgtttgcgtaaccaaaggcacgattataaatgacatggtcattcttaacaactaatgctgaccccacaaaatggcttaggtttaaagccttagtcacttgctcatccgtgttcttattattcgaaaacgttgtctggttaatcttacgactaagctggctattttttaatgccgctttcttattcaatgctttgtcagtttgacgctttttagcaatcgctgcttgccgctctgtatgataaacatagtagccgccaccagcacccacaatcagcagtccaagcaaaactgttactaaaagtttgctttgcttcacaatgattgacctccccattagctatcaattacgaaccgattggtgatattagctacgccgccaataggacgtaagttcaagttatagtgtaacaacctaccgaccaataacggttaggccggctcaaaaagatcaaaatcctgcattttcgttcgctgatacgacatatttgtaacggttttgtaacatcaacgttacgtcccccgtaagctagcagcgtattacttcacctccttgactaattctagcactcactaatccccggacgacaggataacgaaacagtttgcacaaaaaccgtgttactgaaaggtcacttaataaacaggccggagtgcttgattgacactaaaaaaagctgaacaatcctcatcacatttttgtgatgggcatcgcccagctttttgtatatttctggaattagttcgctcggttaaacaccccgaagcttgtcaaataacgaactcttgccattgccagcaactgatttgccgctagctttagcaaaggtcttcaaagcttctttttgacccttgttcaagtgcgttggcgtttcaatattaacggtaacgcgttcatcgccgttgccattgccacgtaatcgtggtgcacctttaccacgtaaccggaaagttgtccccgtctgagtaccagctgggatcttcaacttaacgtccccgtgaaccgttttaacttgaacttcatcaccaagagcggcctgaacgaagtcgatcggcaacttgaagtaaatcgtcgcgccatcccgttcaaagtccttacttggctcaactctgaagataatgaataaatcaccataagggccaccattcgttcccgcttcaccttgattttgaagccgcatttgttggccttcttcaactccagcaggaaccgtcactttgatggaatgactttgttcagtatgaccagagccaccacaagtggcacacttgtccttgatttctttaccagttccatgacaaacgtcacaaacttgttggctcatcattcgaccgagtggcgtattagtctgtacctgaatatagccagcaccatgacatttcgaacaggtcactggtgacgttcctggcttggcaccagagccaccacaagtctcacactgttcctcacgattgtaggtgatggtcgtcttcttaccaaagatcgcatcttcaaacttcagtgtcatctcatactgtaagtctcggccttgttgcggggccgttgggttagaacgccgtgaaccaccagcgccaccaccgaagaaggaactgaaaatatcttcaaagccgccaccgccgccgaagtcaccaaagtcttgaccgccgaaaccgccggcgccaccgaagccttgttggccaccagtcgatccgaattgatcatactgtgcccgcttctgggcatcgcctaacgtttcgtacgcttcattgacagctttaaacttttcttccgcgccaggttcatgattcaaatcaggatgatacttcttcgaaagcttgcggtacgccttcttgatttcgtcctgactggcatccttttcaacacccagaaccttatataagtcttgctctgccattgtaacctcctaatgaaccttaattaagtctcattaatactagcatatttaaagcaaaaaggccaaagccacgtggccttggcctttttgttctgccggtgctacttcttatccttgtctttatccaagtcttcgaaatcaccgtcaaccgtgttgtcatcactgcccttggctgagtcggcattgccagcagcattactgtcggcaccgccttgtgcaccctgagcttcttgagcttgttgatacaacttaactgataagtcctgaacgatcttgttcaaatcgtccttcttggccttcatttcgtcaatgttgttatcatcttgagctttcttcaaagcatcacgagcatctttggctttcttaacttcatcttctgaaaccttgccttcaagatctttcaaagtcttgtcggtagtaaagatcaattggtcaacttcgttcttcaagtcaacttcttctttacgtttcttatcggcttcttcgttttccttggcttccttgaccatttgatcaatttcgtcgtcagaaagacccgatgaactcttgatggtaatcttttgttctttattagttcccatatccttagcagatacgttaacgatcccgttcttatcgatgtcaaacttaacttcgatttgaggaacaccacgaggtgcagccggaatatccgttaattggaagcgacctaacgtcttgttatccgctgccattggccgttcaccttggagcacgtgaatgtcaacagctggttggttatcagccgccgtactaaatacttgcgacttgctggttggaatcgtcgtgttacggtcaatcaacttagtgaagaccccacccatggtttcaataccaagtgaaagtggcgtaacatcgagcaaaacaacgtctttaacatcaccagtgatcacaccaccttgaacagcggcccctaaagcaaccgcttcgtcagggttgatagaatggttagattctttgccagtccacttttcaacagcttcttgaacagctggaatccgagttgacccaccattcaagatgacaacgtctaagtcactagccgataaatcagcatccttcaaggcattttcaacaggaatgcgcgtcttttcaactaggtcagcagttaattcattgaacttagcacgtgttaacgtggtttccaagtgcaatgggccactagcaccagcggaaataaatggcaaactaatttgagcttcagaaacacctgaaaggtccttcttagccttttcagcagcatcctttaaccgttgtaaggccatcttgtcttttgataaatcaacaccgttgtcagctttaaagccatcaactaaccagtcgataatcttttggtcaaagtcatcaccaccaaggtgggtatcaccatttgtggataatacttcgaagaccccgtcgcctaattccaagatggaaacatcaaaagtcccaccaccaaggtcatagactaaaatcttttcatctttgtcggtcttatccaaaccataggctaaagctgccgccgttggttcgttaataatccgttcaatgtttaagccggcaatcttaccagcatccttagttgcttgccgttgggcatcattaaagtaagctggaacagtcacaacggccttttcaaccgtgtcacccaagtaatcttcagcaaagcccttgatatattgcaaaatcattgctgagatttgttgtggggtgtagtccttaccttcgatgctaactttgtaaccagcttcacccatgtgacgcttgattgaagctaccgtattcgggttagtgattgcttgccgcttggcaacttcaccaacttgagtttcgccatctttgaatgccacaactgaaggaaccgtccggccaccttcaggagtggtgataatcttaggttcattaccttcaagaaccgctaccgcagagttagtagtcccgaggtcaatcccgataattttattacttgccataaattaacaaacctctttttaatttagtatttttattgattaattactgtgccacaacaaccattgctggacggagggtccggtctttcaataggtaaccccgttgtaagacttgtactaccgtatcagctggatgatcatcatcaactggcaccgtttgaacagcttggtgaatattgggatcaaacttttcgcccgcagccgcaatttcggtgaccccatgttttttcaaagcatcctgtaaatggccatagaccatttcgacacccttcttcaactgttgggccgcttcatcgtcagctggcgttgccaaagcccgttccaagttatccagaactggtaagacatcctttgcaagtgcttgaccgtcatatttcaacagcgccgcttgttcttttttgttgcggttttgcatgttgacgatctccgcctgtgcacgcaataactggtcatctttcgcatctaattgcgctttgagatcagtaatttgttgtgtcggatcgaccgctgtcgtttgctcagcttgatcatcagtcgcactcgtcgctgcctgtgtcgcttcactggcagttgacattgctgctgaatcagttgttgacgcttgtgaatcttccggcgtcgtccgcgttgatttctttgccaatgttttcatctccctgtccgtcactcgtcaaagtaccggtaataatctaataatttgcgggctaattctcgttggaacgcacccatcagtccaatcatccgtgaatacggcatggcggtcggcccgagcaaggcaatcacaccttgtccgtgttgatcaacatcgtaagtcgcggtaattaaactgtagttcttcaacaaatcgttggtgatctcattaccgattcggacttgaatccgttgaccgggtggaccaatcacgttagctaaccggtccgtttggtcgagtaacgagtacaatgactgtaactctttagggctctgctggtccgtatagttgaacaaattcaacttaccaccaacataaaagcgctcggaagctgccttggacaacacactgccaaaaatatctaagaaaccatctggatcttgcaaatactgtgcaagttttaacggaatctcatgcgttaattggcggaggacgtcttgtaacggcaggccaaccagttgatcgtcgatgaaacgaacgaccggttccagctcatcgccggtaatgtcactaggaatagtaaacgtctggttttcaacgtcaccattattcgtcactagaatcgccattacttgatgattccccaacggaacgagtctgaaaccactcaaccgactatctttaagttcaggtcgcaatgtaaaggtcgtgtaacttgtcagttgcgacaagatatccgccgactgagcaacgatctcatcgatcttgtgaaattcaccgcctaatgaatgttgaatcaccttcaagtctttgccgtccaccttttcaggctttaggatatggtcaacatagtaccgataccccttaatcgatggaattcgccctgaagacaaatgcgttttgacgattaatcctaaatcttctagtcgggccatttcattacgaattgtcgctgaactgaccttgatcggtagttcttgaactagcgatttggatccaactggattaccgccctcggtatagtcacggacaatggcctttaaaattaggctttgtcgttcagttaacgtgatcatcacctctttttagcacttaacttaatggagtgctaacacaattactaatataacaaccaccctgatgaaagtcaaggaaagacaaagtatttctagaaaagaatgcttaaattattaggaccccagtcccactatgactggacttatttgaccgtcgccccccaattagcactccttacttacgagtgctaatatacaccctcacccttcacaatgcaagcatggtgcctagcagactactcgcttttctgctgccattactcagcacaccagccacaacaaaaaaatctcaagagttacagactctcgagatttttgactagcctgatgtacattgccaacagacattctagtgaaacctggccttaacggtaatcagctttcaaactaatcaacgttcagctttattaatggcatgatcaatggtttcattatcaaattgttcttgtaagtacgcttcattgtcgattggcaagtgcacatgaaagtcagcaaaatgttgaactttcagcgtcgcttgttcgacttcaaaccccagcaagtgtccacctaattgatggtctttacttagaaagtgtaagtgaaagccaccgaccgtagcgccttggaacaaatgcggtgcgtagtagccaataatcgttccgtcaacatgttcaccggtgaattccggttgtgttgccgttgccgcgactaatgttttgtacggtggctcctgacgaggcgcgactcgcgtcttgacttttgcaaaggtcccatcgacgcgaatagccgcaaacacgttggtcaaacgatagtcatgaaccacttgttgctcgaaatcagtttgtgtgattgcagctaattgcgcactaatatcaggcttttcaaagtgcaccgatgcaaatggtaacgtctcttcgggctgaatttcccgaatttgaccatcctcacgtgcttgataggcgtgacctcctagaataatcacttcaccattgagaccgtctaacgtcccaatacccgtatcaccatgggttaagagttcaccagccgtaatcgtcccgtcaaataatccgggaacaagtaagcctaatgtgccgtgttgaaaaattgttgttgtgtccattcattgtgcctccaaacgatttgattgttgtgcaacttgaatccggggtgtgaccacaaagggatgcgccacataatagtcacgggtgttttgttcatcccgctttaattgcgcaaccaaggcatccgccccagcaaatttaatttcaccgcgcatccggtgcccccaacgcaccgttaaattgtggccataaagatctccttggaaacctaataagtatatttcaaccgtgattggtcggtgatcaccaaacgtgacatttcgtccaactgaggccattcccataacccagcgtgtcccaatctgcaccatcgtcgcgtaaatgccaattccgggaacccgggtattgggcccgtgagcaacgttggccgttggaaagccgagcgttcggccccgcgcttcaccatgaactacttcgccggcagtttcatattgatagcccagtaaccggttagccgtatcgatatctcccgcgtccaaagcgcggcgaatccgcgtggaactgatcttttcagcatctaattccgccttaggaacttcaatgatttcaaaccggttatgaccatagtcattcaaacgctgcatatttgcaatttcagctggcccgtacgtgtaatcaaaaccagcaaccaccgtttgtgcgtgtaatccaacaattaactgatcgacaaacgtttggggtggcatggcaccgaccgtggcatcaaagtgaagtacatataagatgtcaacgccgagctcactcatcaatgccgttttttgatcaattgtcgttaaataacggacttgctgcggatcagtgtgtttaaaaacaactgacggatgctggtcaaacgtcatcaccgctagtttggcgtgttgcgcctgagcggcctggcgtgccattgcaacgacttgctgatgtccacggtgaacgccgtcaaaaaatcctaaggccaatacgattggtccttcgggaatctgactaaacgccacggggtactttaaattaatcacctgcatgacaaaaactccttaattgaccgcaaacattttgaacggcttgtaccgctgttcgtccggtcgataactatatagacattttaggctgttttggtaaactaacgcaaccatcgtgttcgcatctggatcagtttgttgcccttctgccgccgtaataaaggccccattcttgacccgttgccactgctcatccgttaacgtgactcgcgggtactgacttaaagctttatcaattggcgccaataatgctccggccgttccagcatcgacgtgggccgcgatttcctcaaaggtcacggtttcatctaaagtaaagccgccactctttaatcgggtcaaatcactcatcacagcgggtaccccgagcactttgccgacatccaccgctagcgtgcgaacataagtccctttactacaagcgaccgtaaaatagatcgtctgagtctgggttgccgagtcataggtagatgcctgccgttgcttgaagctgctaattgtgacatgccgttctgggcgctcgacagtttcaccactgcgcgcatagtcatataaacgccgcccatttacttttactgctgaaaacatcggtggaatttgcgtaatggcccccgtcatctgtgccagcgcagcatcaacttggtcacttgtgaacggctctgtgaccgcttggcgcgcaatctcctcaccatctaaatcttcagtagtcgttgcaaatccgagggtaatgctcccttggtattctttgccagaagccactaaaaattgcacaactttagtcgcattcccaatacaaatcggtaaaacgccatccacatttgggtccagtgtccctgaatgacctactttgcgggtctgatagagtcgtcggattttagcgacacagtcaaagctcgtcatcccacgaggtttatataatggtagaatcccgttcaacataaaaaacgccttcaatcatttaaattcggtttctagtggcagccaatcaccgtgccacggattcgatcgttcttaatcgacggttttcagtataccacacctcacaaatatgtaagcggattatcacagaattcaaggccctgagcaccgcaactaagataccccaaatcgacacgctggtccggtgccactgacgaccacgtatgtgcctggcaaagctgtatttaactcattgatccagaaaaccgtgagcttaatccctattagtcaaataaaacgactgaaaaacaagaatcgcacaaattagtccccttatcaaaaggataccgcgcgggaccgtccctaattacgccgatgactttcaacatatgctgccatcaaaaaagcgtgcaacggccttagtgtggctgatgtacgcttattcaatgttatcgtcttaaaatgcaaccggcacgctaaccgcagttgacagctacatggttcttcaagcttggagcgcaactggctgctgattcaaccactgctgaatttgacgggcaatctgctggggtgtcagttgatcggttgcgatcgtcaaatcggccgcatcagcatataaggcttggcgccgctgcttcaacgcaatcagtgcccctgtatccaattcattgacaagtggtcggctagtatcatttttaacacggttaatagtggtttgatcactagccgtcaaccagataactggcaccgcgctttgtttcaggctaattgcattcattgcaatggtcggagtaccaccaccggtcgataaaatcccgggtgtttcgagtgcttggagcaaagtctgatgctccaattgccggaagtacccctctccttgctccgcaaaaatagtcgtaatcgaccgtcccgcccgctgaacaatcaaatcatctaaatcagcatgtttagttgctaacccggccgccaaaagccgaccgaccgttgttttcccactacccataaatccaattaaaattgctcgcattcttaattcctccttacaatctgataacccgcatcagctaacaacgacgatgcttgcgttctcgtctttagatcactaaatgtcagttgcaagacaccatcaatctcttcacgagtctctaaaatatgaatattgactaagctcagctgagcctgtgcgagccgctgagtgacatccgcgagagcgccaacacggtcggggacgttcaaaaacaaatcataaaagtttggtagtcctcccaactgttccggtcccaagtgatcacgcgtcaccttagctgtcgcaaaaaattcgtacaatgttgcttgatcatgcaccctaatggctgtcttgatgcgcaacagttggtcaatataatcctgcaattgattggttattagttcagcattagtcatcaggatggccgcccacatcgtggggtccgaactggcaatccgagtaatacttttaaacccaccagccgctaatcgcaacccgagtgccgaatctgccaaagccacctgagtctgatcaactaaagccgcagcgacaatatgtggcaaatgacttaactgtcctacaatccggtcatgctgtattgcagtgaccgtcaaccatttgacgtgagtcgcttgtaacaatgcttgcagccgttgaacggctgcttgattagtccggcccggcaccaacaagtaaaaggcgttctcgaataagttggcgcggccagccgtcacacccgatttatgtgaacccgccattggatgaccgccgatgaaagtcacaccgtgctgttgtatggcaagcgcggcatgcatcaccacttgtttagtactcccgacatccgtcacaagcacccctgccttgagtggcatcatagccagtcggtgcaagtcagcaacgatcacatcaactggccccgctaaaataatcacatcagcgtcgctcgcgaccgcggccaaatcagtgccactagcatcgatcataccctgttgacgcgcataactcaggctgacatcgtcacgatcaatcccaataatgtgcaccgtgggatgggcctgcttaatgcttagtgccaacgaactgccaattagccccaaacctttgatcaatacagttgtcatcttcacaccccctggcttaaacgtgctaaatcttcaaagaacgtcgggtatgaaatgttcacagcttcggcggactctagttcggcgggagcggctaatcgcaacgctgcaatcgccatcatcataccgattcggtgatcgccatggctggctaatggctcggtcggctgccgccaagacttgcgaccatcaatcacgaagccatccggttgcgaagtgatctgcacaccaagttttcgaagctcggtcacaatcgttgcaatgcgatcggtttccttgactcgtaattcagcagccccattgattgtgctaataccattcgcagtcgcagccaacaatgcaactagtggcagttcatcgattacggcaggaatttcagtagcagtgacttggaccgggtgcagttgtgcaaaccgcacgtcaagcgtgccaactggttcgcccattcggtgtccatgatcgaccgtcacttgaccacccatccggcgcaaaatgtttaagaaacccgttcgtgtcggattcagtcccacgttcgttaaccggacatgtgaatttggaataatcgtcgcggctgtcacgaaaaaagcagccgaggaaaaatcgccaggaatcgttagtgaccgaccaaccaaggctggctgcggttggaccgtgattgttcgctgatcaggcgccgtttcaatttgaccaccaaattgttgcaacaaccgttcagtgtggtcacgagtcggtaatttttcaataattgtacttgcttgatcggcctgcaaggctgctaaaatcaaggcgctcttaacttgtgcactagcgacctgcatctcggtacaactaccatgtaaagtccgaccagtgatcgtcatcggtaagtgcccggctgttaattgtacctgcgcccccatggcttgtaatggttgacgcactcgctccatcggccgttgactaagagacgtatcaccgaccaaggtcgtctcaaacggttgaccggctaacaacccagttaataagcgagtggccgtccccgcattccccatgtctaatggttgttgtggttgggtcaacccatgtaagccgcggccactgattgtaacggtcgtatcgacacgcttgattggcacccctaacttttgcagcgccgttaaagtcgataggcaatcggcggctggcaaaaagtgatgcaagatcgtcgtcccttgactaattgcccctaaaatcaagcctcgatgtgagacacttttatcgcctggtacacttaagtcaccttgtaacccactagctggttgaatacttagtttttttatcattaatcatcatcacctaatttatttgatagacgcaccacaccatcgaaggtgtcaaacgtgcaagttcacgttcatgagtcgtcagtgtcacgtttttctcattagttagcacgtaggccgcctgattacgttgataagcctgatacgctaaatatttactggcgactgtttgcaccacgacctgatgcacgaccctcgtcaacaattgggcggtcgctgcatgcgtgtaaccaatttgattatcggcatttactcgttggagcacgacaagtggatcgagctgggtcataaaacaactgctcaacgttaattgggacaataatgcgtaatgtatatccccccagctggcattcagtgtgtctgatttgaaagcagctggtatcaccagttggtcaccagaataggccgttaaatcagttaaaatggtttcaaagctcgggtgttcgacaatcaccgcttggtcctgccagttgcgatgattataaacttgcgcggccgcgtaactatccgtggcggtcgggcctaaagtatgaatctgcataagccctcctaatattgtcggagttcttcgcggtatgccgtcactgtttgctggaagcgagctaagttactcccgtcaaacgttgccgtcaatgctcgcgttaattcaatcgctaccacactttcaaccacaatcgaggcggggacgatggccgtcgtgtctgaacgctctacgctcgccttttggctgactttggtcgcgatatccacactttgtaatggtttgtaaagtgttggaatcggcttcatggcggccttaacaacaatcggcattccattagtcatgccaccttcaaagccgcccaaatgattggtcaaccgtgaccagccggcgtgttcatcccaactaatctcatccatcacttggctaccataatggctggcagccgcaaatccatcaccaatttcaacacctttcatggcgttgactcccatcactgctgcagctaactgtccatctaatttggtatcccagttcgtgtaactgcccaaaccagccggcacattttcggcaacgacccggataacaccacccaaggtatccccggccttcttcgttgctgtgatcagctcatggatttcgggaaccaaggccgcatctggtaatcgcaaatcattttgcgcgatttgggcttgtaattgatcaacggatagtgttaaatcggccgtcacttgcttagggccaatttgttgaacgtagccaactaggtgaatatctagctgcgccaataattgcttacaaatctgaccgatagccactcgcatggctgtctcacgagctgaggaacgttctagcacgtttcgtagatcgcgatgaccatacttcattccgcctactaagtcagcatgccccggacgtggacgagtgacttgccgcaacgtattggttgccgtagctggacttaccggatccatgattgctgcccagtgcgcgtgatcgcgattcataatcgttaatgcaatcggggaacctagcgtaacaccgtgccgcacgccaccagtgatttggacggtgtcatgttcgatctgctggcgattgccgcggccaaacccaccttgccgggctgcgaggcctgtattaatggcatcaatgtctagctgtaagccagccggaataccggtcagcacccctgtcaattgaggcccgtgcgattcgcctgccgtaacgtaattaatcatgatcaatatcctccttgtgtaaattcgtgtgtaaatccgtctgatatgcgcgtgagttatgcataattgcttgataaatagcttgtaaataaggggtatgcgcggtctgggtactcttcaccgcaacttgttgtaacacccgttgttcacgttgctggtctaataccggaagttgctgttgttgcttcaactccccgatggctgtaaccgtctcaaaacgttgattgagtaatcggacgatttgctggtcaatatgattgatacgttggcgttcttgactaagtgtggttgggacatgtagcgcccatacagctaggccgacaaaggcgagaccactgacagcaataactaaatcaaagcgcatcgcggtcgcaatattttgctttgacagccacccagtcacgagcggaatcgtgaaggaagcaatactgccaaacgtgaaataaattcctgtgattcggcccttgatgtggggatagcctttgataaataaattgaggccgacctgcatcacgccacccgcagcagtaaacccaaacccgaaagccgccagcatggacagcccagccgctggactataacagataaccgctaacgccagcagcgagccgccattcattgccaacaacaatttggtttctgccaccccacgacgtaacaaccagaaaatcacaataacgccggtgattgacccaatgctgtaaagtgaaagcaaccagtgcgctaacactgacgaaaaatgcaacgtcgtagtggcaaacaagctgacccactgcgtgtagaggatcataagtgccatcgaagtatacccataaccagctaaaccaactgtcgccaaccagcgccggttcttaagtggttgctgggatacgcccgttccggcttgagcaacttgattttttagtggaaactgctgccggttcaacaggatactgttgaccactaggattgccgcggccaggataaatgaccagccataccagattcgttgtgcttcaaagttggcaacgagcagtggtaataagaattcaccggcagacatgaaggcctttaacaagacattggctgagccttgccgcccacccatttcaataaacgtcgtgtaggttcccgcatccaacgcggagttcgcaataccggccaaaatcgccaaaccgtatgccagctgaatattagtgaccaatgccatccccacaaagaacgtgaagtagcaagccatgccaagattgacgaagactttacggccaaaacgatctgataaatttcccagaataaagtaggccagtaagcgcccaatgccaatcccagaaatgacataggaaaccgtcgctaacggggtctgccagtgttgacttaacgcttgcatgttttgcgttaaaataattaagccaataccatgaataaagtagtttaagtaaagactgattgataattggtgctgacgcatgaataacaactccttcgtggaaataaaaaaagccggctagattgtgaaaatctagccggctcatcaaaatttaatcctaattgatgatattattccagctagactcacggtgtctagctggccaagatgaattgacttcgcttagacacgaacgtaggtgccgtccgtatctaaggttccaacacgggcgctacctaaaataagcaaagccataataataagttgcgttgaatgctaacgtcgtcataatcatctatcctttccgtttcattgattgcttatattaaaacattctcattttgattcgtcaaccctaatttcattttaattttgcaattaagaaatcattttcgcttgtaaaagcgccacgatgcgtaattcgcctcatcctactactatttacaaaaatcgtcttcagtacgactactcattaaaccaattgtttgcgacggtcgcgagcaggctaccttgattagtcagtctaccgacaacgttcaagcagtgtgtgaatgactagtgtgaccctacaatcagcaccatctaaaccgcttaacctcagtgattgacagcgaacggctccattcaatttgaacacaaaaatagtcgctgtcaatccatctggattcacaacgactatttttccagcgcctaatcttgacgctttaagttattaattaattcatcaatccggctaccgtattgaaccgagttgtcgcgttcaaaagttaattccggggttttatagatgctaagtcgtgagcctaattcactacgaattaatcccgtcgccttagtcaatccagccgccgtcttttcaccatcggatgccttatctgacaaaatactgtagtagatggtcgcttgttgaaggtcgccagttaccgttacaccggtaatggttacacccgcaacccgtggatcacgaacccgttttaacaaaatatcattaacttcgcgttcgatttcctgttccaaacgaccaactcgataatgttgtgccatctgctaatcccccttttaaaggttattcaactggaacttccttcatcacgtaagcttcaatgacatcgttgactttaatatcgttgtaatcttcgattcgaagcccaagttcaaagccttgtttaacttccttaacgtcgtccttgaaacgccgtaagctagctaacttgccatcataaataacgacaccatcacgaatgacccgcacaccagaatcccggtggatgacaccatcagtgaccatcccaccaccaatcgtaccgatcttagaaaccttatagatttcacggatttcggcttgaccagtgatttcttctttataagttggttcgagcattcccttcatcgcgctctcgatttcatcgatcgcgttgtagataacttgatgcaagcgaatatcaacatcgtcagtatcggcttgggctttggcttgtggtgttggccgcacattgaacccgataataatcgcgttacttgcttccgccaaggccacgtcactttcgttgatcgccccaaccgctgtatggatgatattgacccgcacaccttcaacgtcgattttacgtaaactaccagctaaagcttcaacagaaccttgaacatcagccttaataatcacgtcaacttccttaagttcaccttgtttcattgaatcaaacaagttatccaaggtgacgtgagcagtttgcttccgttcttccatcaatgcctgcttagcacgttgttcaccagcatcacgggccgtcttttcatcatcaaagaccacgaagcgatcaccagcatccggcacatcattcaaaccagtgatttcaattggcgtcgatggcacggcttccttgatccgcttaccatggtcattggtcatcgtccggacttttccgtaagtattccccacaacaattggatcaccaacatgcatggtcccttgttgaacaagtaacgttgcggtagaaccttttccacggtcaagactagcttccaatacagatcccgcagcattttgcttagggttggccgttaattcgagcacttctgactgaagtaagatcatatccaacaattcatctaggttcttaccgaacttcgctgaaatctgaacaaagatcgtatcgccaccccaatcttcaggaatcagaccatattcagtcaattgttccatcacgtggttagggttggcacccggcttatcaatcttgttaacggcaacgatgattggtactttagcagccttagcatggttgatggcttcgattgtttgtggcatgaccccatcatcagcagcaacaactaacacggtgatgtcggtgatgtcagcaccacgcgcccgcatttcagtaaaggccgcatgtcctggcgtatccaggaatgtaataaccttaccatcatgcttaacttggtaagccccaatagcctgagtgatcccaccggcttcgccctctgtaacgtgagtatgccgcaattggtccaatagggtcgtcttcccatggtcaacgtgtcccatgaccgtaacaaccggtgcccgtggcgccaaattgtcggtattattaacttcatcatcaaagaacttgtccaaatcggtcacatcaacttggaccttttcttgcgcattgatcccgtaatcagtggctaagatttcaatcgtatctttatccaaggactgattttggttaactgcaacacctaacatgaataacttcttgataatttcagcaggctcacggtgcaataatttacccaaatcctgggcattcatgccgaccgtgtaaaccagtgtttctggcaacggcttgtccttacgaactggcgctggcttattattgacctggcggatccgttgattcttattgttccggctcttattgttccggttgttacgccgacggttattgttgttaccgccacgataacgaccaccaccgttattgttgctattcaaactaccaccaaagcgaccgctgccattacgcgaactattattcgacccattgctccggttactgttgttattattgttgttcgtcgtagtccggttgttgttccggttctgaccaccattattggtgcgattaccggtactgttggtacggttgttactcgtatttgagcgattgttattattagaccggttattattattgttgttagaccggttcgtattgctcccaccgttattacgagcactgttgctccgtgaagcattggccgaacgattgccgttattactgttagtacggttaccgccattattgcttcgattaccgttactattacgactttgactattattttggttattattacgattattattcaaagaatcaccactctgttgatgacgcgagttggattgctgctgattagcagttcgtgtcacattttttgctacggcttgcgtagcccgactcgttttagctggagccggttgagatttaggatgggtaactgtggtcgtgccttgtaactggcgcgcctcactgtcaccgagtgtcgacatatgatttttgacggagaatcccaactgctgtgcttgcgcaatcagctgtttacttgggacgttgagctccttcgctaactcataaattcgctttttccccatatcttcaccctcctttactgtgtcatgatcgccaccattttcttggcaaatccggcatcggtaattgcataaacagtgcgcttattaccagtaaccgtatttaattctgctttagtaaaggtatcgatcactggaacatcataagattgggccttatcatgaaactttttggcagtcgtgggaccggcatcgctggcaataaagaccagtttagccgtctgattacgaattgcagccagggctagcccttcgcctgcaatttgcttgctggcacgccgtgaaaggcccagtaggtttaaacaagcttgcttaggcgtcatttccgaagagttcctttcgggcttgttgatgatcaacataagccactaactcatcgtaaaagtctgcacccactttgataccaaacgccttatcaaaagtcttttcttgcttggcacgttgtgcaacttgtacgtctaaggcaatgtaggcgccgcgtcccggctttttaccagtcggatcaacggacacttcatcctgcttattcttaacgacccggactaagtcttttttgggatgcatttcacccgtcacaatgtcctttcgtaacggcacttttctttttttcataatcccagacctcctttagttacttcactcacttagtgacgaacttattcagcgtcacttgctgattcatccacagcagtttctgaggcaggcgtcgccacggctgcgtcggacgttgctggttcctcatcttcgccggtatcggactgcactgccgcgtctgatgctgcttcagtcgtttccgtttcggcaactgcaacatcatcagggtttgcatccattatatcagaagcttcggtttccgatttaatatcgatcttgaacccggtcaatttagcagctaaacgagcattttgaccacgcttaccgattgccaatgataattgataatctggaacgaccacggtacaaccccgctcattttcaggatcaaaaataacatccaaaacttccgctgggttcaatgcattcgcgataaatacggcttgatcatccgtccattccacgatgtccatattttcgccgtgtaattcattgacaatcgtttgaacccgttgtcccttgggaccgacgcaggtaccgactggatcaacgttaggattgtttgaacgaacagcaactttcgcccgatcaccggcttcacgtgcaatcgaaacgatttcaacgatgccatcgaaaatttcaggaacttcttgttcaaacaaacgtttcaacaaatctggtgcagtccgcgaaacgaatacttgggggcccttcgttgcgttttcaactttcgagacgtaaaccttaattttgtcatgaatccgataaacttcaccaggtaactgatcagaacgacccatgaccgcttctactttgcccaaactaacgtagacaaatcggttatcttggcgctcaacttcaccagtgacgatttcattttcatactggctgtattcgtcataaataatgccacgttctgcttcacgaactcgttgcatgatgacctgcttagccgtctgcgctgcaattcggccgaagttcttcggtgttacttcaaatcgaatatcatcaccgatttcgtaggctcggttgatagccaatgcatcttgcaaactaacttctaaacgtgaatcaaagacgtcttcaaccacttctttaacggcataaacgtgaatattacccttaatttggtcaaagtcaacttcaacgttttgagcctggccataattacgcttataggctgaaacgagtgccgcttctaaggcttcgatgacaacttcttttttaatgcccttttctgattcgagggtgtctaaggcccctaataattccttgctcatgtgtagactcctttacttatttagaactttaccgctaagcgggcttgtgagatttgttctcggttgatcgtcaccgtcttgtgacgtgtcttatccaagtaatcgatggtcaaagtggtcggcgtcaccgccgtcaaatcaccttcaaaaattttcttgccatccaacttctggtataagccaacgtgcacgtacttaccaatagcattttgaaaatctgcttccttcttcaatgggcgttccgcaccaggagaagaaacttccaaaaagtaagcttggggaatgggatcaggctccatcgcatctagcttttcactaagttcatcactaaccattgcacattcttcaatattaatgccgcccggtttgtcaatgtataatcgcaaataccagctttgaccctcgcgaacaaattcaagatccacgagttcaaactggtgagcactgacaatggctgcggccactggctgaatggtttcaacaacattactactcaaggctgcgcctcctattcagattagtccaataaaaagagtgagcatcgctgctcactcgttaacgagttttaaattacaacccatatattagcacaattatgttgaaaccgcaagtttacgccatttatagcatttagccgttagctttcaagtcacggtaaacttccgcttcaacagcctgacaattgccggtgtatcaacattacaggccctaaatcagataaatctgtctgagtgctgttaaatgcatcaaccaccgcaaaaattcatcaaactttaacaattgtcgtgttttctagaacaacgagagttggttttcatctggcaaatcacttaacacaccattttcagtcataaagtcgatcaaactcttcgacacttttccacgcttagacaggtcttccttcgacaggaacggcttgtccgctcgggcagcaacgatttgcttggcaacgttcaaccctaaccccggaactgctcggaacggcgcaatcaacgtatcaccatcgatcagccaatccgaagcatcagatttgtcaaggtcgaccatggagaatttaaagccccgctccaacatttcgttggctaactctaaaacggtcagtaagtttttctccttggcgctagcatccatccctttgtcagtgatcgccttcattgacgctttgacagcatctttaccatgggccatcgcaaccaggtcaaaatcgtcagcacggactgaaaaataagccgtgtaataaatcaacgggaagtacactttaaagtaggccacccgcaacgccattaagatataggctgccgcatgggcccgcgggaacatatacttgatctttagacaagattcaatgtaccagtcgggaacgttggcatccttcattgcttgttgccattcatccgggatcccccgacccttccgcacgtgttccataatttggaaagacatatcagattccatgccgtagtgaatcaagtcggtcatgatgttatcacgacaaccaataacttcggccagcgtaaccgtgccatccttgatcaattcttcagcatttcctaaccacacgtcagtcccgtgtgaaagtcctgaaatctgaagtaattcgttaaacgtggatgggtgagtctcttcgagcatcccacggacaaaccgcgtcccaaattctggaattcccagcgtccccgttttcgagaaaatctggtcttctgtgactcctaaaacttcaggactggagaaaatcttcatgacgtgcggatcaactggtggaatactctcaggttggacacccgacaaatcttgtaacatccgaatcatcgtcggatcatcatgtcccagaatatcaattttcaaaatattatcatgaatcgaatggaaatcaaagtgggtcgtttgccaggccgcactctgatcatcagccggatactggacgggcgtgaaatcataaatatccatgtaatccggcacaacaataataccggccggatgttgcccagtcgtccgtttaacgccagtcgttccctttgctaatcggtcaacttccgccgaacgaagtgtttgattcgtatcccgttcatacgccttgacataaccataaccagtcttatcagcgaccgttccaattgtcccggctcggtacacatttttctcaccgaacaagactttggtgtaattatgggcaataggttggtagtccccagagaagttcagatcaatatctggcaccttgttcccataaaatcctaagaacgtttcgaagggaatgttttgcccatcacgcaccatgtcagtcccacattcagggcaatccttaggtggtaaatcatagcccgatccatactcgttattcgtataaaagtgcgagtactgacaatttggacaccgataatgcggtggcatcgggttcacttcagtaatcccagacagcgtcgctacgatactcgaaccgactgacccccgagacccaaccaagtaaccatctttattactcttaaacactaggcgttgggcaattaagtaaatgaccgagaacccgttaccgatgatactcttcagctctttatccacccgtttttggacgatttctggcaacggattaccgtaccacgcatgggcacggtccatcgtcagtttttcgatttccgcttcggcacccttcatccgcggagtatacaacttatccttgaccggtcgcacgatttcaaattggtcagcaagcgcgcggggcgtgtcaaccacgacctcatgtgccgtctccgtacctaagaaatcgaaatctttaagcatctcatccgttgagcgaaaatgcacgtctggccgttcagtccgatttaacgggttaccgggctgtgaatgaatcaaaatcttacgataaatcttatcctcaggattcagataatgcacatcccccgtagcagcgaccgggatattcatctcatggcctagttccaccatgttgctgataatttcttccaaatgatccgtatcagcaatcaaaccactctcgatcagcgccgaatatgccggtttcggttgtacttccaggaagtcatagtagccggccttttgtcgggcctcttccttccccttttgcatcattgcagtaaagacttcaccactagaacaagccgaaccgaccaggatgccatcccgatacttgtttaaaacactgcggggtacacggggcacgcggtaatagtactcaacattcgacaaggaaataattcggaagagatttttcaaccccgcttgggtttgcgcatacaatgtcgcatgaaatggccgggcatggcggtaagccgcattttcattcatatgatcattcagctgatcgtggaattgaacctgataacggtcctccgcatctttcaaaaacaggtggttcaaatgaccagtcgtctcagcatcatagatggcgcggtgatggtgctccaaattaacgttgaattttttggctagggtgtttaagcggtacccgcgtaaattcggatacagccaccgcgccagcgtcaacgtatcaataattggatttgtaatcggccccatgtgatgccgggcatagcccgtattcataaagccaatatcaaaggtgacgttatgaccgaccacgattgcatcaccataaaattcgcggaaaagtttaaacacttcttcttccgatttagagccccgcaccatatcatcggtgatactcgtcaaattagtggttgtttccgacaagtgaaaaccagggtcaataaattcctcaaactgatcaacgacgttccccttgaccatcttaaccgctgacaattcgatgacccggtcataaatggcggacaaccccgttgtttcagtatcaaaaataacgtaggtggactctttcaaatcaacgtgggcgtcattataagcaatcggcaccccgtcatcaaccatgttagcttcgacaccgtataaaattttgatattatttttttcaccagccgcaaacgcttctgggaacgcctgcgcccccgaatgatccgtaatcgcaatcgccggatggccccatttagcggcttgtttgacataatcactgacactgttggttgcatccatctgactcatattagaatgcaagtgcaattcaacccgcttctcatctgccggcgccgtgtcttgccgactggcatgcgacgtttcgttaatatcatacgcattgatcgttaaatcgcgcataaaactatcttcctgcacagaaccacgtacacgtacccacattccaggcttcagtgccgcgaattgtgcctcgtcatcagcattccgtgagaacttcttgacgaccattgacgaactatagtcggtcacctttagaatcaataactgccgctgggaacgtaacgtccgcacttccatatcgaagacatagccttccacgacgaccgaccgttcttcttcagtaatttggaccatctgtttagccggctcttgcgggttgatctgcttgcctaattggacaggaccatcaattggtgctggtgcatccgcctgcttttgccgtttctcattggcctttttgatagccgcttccgctttttgagccaacgcttgatcagacttcgctttttgttcatgaaattccttgatcttcgcctgtgaagcactctcatcaatcatcgtgtggacggagaacttcgggaagcccaagcgatgataggtactctcaatcggccctaatgcttggttagttagaaaattttgaataacttcattttcagccaacaaaatgacccgaccatcttcataagtcggcacgttgctgttacacaatgattggaccaggggcgacttgatcccactgtgctgaacgatccattcccagtattcagctagttcacgaccattgacctcggtatcatcagtcacgatcgtaaaggtcacgcgtgcaatttctttaaaggcgatttggagtttgttttgaaaagtcataaattgtgtataaggtaaaacatgttggaaatgcaaatgaaattcccaaaccttggaagcttgatgaacggtcaatttatcgatcgctgcttctgtaaattcaggacccgttggcatttcaatttgttcgagtaacttcttgaacatttcttgttggtttaaactcaccagtggtcctccttttgttgattacaatcagttagtaagacacgcaccgtacttgttaatttgcgcttgcatatatattaaagcaaatccaatcttaaaatcaaaagccgctaaccgtgacccgctagaaatagaatctcgtttcaacaatgacttagtcgctaacaactaacccaatgccaagcaagacttttaatattaactagaaccccaattaagtgctcaaggccgcggtccacagttggcactactttgtcagtttgcttaaccgacagcgtgatgcctcggtgattaacggcatctgaaataatcttcagcgaacgcacaaatcgttcacttgaaacgttactattttatcacagtctgaccgttgagccacgtgattaatcggcaaacaaaaatcacccagtcaacagaatccaaccaggtgattgttgttggcgactatcaacgggtagttgccatatttttattaacttagttttgcagcattttaatcgatattcttgagcagaacggccaagttgttggcgatttcttcctgtttaacttccaaagtctcaccagtctggcgaagcttaatctcgacgattccttcgctggcctttttcccaatggtaatccgagcaggaatgcccattaagtcggaatcggcaaacttcacaccaggacgttccttccgatcatcatacaaaacgttgtacccagcggcttctaattgtgcttcaacttggtcggcaacctcaacctggtccgctttcttcgggttaaccggaatcacgtgcacatcaaatggtgcaattgcttttggccaaatcaacccattttcatcagcgcgttgttcagcgatggcagacaacaaccgtgagacaccaatcccatagcagcccataattaccggaatattacgtccattggcatccaagacttctgcgtgcaagtctttagaataacgggtgccaagtttgaaaatatgtccaatttcgatacccttggtgaacttcaagacgcccgcaccatctggtgataactcaccttcctgaacaaagcgaatgtcaacgtaagcttccgcgtggaaatcacgttcagggttgacgttcgtgaagtgatgaccgtcttcgttagccccgaccgtaatgttgaccatgtccttcacatactggtcagcgacaattttaacgtcatcatgaacgttaactgggccgagtgaaccaaagctagcgcccaaatattgttgggcttgttctggcgtagccatttccaagaaatccgcaccaaggtaattcttcaacttaacatcgttgacttcatgatcgccacgaaccagtgccattactggctgatcgtctgcaataaacagaatactcttaaccagttggtcagcaccaacttttaagaactcagccagttcgtcgatcgtgcccactccgggagtatcgatcttttccatatcctttaacgaagcatgtgacttctttgggacgtataaactccgagccatttcaagattagccgcataatcactcgcatccgaataaacaattgtatcttcaccaaccggtgcgatggccgaatattcacgggaatcctttccacccatcgccccaccatcaccgatgattgaacgaaacttcaaaccgacccgctcaaaaatattctgataagcttgcgccatatcttggaacgtgtcatctaatgaggcctcatccgcgtgaaatgaataggcatccttcatgatgaactcacgcccacgaagtaatccataacgtggccgatcttcatcacgatacttagcctggatttgatacaaagtcaatggcaaccgtttatacgatttgatttcatcgcgaacaattgacgtaaatgtttcttcgtgcgtggggccaaggataaattctcggtcatggcggttcttcagcttgaatagttctggaccgtatgtctcataacgcccagttgctttccacaactcagctggaatgactgctggtaccagcatttccgctgcatcaattttttccatttcttgccgaatgattttttcaatattcgtcaatacgcggtaagccaatggcaaataagcgtacattccggctgaaatttgtcggatatagcccgcccgtaacatcatttgatgactcaaggcttcggcatcattaggcacttccttgagtgttgggattaacaatttcgactgtttcatctacaaatcttctccttattgttccaaattaaatatcacttagaagaaatatcgctgaatatcattccaagttactagaatcattaataacatcaggaggccaaaaccaatcaaggtaatgacactttccgtttccacccgtagtggtttaccccgaatgccttcaacaatgtttaataatagtttaccaccatcaagtgctggaatcggtaataaattaacaattccaaggttgatcgacagcacggcgagcaaatagatcaccgtgcgcaccccggacttagcggcttgcgaggtcgtggcaaagattgccaccggcccacctaaatcgttcaaactgaacccgtgagtgaccatccgaccaagcacttgaaaaatctgtttggtaattccccacgaaccagtaaagccgtatgctaacttggcccccagactcgtgtcggtcttagtcgcccattggaccccgatttgaccgattcgattaccagagaccgtcttggcagcaggggtaaccgcaatttttttagtctgaccggcccggttgatggtcaaagtcaaccgttgcttcgggctgtcttgaatcaacagcgaaatcgattgggcactcgtcatttttttaccgttaaccgccacgatttgatcgcccttttgaataccggccgtacgggcaactgagtctgctgtcgtcgccgctacgtgggtcgttgtactcgtaacaccaccctgcataaaggcaagaattgcaaatgtaatgatggccaaaatgaagttattcatcggtccggcaaaattcgtcaacattcgttgccataacttggccgattgaaattggacgtcgaccggtgcaatttgaacttcggtaccatcgctttcaacgatcgtagcgtcatgatcgacggcgtagtgtttaacttcactttcgtccccgttctcataaccttcgatccagagttctttttcgagatcagtcgccgtcactgacagtggaattccattgaacaacgttgtcttcttactagcattgattgaatgaacaatcccatccggaccaatttgcaaactaactggcgttccgggcttgagttcttcatcttcatcatcggccacaccggccatccgtacgtaaccaccgattggcagaaaccgtaacgtataagttgttgcattacgacgaaacgcgaccgccttgggccccatcccgacagaaaattcacgcactagaatcccagcctttttggcaaagtaaaagtgcccaaattcatggacgatgaccaagattccgaaaacgataatgaacgtaataattgtaacgatcaattaagcgctcctttctcccgcgtttcgggtactcagcttaaaagaggccgaataaatgtgcaattggaaaaactaataacatactatcaaatcgatctaggataccgccatgtcccggcaagatcttaccagaatccttaacaccatagtaacgcttcaacgcggattctactaaatcgccaaactggccaactactgataagactaaagtaatcagtaccatactgatgacgctagcatagccgacgtgaaacccaattgcaaaggcactggcaacgatcacaccaatcacgctacccccaatacaaccttcccatgttttattggggctgatcggtgtgactttatgccgacccagtttgcgtccgaccatgtaagccccactatctgtcagccagacaatgaacatcaggaagagtaacatgtaaacactgacaccccgcgcagccgtgaagtagttgaagcccatcccgatgtacaggacgcctaacgtcaacattccggcatcatcaaatgaaaagcgattccgcgaccacacagtgtgtaacagtagcaagataactaagaagtaaaccacgtactccttgtttaattggtctggtaagccattgaaccagttattcggtgcaatttgaatcataactgcaagcatgcttacgattgcttcaaatgaaatcaataattttttacgcatcacgagtaactcgctcatcgcaacggcccctaacagcatggccacaatatctaaggttaccccgcccacaaaaatgactgggataaataaaattaacgcaacgacagccgtaatgactcgttgtctcataccaaaaactcccttttatttatgatccgacaacccaccaaagcgccgatcacggctctgaaaatccgcgatacaggcttgaagggtcgccgctgtgaaatccggccacttcacatcagtaaagaccagttcactgtaggcaatctgccacattaagaaatttgaaatgcgttcttcaccactcgtgcgaatcagcaaatctggatcattgtatggcgcaagtggtgccgtcatcagtgctgcgtcgatggttgcatcatcgatatcaccaaccgccaattgaccatcttgcacttgctgggcaattttttgcaccccggtcacgatttcggcccgtgaaccatagttgagagcaaagttcagcaccatcccatcacaatctttggtatctgcaatcgcattttggactgctttttgcgttgcttctggcaagtgatcaacgtagcccatgacttgcacccgcacattattttttatcaagtccggtacgaaagtatcaaagaaactcactggcagttgcatgaggtaattaacctcatcagttggccgcttccaattttcagttgaaaacgcgtaaagcgtcaggactttaacgcccaaatcacttgcggcaatcgtaatctttttgaccgtgttcataccttccttatggccagcaacccgtggtaaatgccgtgctttggcccaacgcccattgccatccataataatggcgacatgggctggaatacgttcaggatccaattgcacgtcggtgttatctgcaggatcattcttattaaaaaaagcgaacaaggcgcacctccataaaaatagcttaactatgcactattttaccaaaaaaagcactaattaactattcgtcaacaaaaaaaggcttgaatttctccaagccttaataaattggtcggtcattaaccttccaaaatttctttttctttgtccgcaacgatcgcgtcgacgtccttacccgcttgatccgttaacttttgggcttggtcttctaactgatgtaactggtcgtcagtgaattgaccatctttatggcccttcttcaaggcttccattgcatcacgacgcacgtttcgaacggcgaccttggcacgttcaccttccgccttaacgtccttggcaagttctttacgccgttcttccgttaattgcggaataactaaccgaatcgcagaaccgtcgttagctgggctaataccgaggtctgacgctaaaatagccttttcgatttctttaagggcactcttatcaaatggggtcaccattaagacccgtggttcgggtactgtaattgccgccatctgattaagtggtgtttgcgcaccgtaataatctgcagaaatccgattcaataatgatgcgttagcccggccagcccgaatattaccgagctcgcgttgtaaagcggcttccgcctttttcatccgttcctgtgcttcttttaaaattggttctgtaattgccatattatttccccctgactgttgtcccgatgtgttcaccggcgacgactttccgaatgtttccaggttcattcaagttaaagaccacgacaggaatgtcattatccatcgataaggaacttgccgtagtgtccatcacttgtaaccctttgttgataatgtcgagatgggtaagcgtatcaaatttaactgcactagcatccttgttaggatcagccgagtaaacaccatcgacgccatttttggccatcaaaatcgcatccgcgttaatttcagcggcccgtaatgcggcggtcgtatccgttgagaaatatggactcccggtaccaccggcaaaaataacgatccggcgtttttctagatggcgcattgccttccgccgaatgtatggttccgcgatttgtcgcatttcaatggatgtttgaacccgggtcggcacaccaattgattcgagattatcttggagtgccaaggcattcataatcgtagctaacatgccaatataatcagcttgggcccgttccatacccatctgggcaccagcttcgccacgccacatattgccaccgccaacgacgattgcaatttgtacgcccatgtcatagacgtccttaagttcctctgccaccgttttaatgacggggggattgattccaaagcccttctcaccagctaaggcttccccactcagttttaggattacacgcttatatttaacttccgacatcgttttgtcctcctcgaaattatctgtctatcattttaccatatatttcaataagcgtttggtatcagccgtaatccggcgcaaaaattaaccgaattctctttttaaagcggcttcaacccgttactttacaaaaagggactacgccgaaaattgctttccgtcgtaatccccaattagctaatcccttagtcagtaattagtctttaatttggttcataacttcatcgatgaagttatcagccttcttttcgattccttcgccaacttcaaaacgaatgaatgagctaaccttgccaccctttgattcgacaaagtgcgcaacagtttgatcagaatccttaacgaattcttggtcatccaagctaatttctgaaagccacttgtttaaacggccttcaaccatcttttcaacaatcttttcaggtttaccttcattcaaggcttccttaacaagcacgtctttttcatgagctaaccggtcagcaggaacttgttcacggttaacatattcaggattgatagcagcgacgtgcatggcaacgtccttagcagtagcactgtcagcaccgtctaagacaactaaggctgcaatttggccaccgttgtggatgtatgaaccaaaactttggtcagcacccttttcaacaacttggaaacgacgaagactgatcttttcaccagttacttgagtcgtttcgatgacgtcatctttaaccgtcccgttagccgtcttcaaagctaaggcgtcgtcaacggaagctggttcttcttcagcgatcttgtcggcaacttcagttaccaagttcttgaacttgtcagttgaagcaactgaatcagtttcacagttgatttcaacaatggcagctttgttgtccttgattgcaacagcagcaatcccttcggcagcaacccggccactcttcttctcggccttagcaacccctttttcacgtaaaacgtcaacggctttttccatgtcgccttcagtttcaactaacgcctttttagcgtccatcataccaacaccggttttatcacgaagttctttaacttgtgctgcagaaatctttgccatagtttactctcctttgagtatcttgattttagataaaaagctgcccgcaaaatcaggccgtaatggtccgcgatttttaggcagcctaattatttcaattaattatttgtcagacttggcgtcgttgtcgccttcaacagcttcaacgatgtcttccaatgagtcaacggacttcttagcgtccttgttgtccttgaaagaatcttcagtaacatcttcgtcttcaccttgacgaccttcaatgacagcatcagccatcttagaagtgatcaaacgaacggcacgaattgcatcatcgtttgaaggaataataacgtcaatgtcatctggatcagtgttcgtatcaaccatcgcaacgatcggaatgttcaatttttgagcttccttaacggcgatttgttccttacgaggatcaacgatgaagattacatctggaatccgaggcatgtcttcgataccgcccaagaacttttcaagcttggcacgttgcttcattaataatgaaacttccttcttaggtaaccgttcgaaggtgccatcagcttccatcttcttcaagtctttaagacgcttgatccgtgtttggatggtgttccagttagtcaaagtcccacctaaccaacgatggttaacatagtattgacctgcacgggttgcttcttcttcgattgaatcttgggcttgtttcttagtcccaacaaacaagataacaccatcatcagccgcagcgtccttaacgaagttgtaagctgagtcaatcatcttgaccgtcttttgtaagtcaatgatgtagatgccgttccgttccgtaaagatgtatggtttcatctttgggttccaacgacgagtttggtgaccgaaatggacaccggcttcaagcaattgtttcatagaaataacagccataataaatgtgcctccaaaaaatttgttttattcctccccaccgttcaactaatcatggcactctcccgagcaccgccatgattatcgcagtaggtgtgaattggttttaacaccgaaaattagtataccgaaaattactagtgcttgcaagcaatttcatcaagaatttgtgaattcctgaaagtgtgttaaaatacaatctcgcatagggggctcacttaataatgataaaagccatcatttttgaccttgacgatacgttgtatgatcaaaaatcaccgttcactgctgccttaactaaaacttttaaccaggctttgagcagcactgaattggcacaaatttttaaccggttccatgattttaatgaccgtacctttaaccaggtcactgatacaactatgacgctggaagcgtggcaaaccgcccgtattcgacacgcgttagcacccagcaaagtccacatcagcactgatcgggctatccaatttgaaatggcctatcagcaggaactaaatcagatttgccttttcgatgggctgagtgcgacgctgactaaactcagtcacgcttttaaaattggtatcattaccaatgggccagcgccgattcagcatcaaaagttacatcaattacaaattgaacatttcgtgcatccggataacatctttatctcagaagaattgggtattgctaaacccgacccatcgatcttcacgacgtgggcccatcaggttggcatcaaggccaacgaagccgtttacgttggtgacaatgcagcactcgacatgaccagtgccaaacacgctgggtggcaaactttttggtttaatcaccggcgcaatgaccaggtgacaccgagcgtaattcctgatcaaatcatccagagtccagcggaactaaatgaactattgctagcacttcttcaagccgccagcgcttcatagacgcatactggcgttaaagctacgagcaacttatgctggtaacaaccacggtaagtacgtgctagcaagacctttacctagcaacacttaattgtgttatcgctaacaaaatcgctcacttgtgaagcccacagtcgtgcaaccagctctattgtgggctttttgttatggataataacagcattgaaagtacgcttggggttaacgcttcgaaaaggccccatttaggtgaaagcataaaaaatggcgtcactcagatgagtgacgccattttcagtgataatcgagattaatcaaacttaacttgtgtgtcagctttaccagtttcgatgaattgtttgttactgttcattgaaacgtgcaccatgttgtgaacggcagtttcagtgtagaaagccgtatgtggtgtaatcaaaacattgtcgcggttgaacaagttcatgaagaccttgtcatcaatcgtttgaccttcaaggtctttgttgaagatcttagtttcgtattcatacgtatcaagagcggcaccggcaactttgccactgtctaaggctttgatcaagtcttctgaatcgatgagtgtcccacgagcaaagttcaagatgtaggcgccatctttcatcttgctgaaggcatccgcattcaacatgtggtagttatccttcaatgcaggaacgtgtaacgtgataacatcagcttgggcgtataattcgtccaaggtgtcaacgtacatgccttccttttcaagttcagcattccggtaaacatcgtaaccgataaccttagcgccgaagcctttgaaaatatcgatggcagcacggccaatccgaccagtaccgataacaccaacagtcatggtgttcaattccttggcaatatctggtgcccaacggaagtcttgcttagctaacttcttgttgaacaatggggtttgacgtaataattgcatcaattgcgttactgataattcagcaatcgcatttggtgagtatgcaggtacgttagaaatgtttaagccacgtgctttaacagtaggaacgtccaagttatcaacaccaacgttacgaagagagatgttcttaaccccttcgtcggctaacttgttcaatacttcagcagtatagtccttttgttggtatacatcggcaccgtcgaagcctttagctaagtcaacgttgtcttcagtaagtaattctggaactaatttaacttcaacatctgggttttctttcatccaagtatcgaagaatggacgttcgtcatcacgtacagcatatgcaataattttcattacaaaaattcctcctatatattgatacagtaaatattataacagtaaatgcgagaaatagaatcataaattgtgaaaacttcgctaaatttttacatcgtgagctgacaagtattttagcttggcagctcgcgattggtgtttgaaggcatattcagcctttaacgcacttgatttgtcactgaaagtttcatggtaaattaattgcaaaggccgccgtgagctgacccgcgtatatttagcccctttgcccgcattgtgcgttgctaatcgtcgctgcaagttatccgtaaaaccaccatacaacgtttgatcagcacataataggacataaaaataatattttttggttgccgtcgtggacgcagccggcttacttgtgcttgccatagagtaatgtgtgcacctcttccctgtattcaccatcatcacgataaacgacaagcggtggcatgattcgaacaccgttgcgtttcccatccttgatcatttcgatcagaaccatgttcgcttcccgttgtgctttgggatggacgaaccgaatccgtttgggtgccaaccgattggtcgccatggtactgaacaagtcatctagtcgttcaggacgatgaacaaaatatgctttaccattcatttttaacaaatcactagttaccgctaggatctgatctaaattagcggacagttcatgccgtgcaatcgccaaatgaggatttggatttttaacgctctgcggtcgatctttaaaatacggtgggttacataagactgtatccaccgaatctttcggtagttggcgcgtaatttccagtaagtcttcgttcaggactgtcatttgttgggttaaatcgttcaaaacaacactgcgttgagccatatcggccaaccggggctgaatctcgaccgccgtaatatggccttgagttttagcactggcgaataggcctactgcgccattgccagcacagagatccacgatctggctcttaacgcccttcgcaacctgggcaaagtcacccaacagaacagcatccagtgagaacgcaaagacttgagaactttgaatgatttgaatatcttgactatataattgatcaatacgctcatcggcgtgtaacgtgacgtctgccatattcggccacctctccattcaattcgtcgcacagctatcatacaattaacttgcagaatttgccaaatttcgtcatactgtgagcagttattaaacgaaaggaagatcgtgatgttttattcatttatgcgcggactagtccggctaatcatcaccattattaacggtcggccccgctatcaaggacgggaaaacctaccagagggggcctatatcttagttgggccacaccgcacgtggtttgacccgttgtactatgcactggctggcagcccaatgaaatttagctttatggctaaggaagaactatttaagaatcccgttctgcggttcattctcgttcatgcgaacgcctttcctgtcaatcggcaacatccaggaccttcagcaatcaagacccccgtcaaatttttgcgcagcggtaagctttcactaatcatgtttccatcaggaacgcgccactcacaagaacttaagggcggtgcaaccgtcatcgctaagatggccggtgttccactagtcccaaccgtttaccaaggcccattgaccttcaaacaactctttagccgtcagcgggttaccgtccgtttcggtcaaccgattgatattgatcgtaaactgaaattggatgaagctggtcaaaaacaaattgagactaaaatgttgcacgcttttgacgacttggatcgtcaaatcgacccaacgttcaaatacgttgatcctgctacaacccgtcagaaacattaagttcgataataaaaaagtgtcggtgatcgcaatttaaagcgagccgacactttttactacttgttatcgtttttagatgcagctttcatcgaattcaacatctgatgtaacttcttttcggatgggcgttgacccatttgcatcatcatactacgaagcatctcttcactaattggtggattttgcttcaagtaattttgcatatagtgccgggcaccgaagaaaccaccagttaacccaaccaatacgccgataacgacgattaaaatccaaattcctgtagacacagtcattcccctcccttattacagtcttcattaaactagtctacacaaattaataataaaagaaaaggaaaatttgtcagttgacaaattttcctgaaatcggttaatcatctcgaagaccgcgatcgcgttgcacttgacggaccttttctggcgtaacctctttaccatctttatcataaacctgaagcatttcaacttgttgccgaaaaccggcgcgaaattccttcaagtatttttgccgcaactcttgacgttcggcttcttctagctcggtgagcccctcggctttcgccttatgagctaactcattgatccgagcaagcaattcttttgaaatcaaatcagcagcccctttcactcttgaaatatacacgaaaatagaccctaaatcaattaacagtgtttgtcaaccgaacatttgtttgaaagctatgaaacgctatgctacaattggtttaaccaataatgaaaataaaaaatgaggtgccaagatgagtaaaacatcggaaagcaaacaaatggccgttcttcgctttatttatgaacgtgtcaatgaaaaaggatacccgccaaccgttcgtgagattggtgaagccgttgacttatcttcgacttcgaccgttcacggccacatttcacggctagaaaaaaaaggttacatccaaaaagacccaactaagccacgtgccattgaggtaacgccagccggtttcgaagcactgggcgtcgaaactacgccacatcaaattccggtacttggaacggtaaccgccggccaaccaattcttgccgtacaggaagcgacggattattttccaattcctaaggaacttgaatcattcggtggcgaccttttcatgctcaccatccgtggcgaaagtatgatcaatatcggtatcatgaatggtgatcaagtcattgttcggcgtcaaagttccgctgacaatggtgatatcatcattgccatgaccgatgaaaatgaagcgacttgcaagcgattcttcaaagaggccgatcactaccgactacaacctgagaacgacacgatggccccaattatcttgaacaacgtctctgtattaggcaaagttgtcggtttatatcgcgacatgctgtttcagtaaactatcacccacaagatgacaattcaatttgtcatcttttttgttcgccagtttttagagcaggttgatggcatgcctacagattccactcacaaatatttacacccttcccgccgtgccagggacgagagcacgttatttgcgacaaaagcacgcccccattccgaattcaccttgccataatcccgcaatgcccaaccgattgccttctgaataaaaaagtcatcatcaccccgattcgttagtatcgccgtttgtaaattggcaatccgtcctctttcaagcctaatcgaagcgcgatacctactcgtcgcacctatttatcggtagctcgtaaatataccacccacttgttgtaaacaaccgtgcgctgagagatacgctgcaggcaccttgcgccaggcatcaacactatcccactgtggcgttactgtgatttggtggtagcaccattgctattgaatcagcggcgcctgattctcccgatgtatcgacagaaaaagtgctggcgtcaaattggttattagtcggatctcttttcaaaatatttcaaatctgtgacgaacagccaatagttcaatggtataatgattatactattttaaacattgggagttggttacatgttgttcctagccattatgggcttgattgtttttctattagcattattttccgtgatttacgcacgtcaaaccggtggtggttggaaatttctaacactaattacggtcctcagcgccctggtcaccatctacgcggtcgttaaattgccttactggccatacaaccagtcacagcaatcggcgcgcaaagcatcatctagcacgagtactagcgctagtaccagcaagtccaaatcaacgagcttgagttcctcacaagtcgtttttaacgaagccagcaccaaacgcgcggccgcaacgactaagttgaatgaagaaaatatccttaaacaattacaatctaactatcaatcgattggtaccgttgcattcaccaagtcaacgaaaacatatacgattacgccaaccaataaaaagtacgttaaatctttgaagacgattaaatcatatccatctcaaaaccaaaaagcaatcaccacgattacttcgaattttaaatcgttgtcaaaatcgctccaaaagaatcttgccgctggttacacgattcagttgctacaaccagataccactgacaagacgctgttgagtgtccaagatggtcaaattatgaccaataacttcaaataggaaaagtcacttgtctagaaaatttgctagtaacaagtgacttttttgtttaaacttgttgatccaaatattgacgttgttcgttcttttgaccggtcaatacgaatcgatggggatcatcagcatagctgaccgactgatcatcggcccgccattgcaattgatgactgaataaggcttcatactccgccacactaactcggcgacgacgagccaaccgttgtggtaggccatgatctaaaccggtctgataatccggctgaataaccccggtataaaattcaccctcggcacccgagccataactgaataatccgagtcgattccctggttgtaactgaggatcagtcagtaactgcgataacaagctcaaatagagtgaaccagtatacaagttaccaacttgtcgatttagctgacgcgcatgttcgaagtgcgccaaccactgggcttgtttctcggcatcaactaatggtaacacgcttcgaagcgctttaagtcccatctttgtatatggcaaatgaaaaaccaaggccgtcagtgtgtctggactagtttgagtcgtttgcaggtaattcttaaacacatcttgaaaataatcaatatagatattagacgagtatttgccgtcaactagggcttctgtatgatacaacggtcgccaaaagtccatcacatcttcgctcagtagacttgactcagtacccagtactaatactttaggatccgcactaattaacatagcaaccgccccaccaccttgagttggctcgcccggtgtgttcaatccgtagcgtgccacgtcactaccaatgaccagcgcctttttatctggatgaacacgcacgtgatcttgggccagttggacaccagccgtcgccgcatagcaggcttctttcatttcaattgttcgaacccgctgactcaaaccgagcaacttagcgacgtaaatcgcactcgctttggaattgtcgatccccgactcggtaccgacgactaataaatcaatagccgcaatgtcagtcgctgtcagcatcggtgcggcagcattagcagctaacgtcactacatcctgactcggcggaatcaccgccattttagactgaccaataccaatcaaatacttatcaggttctgcctggcgagctgttgccagttccgccatgtctacgtataaatgtgaagttgcaaaatgcaacttgtcgattccaattttcacgtcttttcctccaatttgttaatgacaataagggattaatatgcacgtccgcgtggccctaagtaatgaaaatcagggtcagttccgacccgatagcagccgaaagcccgactaatttcattatgaaaagtcacaacaattgccggtgtcgcccaagtagacgccgcccaaaaaacggtgtcatcaaacacccggttgtcattcgggtagcggtgatagccttgtacattgtcccaaatggtgccgtgcgtattcaaccaatcttcagcaagtccggcgtccacctgcatcatcacgtcttgattatcagcaatcaaactacttagtttttgccaatcgagttgccaatcatgaatatggggattcagtccgcgtgtgccaagtggtgtatgccccaatgcgatcggtgtcaattctacaaagtccatcttgaccaccccgttcgttaaccatcctaagatttcttaactattatagcatttcacgacaaaaatactgcccgcaattgcttgacctgggacgggttccataatttatgctgttattaaataaggcgatcaagacaagcaccaagtaaggagcgcggtaaacatgtggttctcacgtcatcaaaaacgaaatagtcttcaggcacctgtcgctggtacttatacggcgattcccactgccacatcaccccaacaaatcgggctattagccatacaaccgaccagtccggtgattaatgccccgattgatggtgatatcattagcctgtcaccctcgcgtctcgttatcaattcgctgagcaatcaacatattgaactgcgtatcgaccggacgaacttccacaacaactgtacctggcaagtacgcgtgggcgattccgtttcaccattaacaattgtagggacactttatggatccttaaaagacgtcaccatcgctgtctatcgaattgataccattcaggccactaattgggtttcactcgcaaataattagctgtttacggctatagattcatatccgctaattgggcatttcggttgtcaaaatataaatttgacggttgtgaatatttctaagtccaccttgacacccatcgcccaatctcaaaaagataaatcacaataatcacttttccaacagcttcaacgggccatgctactgtgcccagttggagttgtttttttgcaaactactcaacactgccaggtgtgaaatttgaaataacatgacgcatcgctgtcgacgtacttgattggtggtgtaattgacaagctatcgtgacatcattacaatttttgtggtttgatatttgattgctttataccttaattcaagctatgatattcatactggtttaaaattcctttctttattaatcagggctcctactgattaatagatcaatctaaaaattataaaaaggtcggatacaattatcatgaaaaccatgagtcttgttgttccatgctataacgaggaaccaacgattgaaatcttttataacaccgttgaaaaagtcctggcagataatccagagtcgttcaaggatatcactactgaatatgttttcgttaatgatggctcatctgacgacactttgaacgtactacgaactttaaacgccgcccatcctgacactgttcactatgtctccttttcgcgaaatttcggtaaggaagctggtttattagccggcttagaacacactatcggcgattacgtcgccgtcatggacgttgatctacaagatccaccaactttattgcctaaaatgctggcgatgcttcaaaccggtgactatgactgtatcggaacaatgcgggaaaatcgtgtcggtgaaccaatgattcggtcattcttatcacgctcgttttactcagttgtcaacaaaatttcaaaagtacaaattattccaaacgcccgtgattaccggttaatgacacgtcagatggttgatgccatcttggaattgcccgaatataaccgattttcaaaaggcatcttcaactgggtcggtttccgaacgacttatttgaagtttgagaatcagccccgctccgctggcgaaacacactggtcaatttggcagctgttcaattattcaatggacgctatcgtcgacttttcagatgtacccctgaagattgcgaccttcaccggtggcttgctctcactaatctcaattatcagtatatttgtcgttattattcgtaaaatattatttgataacagcgtcagtggttgggcttcaaccgtcacaattttgctcttaatcggcggcatccagctgttctgtctggggattatcggtaattatattggtaaaatttatatcgaatcaaaacaccggccccactacattgtgcaggaaaagaagtaaacttttcaacctaaactgagacgcatacgaccatatcgggaaaatggtatggtcgtgtgcgtttcggcatctggatgaagttaaaggttatgaatgaaattattatttaaaagctcttttgggggcatcagtccttgtcaagttgatgaatgaaataatatgatttttaattacttttcaaacggcttcatcgcggtattcaaatgcggtagagccgtttctttgtactattcgtatgatttcattaaagtattaaaagcctggttaaaggtatcaaccaccgcctcgctggttggctgacttaactaaagatgttttagagcgccgtaaatcgggctttgtgcttgttattagcccataaacgacttcggtggaatcggataatcctacttggttagactgagttacttgatttaatttcttacttagtttgtttgatgcgttgaggccgcttaatacaactttaacattttagatggagtacagatacagacatcaagtgtttaactgaaaacccaaaaccaatcgattcatgatgaagccacttattatagactgagcgcgacaaacctggcttgctaaacaaggtggcctgaacaccatgaatatccgagccgacggttttgattccttgataggctaatttatgttgtgcattcaatctttgtgctgtattttttggacttttttaaaaagaagtcaaacctcctgctccttgatttgaatcttaagttgacgtttcttgagccttagtcgttcaacctcagtcattttttcaattggtttcgtccatccaagccggtctttaagtgcgatgtaaccattggtggtggttttgagcatccagaaacggatttgctgataagatacattgtaatgtttcgctgctcgggaatatgcatgttcactcaccgtaatgtattcaacgattctaatgcgttcttcaaaagttatttttctactcataatgtggaccagcaattcactgatccggtcctccagccgtctagtacttctaaggccaaatctgatttgaatatcccacaaactactttcatcattcaagtacgctgatatggcctgccgcttaatctctgagatatatcgaatccaattgtgctgttcttttaatccttccagaccatcctgcatataaaaattttgacatctgatgaaagtacttcgagcgataccacacgctttaaaacacgttgatttagtcaggttagttttttcaagacccaggataatagctaatttttctgtgaccataaaattggttctagatataataaaatctccttaaaattgatagatgaagtatatcatttcatctatcaaccttaaggggactatagcacttaaaactgtctggctcgttttggttactgaatagtgtccacttgctaacgattatcggaatctaatgtaccgtgtacatcgtttcagtcctatctgaaactcggaaaccatttttcaacggcaccgctgctggtaatttaccaatagtagtattaccagcatgacctacgtacacatgcgattggccataatgcgtatcagccttagcttcatcagccttactttcaacgctttcatcgctggcataccgataatgtccattggttgtaaaggtctgcgaaggcaagtctggccgtagcccagcggcggcttgtagttgccgactcacctgtacgcgactgtccggataaacctctaccatactacggccagcaacatcaaacgttcgccactgaaatgtcaatcgttttactcgatatcgcttaaaagttttacgacttttaaacagtgttaacatatcgtgattcgtcaaattagtcctcatttgatctttcaaatcaccgacaactttggcccctttagacgaaagcccttcctgattcaagcgcttgaccattgcgtaaaagacggcttgctgccgaaaaccacggtgttgatcgttgtcaatatgtctttcgcgtgcataggctaatgcacgtgcaccagacatcgattgcaaacctgctttaaatttttctggttttccccagtaatcttgtccgataaaatcacgatcaacattaacttcaacgggaccaatatcatcgattgccctaataaaaccatcccaattaacagttagataataatcaattggtaaattcaaataatgttcaacggtcgctatcgccgctgcatcaccaccataggtatacgccgattcaatgcgctgataaccatgatattgctgcgaatggatcttaacaaaagtatcccgtaataaactacataaggtcattgttttagttttatggtttacaatgactaccatcattccatccgtgcgcgttgtcgataatttgcgcttgccactattatctaaccccatcaataaaaaagtactgaccggttgctgggtcaaattatgatgcgacttaataactcgtgactcatggaacgagtgcaacatgtcaaataaccgaataccttgaattgtgaaagctactaacataaaggttatacaactcgttactagtacaattagtcgttttctttgccatttaggtagttgccgccttctcataaactcagtccccccgcatttcattcatatcgcgcttaaattgatcagtaattgccattgtcttggcccaaatttgttgctcagtacgttgatttctaggcgtcttaatctgataagtgttcataatttgtgcaggtttccctcctagaacataaatgacgtctgaaagacgaaccgcttcagaaatattatgcgttatcaaaacaatcgcttgcattttaaatttcctgcgttcccataatgtgatcaaatcttgccctaaccgttgccctgttaaaacatccagtgctgaaaacggttcatccaaaaggagcagttctggctcaacagcaagtgcacgcgcaaaaccaacgcgttgtttcatccctccagatagttcataggggtacgcatttttcaacccttttaaaccaatcaaattaattaaattgtcaatttgattgtcaacatattgacagtcagaattaagctgactttctaggccaaacatgatattttgacgtactgtcaaccatggaaatagcgcaaagttctgaaataccatactcatacggcgattaggagccgtgactaaattaccatcaaaagtaatggcgccatagctgggccgaataatccccgcaatcattcgtaatagtgttgattttccgacaccagacgaaccaataatactaataaactggtgggtttgaacctgcaaactaaccgcttccaaaatcagttcagactgccgttgttttgaaagtataaatgactttgaaacgtgatcaacatctaataaaactgcttttttcaacttaaactcctcctcgtattaataatgaaagcgacgttcagcaaatcgatataatggttgccaaatcaacacaacgcataacccaacaatgacacaaataatcagtactccagttgcttctgcaggcttattattgatattttgggcaatgtaagcaccaagtccagtaaccgcatactggtgggtaccccagctaatcaattcagccgcaatatcagcattccaggctgccccagcagcattaataattgcggtaatgaacgatggaaacagtgatggaattaaaaagtgtgtccaccaacgccaccctgacaggtgaaaaatattaacaacatctttgatatcactgggaattgccagataccccgcgataatgttgaaaaaaagtaccattgagttccagtcattatcaatggaatgacccaccaatgctgtgtcgtccctgtcaacgtaatcattaatgcaacaattggaatataaatatccgcgggaattgatcctaaaacttgtccaaccggttgaatcagttttaaccgccgcgcattactagcaacccatatggcaagtggaataaaaataagcgccgaaagtaaaacagctatcaacacacgactagttgttaggaaggtccatttaaacaaaacactcaaattaatccaatcaagatattttattagtaatacacccaagcgatatagaccaacagctattactagccaccatgcaatacgccaatataccgtatatttttttaatatttgtataatccgtgaaaagcccagtttttgccattgctttggagcaccatataaccaccaataccggatatgacgatgtaatcgcttaactaacagcggcactttagccataaccatcaaatcatagacttgcgattgctgtggtagttggctatcggtactcgtaccgtatttataatgtgccgttcctttaatcagcggttgaaaaataaacacattgaccaataacacacagataactagcgcaatcactgcattaataacagcaccaaaattagctgtatcaagcgcaatctggatgtatgatccaattcctggtagcactaatgtttcatttttaggaaccacgatcgtcgcttgttcacaagcgactagggcaaaccaagcggccgattgagaaatgacaatattccatagaatgcttggcgtcgcataaagaaattctaagcgccagaatcgttgccagctattacagccaaattgcttagccactgtcatcaagtcttcgggcgtaacccgaagtgactgatagagagccaacataatattccaggcctgtgcagtgaaaacgccgaaaatagcaacggcctcaacacccagcacattattgggaaacaatcccatgaaccatgcagttgtaaacgttaaaaatcccaataacggcactgactccaataaattaacaatcggcaaaataacatagcgtgcacttcgatagcgcgctgctaatatgccaaaaatcaaagaaaacaatattgagtagcccattccaatgaatagtctcgttgttgttcgtaacgcagccgctactaaatatgacattgttaagtagtctttacctcccgtagtatctaaataaccctgagtgggtaatcgactgagcggcaggttcatcttggcaatgcaccagccaatcataagcaatattccaatacttagtccaagccacatcatcgttcccaccacagaacgtactttaatccctctttttaaacttgtcatggtgactcctttccatgttcaagttgtttttaggcaaataaaaccccattagcaaattgcagctaatggggtaaaaaactaaaatggataacgatttttgcatcgacgcattcattgagttttagcactttaagacgtaagaactagtctagttatcttgaaagagccttaattcggcaaattctgctttactcattcctgtctctcgacatttctgggcgataacctatattcttaaagtaacctcacctaattgcaactgatttttattgctgatgtaatcaacaatgctatcatagtttcaagatctttaaccgtcaatagaaaccagctaatgataatcattaacaagtgattatttatactttttaggtttcctttataatcgtaactttttcttaactatttatctctaaacaaattactcgtactgtctagcttgaaatttggactttaattgccacaaaaatcctgttacttagtgaaaaattctcggtaccgaaaaaatggagcgcacgttaggatactgtgtcgcaagaaccaagccaacccccataaaatcgccaattatggccgaacctccctgactaacaaaaggtaacggaattcccgttaaaggtaacagcccaatcgtcatgccaatgttttcaaacatatggaaagctagcattacggctactccagtggaaacatagacataaaatcgacgtcgactagcgaatgctgagcgaaaaattagataaaacaagtacatgtaaacgataagtaagacactacagccaatgagcccagttgtctcaccaacaaccgaaaaaatcatatctgattccctaactggcacataaacagcgttatgagttacaccattcccagttaatccacccaccccaaccgctcgcatactttgccacaattgatagctttgatccgagacgccattgcttgggttaagccacgtattgatgcgatcaaactggtacaatttaaatccgatatgagataacagagattggcccgtgctcgatgtcgctaacaaaattaaaacaaccccaatggatccggccaccaataacacacgccacaaaaaactaaaccggcatggtgaaacaatgagcataccaataaaaattgtcagaaaaactaacgtcgttccaaaatcattgatgattttcaacgcaacaataattggaaaagtgtaaataactaagcgacgtgtcaaccgccaatccgcattaaaattattgtggggtccccactgttgatcttgaacgattaaccggcccatcattaaaatatagagcggtttcataacttcaactggttgaaaagtcagtgtaccaattgcaaaccaacttttagcccctgtttgaacataatattctcgactatagaagaccaataaaagtatcaataacagcatgccaattgaatagccaatcggggcccactgcatcaattgtttttcacttaggtgaagcatcgttgtcgctatcaatgcacccacaaggtaccagagacactgcatcattgtcgtccgaacaggatcaatcacttttaaatcatgcagacaagcatagtaaacagcccacataccaatacaacagagtatgatgacacataatataatcccccagccatagtcgccaatatgtttatgctcttgccaccgaccaagttctctattattcatttgttaccccccataaataaaatttataccgggcttagtatagcggtaaatccaagtattttatattttaagtggcttttttatgcttaattaatcgatttaaccggattctaaatattgcattaaaatcttaataatcgtggctaagcctcttgctagccacgataaattaattgatacaacatttgatcattattacggttaatattttgcacgttgttgactaatcgtcttaaaatcttagcgtcaatctaatatttgacgctacctttaaatcttttgaataaatatttattccagcagaaaattatgctatacttattaagtaccatatggagagttggcagagtggtaatgcaccggactcgaaatccggcgaaccggctaataccggcgcgcaggttcaaatcctgtactctccttaaattgattatcagtaccaaccttgagcgtcgtcaatcgttgaattgacggcgttttttatttttcataatcgctttaaaactatataaatagatataatggtgcactttttggtgcactcttgctaaaaaatactaaattatgctgactttttgcacttaaaagtgcaccaaaaacatttaaacgtgccttgacaccttattccataagggtttaggctcaagcaaaaaagcacacttacacctaggcgggtaatacataaaaaaatcccccacgccgaaacgcaggggaattaatcaagttataactatcatctagaaactacactagagacaattaatattatacttattacttgctattctgtaaagtcttgtagttatctaattagctatattgacagctaataatgctaaatctaaactctcactaacaaaatatacaggcaagcaacacaaaaaaatcttccacccatcaagcagaagattatcctcatcacttccggcaccactaaccgacaatcttggggggatttgaaagctgtgatactaataacaggacaagggacataataacacttgtcggtttatatcacaataccgaaagtaatctatagaaaaatattaataagcccttgttatattaatcaggtttaatgtataataactgtgttctctattatcttaggagaaacagaacacccattttatttatttaaacattgggccagtcttgactggctcttttttatatattttgttaacaaaaaaatcccccacgccgaaacgcaggggattagcaaattcaatgtttaattatactacttttcgcctgcttgtgaggcggattctgacgccgtttcagtgtcagatgatgcagaactattcactacagcgactgtagacgcgggtgcttgcacttcatcagcggcctgattagtggtcgcttcaatctgactttcctcatcgttatcagtcgttggtgccgtcactgtttgaacgtcagtaataacgcccagcataccaaggatcgttagtacagtgttaataacggcaacaatggctgaccagtcaccagtaaacttaatgccaaacatggcaaagatttgttgaatcaaaacgatcagtaacgaaataatcccagcaattaattttccattcaagcttccgtcagcattcttaaaactaatttttttcaatttaatatccccctataagaacttttccgcgatataaataactaacgtgacaagcacgccactaaccaagacaccaatcagccaattttgaatagttgtcacgcggtcaatttgatggctagcttcaatggacttggccagtgccttgtccgctttgtcaccaatatcgtcaacttgattcagcttttcttcgatgttctcaactttcgttttggtggcagccacatccttttgaatatccattaataacttagttgtatcgtcgtattgtgccattaccgcaccaccaatcgctggccaggatagatagtggtgtaaatcgtcttgccgttctgactagctaatgtagtcatgttcaggccgttgcgctgtgcgattgaccaccagctgtcgccatacttgactgtatgatacgtatgactaaccagttgaccagtaactcgtttcccgtaggctgccccgttggtgacgcctagcttgataaagccgtataggccatttgaacgggtgtaacgtgcccatacataatcgtgttcaataatgaccgcattgtaagtcacactctcacccttgtaataggtagccacttgactaacgttgtcgctatccgtgtagcgaacagctagtgttcggttagggtaaaacacccctcgttggtcatatttaacaaccttaaaggtggcctttctagttgcctgtttacgagcctgtttaacattggcctgtgctttagctttgctagcagtcgtatatcccgatttagtaatgcctgttaggtcaacattgccatctaatccgcctgctttatacatgctagtgaattggaagatagctacgccgtccatgctagggaaccagttgtaatcaggactagttctaaccaaatagtccggatattcagctagccacaagcaattaccataggcacgtacaatgtcgctagtgttaacgtgagcgtttagataagccttgccggaatacagcataggggtataaccagccgccttaatgagggccatctgggctagaatgacattagtgttggctgtcacgctattagacgcaccatcctcatagtctagtgcgacaatactacccttgggcgtcctaatccgtggtaagtaataggacatcatcgccttggcattggtcatattgccaccaacaccgtcccataaataggtgtgcacccgtttaccagcctgcttagccgatttaacttgactagcataagtggtctgagggatattagtaccaccatagaagccgcccgcctgtgagaatacgaacttatcagtgctgtagccgaatgtcccactattaccgttatatttagaccaatcaaccccttggtcacggctagttgaagcctgactggtaacattgaccattaaaaaggccataaaaatggcgcccaccgttaagatgagtgcctttaacttatgcttattcaactaagctacctcctcattgcacttgatccgctgctgtcttatccgctgctgcctgtgcggccttgtaggctgtaattgcatcagatacctgagtaacctgagcttgggtaatcagtgattttactaaataattgccagcgtatacagttgctaagtccgatggaatcaacccgttgttaacactgctaattaatccttctgttaaaaattcgcttaaatcaaaactcatgacaaagacccccctagcgccacaatagccgcttttatttttgcgtaatctgattgtgtcaaaatttctgctggattaggacaccaatcataagctacactaccaatttgtaggcttgcgtgcgtaatcgtaaacggaaaatcgggcgtatccttagcttgaaaccggataaaacagtcacttacatcatttaatgtttggtctgtaatgttaaagactagctcatatttttgcagagctgtggtccccgctggatagctaaatggctgtgatggccaaggtgacgtgtttaaataaaaccgcgaattaaaatctgctaatagcgctttttgagccgcaaaagtaaagctgattatgatattattttgttttaaacgatcggtattttgccaaaaatcatcactaatattaatacgccagtcccaacctgctgtacctggtggtgttatggtattagtttcactgttcaaaaaataattatgaccacaaacgctcatattatttaagtcgactttaagactatttaaccaagcttcttgggtaccgctataaccggagttaacggctacttcgtaagtcgaagccccggtgtcacctttgtcacctttgtcgcctttaataccttgtggcccagttggaccagtgtcacctttgtcacctttatcgcccttatcacctttatcacccttatcacccttggcaatcgtgcttgcagctttattcattgctttaacaaaatcgtcaaaagtaatggtcgtaattgtggcaccattagtgctctgaatgttattggtaatggtaaaaccggttgacccatcactagggtaaattgacgtcccggtactatcaaccacccatacttcaatggaatagctaccagctggtaaactagtcatcaagtcagcattaaaggtaacggtaacttggccagtcgttgggtcggttaaactagctgggtcaactgtggccgatttaaggtagccgctagcattgcccagtttaacagtaattgaagtggccttagttaagtccgttgccacattatcattgccacaaattaacgtaaaactggtcgtggtatcgccaattttaacagtctgtggtgaagtatcggtaaaactaagcgttttcgccatctttaggtgcctccttttctgccaacttggcattaagctggtcaatttgaacttgtgccatcgctaattgctggtctttaacggcaattgcttgggcatagttacttgtcagcttgttgactaaagcttgtgcgtcaatattcataagttaagcctcctttgtggttgtggtggttgtggtggttgttgtggtaactggctttaaagcggtcagactgtcaatcagcgtgttcaacaccttcaatttaaccctatctgctccaccagcacctccagcaatggcagcgttaaactcgtccatggtaatacttacctgtgagctgataccaagcgtattaatctgaatgctgattgtcataatgttgttcgtgtaatctggtttataatttgtaatcaaaatgctatccatttaatctggcctccaatttgtttaatctagcttccaattccatgttgtgaccgtttaattggtcaatttctttctgttgttcctgcacagtcgctaaagtggcgttcaataacacactgtcatcaaccccatttagcttgccgttttcatcacggttgataaatatgtccggcaatcgccactgcttagtgtcattcacatcatcaacgattgaagacaacctaatatggctagtattatcgtcagatttatactgataagttgctaggtcaattgagttaactagttgcgcccagtaagctgtatcagccttttgcacgtccttcttaacgctcaatagagatgacttaactaggctatcatagtgaacggtaccagcatagatgtcggcggcaccgcctgggcccttggcaaagtgaataggagcaccatcagtactagtaaatgtgtggtaggtatttatgttgaagttgccaatatctaaagaacgattgaattgaatgccataagtacccgatccatccataccaaaactagctgtcttcatattcatattattgccgacataccagatgttctgtgtaccattagggttgatattgccatagggcgtaataattacgccctttggtgtaacgtcagcagaagtaccattaaaggtgatttgttgatcgtcaccatgcagcgtaataccgtcatttgcattaacaatgacatatcctgtggttgtacttaccggattagaaaaagttgtatctttagctgacgtataacctgattgtaaatcaagaccttggccgttaattactgaatcataagctaagtattgcccattaccgatcattgagcgatatttataggcaatcgctccagattcaacacttgattgcaatccaaccatactgtcaaagtacgtcgacttatacgccccgtctggcgtaatagtcattggataatagttagcggtgttattggaattgctactaatatcgccaccatggaacgttgtcccattgatagttgaaccattaatcgtactagcattgattgttggcgaggttaatgtgccaccagtaagcgtcatatttttagctgttatcgcaccatctttatatactgtgaaagttttgttattggtactgaatgtgttagctgtaatgtctgccgccgttaaagtcttgttaacaaggactgagccgatgttagcactaggaataattacaggtttatccgtatcaaagcgaactgtatcagcagatagtgttagttgaccgccagatgaaattaaaatgttcctagcttggacattaatctggctaattaggtcacctttagtaactctaaggttaatatcattagacagttgggaaatcatagaatcttggccgctataaatatactctgtcgcagtgtcaccgggctctaattttaattcagtaaaatctagtatcgaattttttccatcggtcgaaccattattatcaatacgcagataagcttcatcaatcgcccctgttgtaaaggtaaccgtccgataatctaatgttgaataagataatactgccgctgtaattattcgttggacaactgtgtaatcagaagtattaccatttgtccggcccaaaacaaacacgtccatactgcttacattattactagcaaagccttttagctgaaaagtataagttgtgttagccttaatcttaaagcgtgggcttttagcatagacttcggtagaaccagctgtacttaattcatacaaggaatcagcaccgttgtgatagaatgcatgtgtcgttatacttagcgttccacctgttccatcctcataccattgtgaagtatcagcttctggcatagctgaatatggtatcaaattgacgttgttggcgtctactttgctaacaaacatatcagcagtctgttctttataagtcgtgaagtcactagattcaaccttactttcgattgctttggcagttgtagcttgataggctgagaaagcactagtagctaccttgctggaaattaggtcagctgtagttttttgataagctgagaaagccccattagtaaccatttcccctatctgactagaggtctggtatttgtaactagcatattctgagttcgcaaccttagattctaacccattttgtagttgagcaatcgtcatagttgagccgtcttttaggtcggtcactgcttgactggtgacgttaccagtatctattgctttaattgcttgactagaggcgctgtcagcggcactttgagctttgtcgatagctgtagatgtaacagctatttctgaattggcataatcataaaccgattgtgcttgactaaaggcttgactagctgttgaagccgcctgacttgtggcactagcagcactagcaaatctattgttagcatcattttgaaaagcactttgaatatttgctaattcttcattataagcgtcctgatatttcttatatgctacacggtcaatatcgctagcgtggttaggatctgacagaacgtcagccataaatttgtttaagttgttatacgctgtggttaaagcggttgtgtcaattccatcatctttagcgctctgtataataacgttatattgagatgttaaaccagcgaactgtccaatattgttttgcttttcaatgacactcattaaattaggatcatttaaattggtgaccccaccagcggcactgtcagctgtgctttgagccttgataattttgagaccatcatcggttaagatgacctgtgttgcgttagattcagccatttaattcacctcctttcttaatcattgctaatcgtagtcattggcaaacgttctttaattggtattgcaaagacacgttctaaagaagtaccttgatacagacaattgaaagtaaccaataactccggctggttagtctgactatagataatgttgcatgtttcaggctcgataacatcgtcggttaaccctaaattcatatcaagtaaatagttagaagcgaattcttgcccgccatgaataacattaatggcgtacaccatacgagggtctttcatgttgtaatcgcctgagtgaaagtacacatatggaaagtcaatgccttgtgattggtaggtttgctcgcccacgccaaacccatagttggcaatattaaaactatatagcacatcataattaccctgtttaacctcatctagtcgtagcacatcatgtttaccattcacgtagccacacagtacgtacccatgtttgaaatcaacgctgactcttatataacgatcgacagtgcaaaaacgcataatgcgattatcatcattgtctagggtcgtattagcaaggtagggtatgcggctaactgcatattcgttaacatttaaattaggcttagttgcggaccaaatgtaaatagccccatctgcttcttcaatcgagaagctcgaaccatgcccaccatgtgaaacaaccatcttactaatcggcttaaaattagtgtcatgtaagacaaacatgacatcgccggttgtgctttgattaattgcccggctagttatatactgaccattactcaaaggacacatgtactgtaccgcatcagttattactagcgtgctgtcgttttggttaaaactacccaaattgcgaatagcactagtttgtaacttaatctctggttcatcttgaatataatcggtctcaatagttccgtgcagtgtgccaacgtcactatagggtgcctgtactaagtatccagtttgattgaaactagtatcaagggtgccgtcagtattataacggtgccaaataaatcccttgttatcaatataggctgaaatattagtattgccttcccaagcctgtaagattaatcgcttagtctgggtggtatcagtgaagttgttgccatcaggagttaatgcgactggtttaaccgagctagcgtcctcctttgccttttcaatggcgctattaatagcactttgataaccctgcatccatgctggcgttgcaactggcaccgtgacatattcaccaaatccaatggtattgccataagggttagcaaaactaattgtccgttgaatgactcggccactggcatctaatgccggcttgattaactcatctttaaacctaattgtggcacctaatggcgggttaaatttagacgttacattaacttcataatacgtccgtgggtgattatacaattgcaacatttcctcagcccaggctttaagaccagctgggtcttcaattgagttagctgtaacaaccccctcatagtacaacccagattgccagtcagggttatatgtttgattggcttcatcgtcaacaatgtaactcttaccatcattgactagcccaattgtgttgccgttagcaccataagggataagcttagtgattgggtttgacaccgttgttcgctttaagctagtcatattcttaccaaatattgcctcgttgtataccacatcagcattaagctggtcagtaatgacacacacctttttcgtgatatttccttgtgagtcaatctcaacataaggatcaatctcgacatcataggtttgaatgagtgtctgtaatagcgtgctagctttagtcttgccgtcaatggtaatcgatggtgtcattacattagtggtctgatagtctagcgtccaaccagtggcgttaaagcactgattaaaagccgtctgaatcgaactatcactagccgtaatggccactgggtaatgatgagccaagttgtacaagcataggttggtaaagttagccgttgtgacgtgtttaacagcagcggtattgctttcttccacactgtatatgcgcatgacataccagtgtcccgacaaagcatcataataagctaggttgttgccagcgactactttatctgaatcaggctggccttgaatcacgtctagttggccttggtggtcgaacttcttagattgggcgtttagattaatcgtgccggtatagctgtccttagtgccgacattgacgtcatcgtcataacttgtactggtagtatcggcatcagctagttgaatcttgacgctatcgttggaaaacttagtggctccatcaacagtcaatgtgccaatccgtttcaaattagggcctaggattaaatattggttatttaaagccatttgttaacctccttattttagttatgtaaaaaaggccgcccttaatcgggtaacctttaaagtgttgctacagtattcttggtaaatatttcaaggtcatttgcgcatcatctaggtcaccaatcatcgataagccattaacgcccggtttcaacttaggaaaatcggttgaccaaactggtgaaactagcttgccgtttacagtaaccgtatctgcctcacaatccattacaatttcttcaccggcaccagcaatataagtcggctttgttgtatcaacttcattgactttccatatttgaaggtcagtcattgacataaaggggttataatatgggactttataaatatcttccgtaattgggtgctttagaaaaacagatccaatcccacctaagggtgtctgatacttattttgagtatcaacataggttccgtgtactaacatgtgaatattaggatcaaggaacggttggcctgttttagtcgaatactgggtgatactccaagtaaatacttgtcctcgtttagtgatgtccaacactaaccaagcacctgccagcgctgagtcttcctctttattgaccacggctgtgtaggtattaacgttttctttaacggtttgtttagttacttttccatttctggaacgtccatatttagtgacagttttggttgtcgtgccagtttttatttgaattttctggtcaggcttgtttgtaaaagaacctgctggccctgaaccataatacaagtcagtatagcgatcaccatattctaatgttgatccaggctcacatatttgaagtctagccataggtttagcaccataggccatgtcacgcatgccaaagcgtccaatggtgttaccgttaggatctaatagcaagacttcaacacgccccatcgcacggctgttatgagtaccactgtacctgaattgatgaataccagttcgtactcgccagtcagtcagtgagtttgtcatgccagtataacgataggctgggccataccagcggtcttcaccggttgtggggattgtaccaaagtcatatccagcgctagttacagctggccgcattacattagttgcagtcttaatttcactgtggccttgatacgtgtacgtttcaccagttttcatattaccaattgcattggcatcatttgtccacattgccatagttcccagcggatcatcaacaactttagtataaggttgaaccgcagtggcttggtctcccggtgactcaggccctaaaccgaactggccaccatttaaactaaagccaatatactttaaatctcgcttaggtatgacctgaataaccggatctgttcgtgcagtgccatcaacagtaatcgtgtttaagccattatttaagggcttctcaacctgtggcaaggttgcccggggatcggattgcacaaaggtaatcgtaagcgccatgtcatacatgcctgggttaatcggggctgggtcactaattgcggtaatatgcccccaatatgtcaccttgggttcaaagccgaacactagtggatactctttaccattatcaccggggtcatcgcttagcagcagaccacttaggttgtgcataatctgattaaatctgtcttgattatcagcacagtaaattgacactggaatactaatcgttcgactggtaaagtccgtaccgttaaactggttaccatacatggctggtatatcagttacttgttcagccatggccggtgcactaggtaataccacgtttcccatttcaacttgcaaatcgtcccggctattcaagttagcatattcaaaatcatctcgttgtaaagtcacgatttaacctcctttttaattttagctatgtaaaaagggcgtccatttaaggactaccctttgattagtaccccatcatttgtgaatattgtgaagttgtcttattgtcagatttaacagcattaaccacatcagatttagcaatgactgcttgaacactacccatgttgcctagaatggctgacattaagctaattagtttatcaagcttctcattactttcactgctattagacgcaatctgcgtgctagtattgccgtttacaacttgactagcctgtgcgattaactggttagcccgtgatttgttagtcaatggcaataccatttcaggcttgttgtgttcagcaacctcaatcaactggttagtgttgataatgccaccgttctcaaaccgcttatgaccttgtgggccactatgaagccagtcgtacttagcgtgaccccaaattgaggtattaccagtggcattaagatagtcagagttgtttaagaatgccaacacttggtcaaaactagacctgaaattgtgatggcctggaaatgcaaaggcatcaaaggttgtcttagtaaattgcaaaggaccagcagccggattacccgccgcagagttactgtcagagacagtttgtgcaatgtttcggttaccagtttcactatcagcagtcttaataatggctgactgcatcttagaccagtattcacggggaaccttagtcattccaagtgcttcgttaatcatgctatgagtgatagcgccaccttcaatggaaccaccaccattatcgccaaacatgtcagctagcttactaatgaatgaccaaaagcctgagccgacttgatttttaatggtacctaacaggccactagatttagaagacttatccgagctagaactatcgctaagtccgggtactcgtccgtaaccagcaaacgagccatatccaccgccatgtactttactgatacccatgccatcatgttcattttcagcggaatacatatttccaccactgatataaacaccaacatgcttgctaccgcctggaccaaagaatgctaagtcacccggcttagggtcgctgacatgcttagacgccctgtattgctcacctgagttacgtgggaagctaattccaagcttctttagggtatactcaactaggccggaacagtcgaacacattaggtccagcagcaccccaaacgtacttgttagtggcaccatacttttccatagcattaacaaaggcattgttagaagaaccaccatctagactgtcactaacgccaccccacagtgtggaccaccatgtcttagcttgcttctcaacgccgttaaatagaccatggccaatgttactcatgacaccgctaatgcctttagaagaccaactaaacaggttttctaacgacttaattgggtgagcgataatgttctcggctgtcttaaagaacttctctaatccattaacctttttaccaacccagttagtcacacctgaaatgccactagtcacactgtctaaaatgtccccaaagaatccagtccctttagcgtacttagtcacgccttgcatactcattaacatggctgtctcactagcgctcaatacctcagtgccagtgggtaacatcatcttagtgttacggccttgaacaatgcccgagtcaccatttgggagcatgaccatctctttattgccagtttgtgggctgtcattaccatcattgagcattgccatagtaggtcgtgtaatcgggttacgttgtcccgagagcataccagtaccagtagcaaaattaacatggtctaacgtaggtatagttctcttattcttgctaccgaaactatgaattactgcgtcaaccgctttaataccatcattaataatatcaatgacatcattcatgccatctttagcaaagccttttaagtctttccaaaggcctttgaagatattttcaacgccagtacctaaactagaccagccacccttaaatttacccttgaatgttgatagccaatcacccattgagcgtccaaacactctagtgtggcttaggtctttattccaatagctgtgcaggttagaccgcatggtgtcccaatgactgtcccaactatgtgcaaagctctttttccagccaacccacttactgcccatgctgctaaagaagtctctagtatgtttaattgacctgttccagtagtggtttaagttggaacgcatatcattccagtggctgtcccaactctttctaaagctagacttccaaccgttccacttcttacccatgctagaaaagaaatctctagtgtgcttaaccgagctgttccatgcaccatgcaagttactagtcatagcattccagtgactattccagctctttctgaagctatttttaaagccattccacttattaccaacgctgctaaagaagtttctagtgttcttaacggaaccgttccagttgtttctgagtgatttgcccatggctgaccagtggctgttccatgacttcttaaagccgcttttaaaactattaaagctatctgaaacggtcttaaaccacttgccaaacttagtcttgctaaacgccttagaagcgtcattaacctgtttgtccatagccttcttaaagcccattttttgaatgtctttgctaaaacctttagaccacttttgaatattcttaccagttttagtgtcctttaagaaccatgtagctaggcctgcaaatgggttaatcaaagtagttaatatctcagtcttgtgttttttaaagaaaccggtagtggttttagcccatttaccaatggtgttaccaactttgcctaaggctgagccgactttcttttcccagtcatacttgccagtaaacaatttcttcatggcagtccccataccatttactgcatcacggaacggtttaatgtgcttgtaagcctcgtaaaaggctacccctaaagcgacaacagcagttaaaactaggccgattgggttagttagtaacaactttcctaatgacagaaacgatttacctagtgttttaatgccagcacctagcacgctgaatgccttagatgcccctttataggcgattttagccgtccatgacagacccttaccaatccctttagcagtacctttaacggccttgctaaatagggttagctcacgtttaccagtttcaccgttaactctaggcttaaatacaatccggcttagtgctccaccaactttaccagcggcaccagccaccccataaagggtgctactgatagctttaagtttagacacggctaggtaaaccatgatagttttaccaacattttcaatggctgtcttgtgcttggcaatggcggcagttgcatcagctactccattcataccctttgaagcgtccttagaatgcccactaatcagctttaaagaaccggctacagctgaccatgcacctttagctaagctgccaacaatactggcgattgcgccgccggtcttctcgattggcttttcattcttgactaagaaactaataacatcaccgacatactgtccagtctttttaccaagtgtgccaactagacccgtcaaggacttcttaacaccgtccagtgcgcctttcttcttcgataccccatcaatagccttttcgacaccggaaactaagggcttagcaaaggctaccttcaaattggtataagtaccttgaatggctgccatcttacccttagtagtatcgccaaattcagaccatgctttaccacttgttttagcggccttgaccatgtaaccctgtaattgagtaccagtaattttaccagccgctaattgcttgttaaaggcatctgttgacatgccactagctgtaacaatggccttttgaagctcaggcacttgcccgaaggtacgcttaaataggctggatgttactttagaactaccagccagtctagccattccttgtgacatggaagcaatctggtcgcttgatttacctgcagcactaccataactagcaatcacttcggtcatggcacgagctttagtagcgctgttggtcatagcatagaatttcttctgcatctgatcaatagcgccaccggacatgttggccttagaacgaatgtcactaatctgcttggtcatcttgttagcgtctgcatttgataagcctaagtttgtccactgcttcttaatcgtagctccagctccagctagtttataaccttgctcagtgacacctttaatgtagcccatcgcactagatgcggcgctactaattgcgttgccaatagcggcaccaatagcaaaatgcttggtttcgtcattagttttcttttcttcactacgaaccatacccagtttagacttggctgaatctaacatcttagtaaaggcactagcattagccttcttcatggctgaatctaactcattagtctcacttttcagctttgccatggatgttgcagtctcattaacacgcacttgttggcgtttataggcgtcactagtagcaccgctggccgtcttaatccgttccagttcgctagtttgcgccttatattgggactccatgttagaataggcttgttttaaaccacccaaacgagccttgttggcttcggctgacttgccttctgcttctaggcgtttcacataggactcacttaaagccgtgctctgtttatagcccttttgtaagtctgcaagtccgctgttgtaatactgtaattttgacttagcccgatctagttgaccacccattgagtcatatgaccggctagccttgttaatttggtcagatagttttaaataagtttcttcaccgtctttagtgtcccggtttaagcctgattgacgggactttaactcatcaattttagctttttgagcttccattgatttagccagtccatctactctagctgctgcggccttttgataatcaccggctgatttcaacgccgtttcttgggctttccagccactggtattggctctgacctcggctgtcagcgttttaagtgatttaacggcctcagcactatctaagccaaccttactggtcatttcacggccgactacttttttagccattcttttttagcctccttttaggcacaaacgcttatacaccgtatgtctgtttaatggcttctagtgggtcaactaactcagcacggtcttcctttttacgagcgttcaaagtttccatcaaactaaaaaatgagctatcatcgaagtctttcggtgataacccctcggttaatagctgttgagctagcaagttaaagtcttcttgctggttttttaactttatgacctctcgcttaatctccgcattgcgtttgtgccggtttattttgacgacttagcatcttcaattgccttgcgttgcttttgttctgataacttaatgtcatcgtctgagataccatttaaccgcatgattaggtaaccaacgccttcaccgaaacgttcaattgagatggtatcgttaattgtttccatctgcttgtcggtatagcccattacccgttgcacaaagttggtcattttgtcctgtaattctaatccgttcttcattgtgtctaattcagtaacttctttttcagtgtcttgtgattccaacatgccaatttgaactttggtagctaatcgaatgatattgttggttggtgttacatcggccgtcttgttgattttgaaatagtttttagcattaattttcatagttaattttgcccctttaatttagtttgtatgtataaaaaggccacccttagtgggaagcctttaaagcgttgctagtgagtagttgtaccaccagttgtaccgctggttgatggagtgtagccaccaaacgtttcagccataagcttgttcaaatcaaaaccagtatccgttgacttagcaatcatataaggctgttgtaccccgttggcagctaagaagatgtttggctttaatggcgctaatacagaaccatttaggactgttgagtaagcaacttggctattagtatcagttccgttgttagatgcttcttcaacgaactcgatattgttaaagcattcataaattgagatgtcgccatctaatgattgagattcggcaatcatcgcaacgtgtggcttaggcaattgacgaacccatgcaccgctattagcgctttgcgtgtacccttttagcatctggttaatcttgaagtccaaatctaaggcggttaaagccagcgtgggcatagacttgccgtaagctgttctcttaatttgtccgttaccccaacccggagttccggccgcttcaatagcagtcacgttgatttgactgaaaccttcgccattgtgatcggcaacatagattccgtcagcagatagacctttagtagcgtctttaattaagtcgccgttatcgtctagcaaagcaaaggttgctttgacaatgttatgttttgacatttaaatatctctcctttaaagcatttcatttttagttacataaatcgttttagttacttggtcggtatctggatcagttgtgtggtgctgactagatacaattaaccagccggcctgtttaatactcttcattaaagctatctcagcttccaatggattaaagtcatcggctaggtcagccttgtaaaagatttgaatttcaacacccatcgccaatcctttaaacgtgctgtttgcaaggtaggctgggcttgaatcggtctcttgcagtagcatgactgtactagtagtgttgtctaaatcttcgttaggaatttcattcaggtaaactttatccagccagtttaaattgagggcgttaaccagacttgccacctgtgatactggtaatagcattagtcatcgtccccctttttatattcatctagcatggcgttaaagacatcatcttgtgagtcggctaagttatcatcaacaaagtgatcagccttaatgtacttagtcccatcatttaaccgcctggcattcatatcatggtacttattagtccagcctacaattgaacttccatcatgttcaccgtctatatcgttactgttatagcttatgttgtcagccatgtgtccatacttctcatctttatgacttgaatagtgtttctttctcgtggcttcggctaagttatcagccagcttcttagcaccggctgcggttatcttctcttgttcggattcgttagggactagcttgtgggcatctttaagccagtcttctaattggtcgactatgttatcgtttgccatggctaagcccccttagtaacctgtttgagcgtcaaataatcgcaagagagataattactagaatcatccatgctgtcattgatgacatcgtaaagtttacctttatactgacatttaatgccttcataaactttaggattgtgtctaataattactactatttgctccaattgttcagctgtgagttgatacgaatatgcaattgaccgtgtatagggcgcacagtataaactaaactgactaataaaggtctgcttactagttccgttaataggattttgaacagttttaacagtgccaatctgtatacgttggttaaagtcaactggggttaacttattaatcgccattgccatccacctcatcctgcttttggctatacagccctcgcaattggccaatgattgaatcaacaactaagtcaactggattaacagtgtttgaagtgattgatgtccggtaataccagtatgaaccagctaaggcgtaaacagcagtttcaaacaagtccttcgcaccttcaatttcatagatccctagaccactattgtcgtcaccaatggcctgtttaatgtagctggtggctgcagacaaatagccttttagcagctcgtcatcatcatcgccatcaattcgcaaagatgattttaatgtttctaaatcggctgccatttaaatcacatccttacttagccgcccagattgtcactgtactgtgtatttattggcgacatagttggctaattacttactgggggtcgttgtagcagcactagctgcaaagcttgctggttggtcagcaatgctgctaaatgaacccgcaacaaaggcatccgtatcagtagcttcaacatcaaagcgatcaatcacacgaatcttagtttggtctttctcgaaggcaccaccgccgatattagtcgttaacaatgacgcattttctcggtcaaataaagttaccgcttgtgataagtcaccataatacaatggataaactggtgctgatgcagttccagcgttaggcaaccacttgtcagctacttctacaattcgcttaccacggattaaatattgatcaggttgtgttggatctggttgtaataagtagtgccccatagcatccttaacttcggaaagcacatttaaacctgacgtatttgtcattaagaacgatgttgccttgatagcaggatcaacggcagtattaatcatggtaataatatcatcgaacttagctaaggttggcttctttggtgcattgttcatagcagcaatgattttagcattgcgagtaacaacaaccttcttagcaatccatccagatagccaagccaaaatattgtcagcagtgtctttgagcaacgaattagtagccgtggtgatgccagcataacgatggatggtatatttgatgagggatagcttgggatcatcattatcaccaatagtagccgtttcatcatctaaatcagctagtggagtaacgtcagtccacttttcgtaaactcgtgacccagtttgagttgaaacagcttcccgattaacatattgttgtaatgaatcgtattcacgaacaagcgtattaattgctgtttgaatatcttgaggaatagtcaaaccaattgcattcccagctgcgtcagtagatgaagttacaaggttcataactttcgggtcacctttaatcatgcctttgaagttattgatgaactcagctttgatgtctttttctttattgtcaagtggggtcttatctttatcctccatatcggcaatttcttgagccttacgttcttcttccagttgttcatgtaaagcatcacgccgggcaaccgcattgtcacggtcttgtttcattgctttaaattggtcttgatcgaagctgtcatcaaggacagctgcatttaacttgtcgtttaagtctgataccttttgcccttgggcaatccaggcatcattcattgtgttaatattagccattagttggcctcctttaaaatatttaatttgctgtttcgtaattcggcagatttactattagtagtattttcttctttagctggcttatttttatccttgtcagccttgtaaattagattcatcaacttgttaactgcagatttaggtggaatgtgtgaaatagcattcaccggttgcaattgttgatcattagcaaacataatttcgtcagcgaagcctttatcaacggcatcactagcggttaaccatgtttcatttgccattaattgtagtaagtcggcttgatccataccagtttttgattcataagcactggcgattgatttatcaatgccatttaaaatactggcttcatgctccaaatcgtcagcattaccagctggttgtgaccaagccttatggatcataatctgagcagttggtgaaatgttgatatgatcgccagccatagcaaccacgcttgccgcactagcggctaagccttgaatattaaccgttacattgccagcgtaatcttttagcatggtgtaaatctcactagccgcaaaaacatcgccaccgttggaagcaatgtcaacttcaagttcttcatcatcaccatcgtcatcatcatcgccactgtcatcgtttaaaatgtcagcaacacccgaaggtgatactgctggcattccaaaaaactgatagaaaccggctgtttgatcatcaacaatatcgcctttaatcatcactttctttgtcatcattatcacctccttttcctgattgaatcacaacttgttgtgtcgttggattcttagcatcaggcatttcatccggaaaataaccagtctgctgtaacaaccaagttgcttgattattggcaatcgtgccatctttagctagccctgatagggtagctgcaaatgaatcccccaatgggtctacagcagtccgtatattggccgtaatcttagcattaagcttattatcaagctcagctaaaatcgcctgtaaatagcgattaagggcattggtgtacatgcctttgatttggtcgatattactttgttggtcaccttggccattcaaatagctatcaggaatgccaaaaactttagcaatttgcttactcgtccaatccgtttggcttaacagcttggtaacatcggctttcatttctagtggcttgtaatcttcaagttgatcaataactaccgggccaccgtttgatttgttcacctgtttcatgaagttacgtgagcggctggccttcatcttctcgcttaacagtccaccgtgctgaatagacagcactccaggagcgctaattgaacgtgctagtgcagccaacgttaaactgttagatgaactcttgacttgtaactcattcgataatgcttttaatggactgttgccagtcatgccaccatcggtactagcccagcgaatatgaatcatgtcagactgtggtacatattgaagaatgcccaagttaggttcatcaaaagtaaccgtataggttaagccgctgccgtcatctaataagtaggtttgtacttgactaggtcgtaaatattcccagcgcaaatctaagccattaggattacgccaacgatatgcaaagcattcaccacccaataacaattgtgaatacatagactgccaaaacgtgtgaccgtttgctgtcgtactagggttgtttaggattccttgtgctcgtggcatattagccattaattgtaccgttgctaagtctccagatatttggttaaccgctgaataaatatctgaattttctaaagcgtccttggcgctaacatactcattactaccagttggcgacaaaaaattaacaatattatcatcatctactggcacactttgaataccaatagaattatttattgccgttggtggctcaaaaaagggcattgttaatcatctcctttttgaccagctgtaataacttccgaaagccagccaactaaaaacaaagctacagcgattgctaggacgccttgtgcttgaccaaataaaaaggctgcatatactccggcaatcatacctagaataaagcacaacacatcaaagtaatgccagatagttgcaaaaaattgtttaaaaatcattcatatcatctcctagcaatcccgattccgggttattaaaccattcaagaacttgtttttcgttcatacgttcgacctgtttgtcaggattgtttacgtctgcaaagtcttcaaagtgatacatggcttgaaatagggcgtcaattaacgcatcgaccacatcaatcttcaatgtggctttagctttatcaacttgaataccaattttgtcttcataaatttcagcatttagtaatgccttttccatgattcgatcatccaagcggtctaccgatccttcaacaaacatcgtctgcaaaaacttagttggatccttcaattcactagttcgctgccgaatggcttgcaacggccaccctgagttcaaatctagctgcttgattgtaggcgttagtccccatgcgtcataaccaaagaaaacaacttccagtcgatgccgctcaacaaagttgagtaaccactgataaacttgctcatcattgattagcccttgaggatggctactaatcgtgcagaaacctttttgagccaaatcacgataattaataccgtcttgcttttctttagcttcaatcgaaccggctttctgccatggaataaagctgtgctgataaataaaccatcgtggcttgtcattattatcacgataaggaaatacaaacgctagcgccgtgttatcactaaacatcgaatagtcaaagccaatatagacttgccgatcatcaaaactaaatgatgatataatagctcgctcaacgtcaggcagtttcaagaagctgtcggctgattgctctagccacaagttgaggtttttattttggaaatcgttgagtgtgcccgacaaagcgtcagaatcacgcttatctgtcaagccattcagcaacacttcttgttggctcggtaaatctagtaagggattactcttaacccacatatcgggcttataagtttcgtccagattgtcctgtgaccaaataagccccaaatatgtatcagcatcacgcaaataatcttgttccatggcttgctgaatcatacgctcatcatcgtggaatggaacagtgggatcaggatatgccgttgaaatttgaataaattgcttattgcgcaccttaacttggcctgaaacaatcttagaaattttttgtcgtgtcttaatttcaccaatttcatcaaatatagcagttgtaaaatgaaaactatcgtactgaccagcctcatggctaatcgcccgtagcttgttattagtcttgctcatcacaacttggtccgcttgtgaagacaatgtccgagtatctagcccactatcagcaatcaatgacttaaatggctcaatagttgaaatcttggctaacattgatttaatgtagcctagaatcttgctcgtttgcttgtagttaattgatgaaactaaataatcttggttagatagtcccaatgactcaattaaataactataggcagtaataatcgccataagataagttttaccttggcctcgtgcaactgaaacaatagcccgtgaaaaacgcttgccaccgtcatcattacgccagccaattagcatagccataataaacttttgccatggcattagttttgtgggttcacctgtatcaacgttcggacagatggaagcaaatttaagcacttggtccactcgttttactgagtaagcgaacgggaatccaacgctaccttgccgttgcaaatctcgaatatggcggaaggctgctaacttaattaaataaccagcagtcaccttctcatcaagaacttcaaaggcatattttgtgcctgggtcagtgtattgctggcgaacttctgaacagtctaatgattgataagttccaataacatcatgggtttgagttaaatcaatgcgcaaattaatcaccccctttgagaaacagtctttttttatcatcctagaaattctttcatacgatcactaatacttcgctcgtctttatggtcatctaagtttaatttaagcaaatcactacgtgacttaggagacagtcccaattcagcgcctaaatttgttagattttttacggctgaatcataaatttgcgtcatgggattacgcttgtagcctacgaagtcccgaccaatttttttaccggtctgatcttgcaacgttttatagattgcttggacttcaccgttttcctgaatatgtttatacgcattgcgataaatctcgtattgggaagcatattgctctacaagtccgctatcaatgcgcttaactggagtattatcttctaaaaaaggcactaatcgacgccaaacgaccttagcttgccgtcctaagtaagctggcggtgtgcgtgataattgaccatcgttgacgtctttatcaacttttttcattttatatgtctcctttcatcattttggtgaccccccctacctaaaaaattcaaaaattgtttctatcacaaaatgacggcaatgtgtgtgctcttttttggacgtgttagggggcgggggttgttttaattatcatcgtgactaactacattcataaatttaaagccgctcaaatcgaacgacaagtgccaataaatcaattgctcattaacacaacgattgctgatacatcattgattggcgttacgctttgcaactcgttgccttgaccagtgccatagtatgattgctcccagtccgtcttagcacgatgacaactcccacagattacagctaaattatcaatgttagctttcagtgtttcgtcaaactcaatcggtacaatatgatccacagtcttagcaggtttgatgacgccttgcactttgcagtaagcacataagtaatggtcacgctctaggacttgttgccttagatgtgaccattgccttgtccgatagaagctgtattgctgacgcttaccttcattacgataacgtgtaaccgtgttgtacttgtgcgtgtattgcttatcgttaccacgtgcccaacgttgccgactagccaagtactcagcttcatgctcatagtgctgctgacaatagtggtcagggaatgcaaccattgcatggcagttaggatagcggcatcttcttgtccttggcatgttgtttcctccgtttcctatccaaactaaaagcgccatgctgtttagcacgacgcttatccttgtaccacttatctagccgggaatcagcctgcacccattcaggcggctcgtacccatacttgctgtgaattggtcttgacacgattatcaccacttaatttagaaagctcttttatataattagatcataaatatcgccggtaggactcgaacctacattccattgtggcttaccaattagcccacagcgactaccagtctgtaatttggaggattacttcatgcacgtcaatcacatttggcatactaccaatttagcacgattatagaggctagttttctcacttttttccactatagatcatacaatcctaatctctttgcacactcattaacaaatgcgtttcttagttcatatgctcgtgccttaccaacactcaacaagttgttatctactaggccaaccagagtatatcttggatgatttcgaaaatacaattcagtaacaataacctccgtatcatgtcccacatcatctagacaatcgtcaatcacttcccgttgatgtttcaaggcattaatgcgccgatcatcatcaatcgtgataatcgtgttgagtgtcgtttccggatacttgtattgtgccttgccacctccgacattatcatcacgtggtacagttggataacgtaattcctgttcacgtttctcgatatacttgtcaatcttgggatagtcacgtagaatatcttcaacttttctaatcgtcgttcgtttcactaccaattcccctttcaaatattgtagtctagcagcgcacatgtttagggttgcctaaatatatcgtgtggtgtatattatagttgctttaattcctagcgccgtattctcctcaacagatacgacgcttttatatgttatactgacaacggtcattcgagtggtcctgtgactggtcgccttaacgggcggctttttgtttaccatcgcaatcactcaactccatttcgatgtcagtcatgcctgttcgccatccaaattattactgattcaataaacagcaatacaccaactgacgttattaaataccccaccaattgcaatatggaagaattccaaagaagttcaaatatctatttcatttgtcttcctccaccacatacccgtctagccacgcacgggcgaagacgtccgaatgcgttctaatccaattaccaacactaactcgccaaattcccaagtaagtagcatggaacacccatcctagcttataatcaccctttttagcttgcttaattatataagcgacattttcaggaattactggcaattcggcatatgtcttcttgaacacatcgtctgcaattgcccagtgctcgccattgacgccggttgcaatccaatatccattagaaacaagcatacttccttctagcgtttccagataccagccaccacgatacttaaatagtcccaattgatctgcgctttgttttgttccatcgaactgttctgccttgatagtggctgttttacgataaaatttaatcatttctccgccatctccttgactagtttcattccaagatacttttcttgtggtaaggaacagtcataattgacgtattctgacccttttctctgaaatgtttcgcgtcttttcgtgcgtttttcctgttggaatagacagccgccacatcaccattaatcatcaatatataagccattttcaatcctccccgaacgcttcaaacgcccgcttgcgttcctcgttagttggttccttgacgattatcatgctgtgatttcatcgctttctcggtatgttgcttcatgcgccggtgcttccgtttaatcgttgaacgcttcttagtgtgtttaggcataactcacaatccttccggtacgcgctctttaatgtacgtgtcaaactgtcgttcaatttcatgactctttctggctaactgatccactgttttaatgtgttcactgccagtccggattaaatacccacgaagccagtgcaatgcgtcctcgacgtttttacagtgtgctaggggtacttctaccagccgattaataccagacttttcatcgtagctagttaccggatgcccatggctgtctaatgacatcctgttaaccttaacttcgtatttgtcactagtcagatgatactggtcaattttcatatcaatcatgtttattcgtcctccgtaatgtagtatttgttttcgtcaatcgcgcgaatacgtctatccagccaactgttctctgttgtaattgatttggtgtatgtcttcatggtgatgtactcctactcaaattcgattgctggtatgttcaggtgctcaatcaagccaaggcgttccaaccgctcatagttgagacgctcgcagtataaatctgcttcgtactgagacctgaattccttgattacggtttcaccattgcggcccacaatcttgaatttaatttttttatcaatcctatccagttggctcatttcttcaaaatgtttaggcatcttcgtcctccgtaatgtagtatttgttttcgtcaatcgcacgaatacgcctatccagccaaacgttattgtgctttagctcccgagacgtcctagttttaacctgcttgccttccatgactaatttaatggcattatactgggtacgcgtaatttccatgtaatcgcccgatacggccttaattctgagcatcttatgcaggttagctagtttgctctcaggcacgttaaccatgctgccatatctcgcttctagcttatgaatgacttccagctctttaagccaatttttgcttgccataggctaacttcctttcaagctcctgttcgtaatgatcatgtatctcattcgtacaattagggcacggtccaaacgtgaagccataactcccaagtggttgctgaacaactttactaccatgacataattcacaactcatacacttctgaccccttccatattgtcaaacagcaattgacagctagtatccttggtatataagcgatcgattgttttgccatcatacatactttctaattgcttacgtgtgttgttagtcgtaatgatggttatatgtttgacttcgttatgatcaaaatcgcaacgcgcattcgccacctgatacatcagcgtctgcaaatctttgtgtaccggcttgtagaaccctttttcagttggcttaccgccttcagtaccaaaatcgtctaaaactagaatatcaacgttttgcatgtcttttagaatgtatagtaaacgttgacgtacatccggtgcttcatacttttcattaaccagccgtagcaactcagctgttgagacaaacatcgctgtctgccctacgctcattagctgatacataattgctagcgctaatgatgttttaccaacgccgggtccacctgcaagcgctacgttgaactggttagtctctaattgcctagctaacttaaatgcctgattgccaagctctctagctttagcttgattaggctgtttatcaacctgccaatcattaaagctaaatcgtagtggcacgcctccagaccagactgacatgcgatagtaataccgttttcggttagcaaccacaccagcgttcgctctatcaatcgtctaatgatccaattcttctttggttggcaacttagttgtatcaattcctctagccgccactactttctgaatcgtggcttgattgaataacttcgttacattttccattagccaaaccagtcctctcgtgtttgtggcgctactttgttgctttggttactttgctgatctctcttagcccaattacgaatggtagccaagtaatctttgtagtgtttaccactagattgaacatacccagagactcgctcaatacggtcttgccagtcagaagtaaactccgattttagtttctccaattgttcatccgtcagtaagacattctggtattgtccatatttgtgtcgtactggtttggctttttttggcttgggattatctggttctatatacttacctttactaaccttacctaacctatccttacctaacctaacctcggtatgacaattgcctaccaagtgtccgtcatttggttgactgttggttgacgtgtgactaccaaaaggcaatttgctataactagcgtcttcgtttagctctaattgtttaagctcactagtatatttcgtggggtgcttacgatctgatcggatgtaattatgaatatgccaatctttaatcacagtgacgccattctcaaacggaataaggtactgcttggctaacaaaattttcaaatcatcatcacttgaaccagtcatccgcataatggattttgtattgcccacaaacccgtcatcatcagcatgcatattcaaatgaaaatatagtagctgagctgacttaggcatatccataaacaaatcagaatccgtgatcgtattactaaacattctcctttgtgccatctcttaatcctcccttatttactagtaggcattctacccacccggtgtattagtcactgctgtgttttttagttcaagccaattcgttttagtgtttctaaatcacatttcaacactatattcaattaatcccagcttttttaaatgtttcatagcacgtgaaaagtcattaatgctaatgctgttttgacttagcaatttgtatgtgtcacattttccaagtgacagttcgccaattatctgaatagtcttcaaatcattttggcaaagcaaccatttttcatatagtgagtttatgtttttactaagatgaccaatgtctgtaaagtttacgctgattctgtatccatttttaatcattatttcagccccctattaaacatccatgaattcaagcaaaacgccattgccatattactttcgattagacacaattctggagttaattcttgtggatcgattaatgcaatccgtgtaataccatgaagaatacaatcctgttgttctttgtaaggtaatggattatccataactactgtcctcgctttcttagcacttgcaaacatttcgagttagcgttaatatatacgcacaccttgaattgttttctttctccctactcttgtaattcactccagtagggagtatttttgtcttttagcttgcaaacgagactgctttggaataaagtaaatgttggtactaatcatctcttccattagtccatcgttagccgctactagcgatggctttttttgcgctcgtttccactcgtggagtggtaaaattgatactttttgcatgatcattcctcctacttaattacttgaataccattagtaatgatttcaaattgctggccattctcttttactacagctacatctttttttgtacgcaacgtgaacggaattgacttgatttcaactactctgccaacaccggcttctcttatcagctgaccacaactatattcagccttgtaactcactcgatcacctacatgaactttcatggttattcctcctaatacattggtggcaatgtaaacgtccagttctcatcagaatttccatctggctcgcaaacattaatatcgtgttcttgcaattcgccaataaattcttctgaatagccaaagcatgggcgccgcttaatgattccatccgtatcgtaagtgatagcattaatcagctcacgttcatctgcacgaatcgcgttatacttacgtgctcttaacgcgtgctcaatgtcttctccatacatatcgtttcctcctaaattccaaaccagtttctaatctctcggcgcttgtaccatacggatgttagcgcccaggttaataccgctacttctaccatggcaattcctccttatgagttgaatcatcatctacccgcctaggctttaattactcaaattttgatgattcaataaccatttttcgactgctggggcgtaccactttccgtcttcttctggctttgggaacccttctttgtcgcgatagtgcttgtcgaatgtatcaactttgattccaaactcagagtagaaatctttacgtccaatcattttatgatcaacagcttgttgactacgcccatccgcgattccttgttcatatgcttgcgtgaaaagcttcgacaaagcacttattaaactgtccatcctggtcattcctttcggtgtataattttgttagtccaattaatcgaggtgacaaatatggaaagctctcattgcgaacatgaaatggcactatatgccgctcaagccatgaccatttcagatattgctgaagaaaaagataaggctaaatctcatcactatacgtacgatgctcgattaggaatcgaaatattcgaagataactataagcatgccctcgaacattattcgggacgctttcccgattaattaaccttttcttcttcctgtttggcttcaagatctgattggatagcgcctattagctgaaaggcctccttatacgacagatcattgctaaacaggattttttctatttctgatttggcctttgaaaacctatcagattttaaaaatgctcgcgtgtcccatttactcatatttgcttcacctcctatgctggcttagttgtatacttgacttattccaatttaatcgaggcgataaatcatgaatttaaaacaagccgctatatttgaatacagtttcaataagttactccatagcttaaataaagacggaagccaaaaatgtgtttggtatttcaatggtgaactctttactgcatctttttacaaatccaatccgtttaaagatggcaagacgttctttgcctataacgaaattttttcgaaacactttttcaataacgatcaatttaatgaccaaaaggtatctcaatttaacaacttaccgttatttttaaatgaccttaaagcctttgtctcttccaacctagttgacgaagacgatctggccgatagtctctttttgagaaacgtttcctttttccgaaaagaattaggtgatttagatttttatcttttcccagaagacacccaaatcgaaattgtttcgactatttcatccgaaacttcggatcaaaatgtttgatgtattccaatacactttgaagttcagcacttagttgctgagctttttttattgcagttttcagatcttcaccattttctaacactaatgtgattccaggttcttcttggtctgctgagaaagctttgtcatactttctaacgcccaacattttttcttcatctttcatgttccaatcctcctatgctggctgttcatttaagtaaaggtcgctcataccaagcatgtccgctgcttgtgttaaagcgtcgtagttcgtcgcttgaacttcactaactgtacttggctcccacttaccaccgttaacccgagatttaaggttagggttcaacatcgtatcgttatactcaagcaagaatttcagcgcttcacgtacattttcaaattccattgttttacctcctatgctggctccttgtcgaatcgaagtgacgtctgtcgaatgattgtcttagttgctgtagatggctcccagtcgttgatgaagtccattaccatctggtagtccttcttgcgtagcattgaccgagcactcacgttagcaatcttcttgattccactgccgatatctttgaacagctcgcctcgttgtttctgtgtgatatggccatagctatgtgcgacttccgacacgcgctggttaacacgccggttaagcgcactatattcaggattaggaataacttggttctccttgaggtctttcacatcgccctccacgctatccagtcgttgattagtttcctcattggcttgcagtgccaatctcgcaatctctcgtggggacgttggcagtgcaaactgtttcgggttgaagtagttttcttccagctcatcaaacatgtcccaagcttgatcagttccaagcatttttgaatgccggctagcaccacgctttgtccaaagatataaagaactaacatgttcattaaccaaaccgctttttgcgtattggtctttaaactgcttcaacaaatcgtttgcaaccaaatagaaatgctttccttcgatgaatttgtctttattccttttaaaattctcttggattcttcgcgatgttgttccatagaactcagctagctgttcagtggttaaaattagatctccgttaaatttaacttgttgtacttcttgcatgtgggtcattcctttctatgctggttgtttgtagtccattggcgtaaacaaaaacttgatttcatattcaggaaaaaatttttcttgaatttttaaagcttctgtaaatttgaacgaagacttaccatttattttgtcagccactgtctggtatctaacgttcaacagatcggcaatatctactaaagaaacgtttttttcttttctgacattgttaagattattcaacatattttccttcctttctaagtacgaaaattcgtatcttttaataaaaaaaataaatgtcctccttgaacatgacctaataatatacgaattttcgtatcaagtcaatacaaaaattcgtatttttctaaataattttatatacatacgatttttcgcatggtacaatagacacatattaagggagtgaattgatttgaacaaagaagaatatttaaaagatttaattgaaatcaaatacggcaacgttaaatctttttcggaacatgccggattgaaatacaccaccgttcgttcaattctggaacgtggggtgttaaacgctaaagtagaaaacgttataaaaatttgtgatgccttaggcataaagccagaagacattttagaagtagaagattccattattaatgataccaataaaaagatgattcaattaagctctgatcgtcagcaaaatgtttacaactacgctaacaatcagttgaaagaacaaaatggtaaagtcgttaacttgccactcgttggtaagtcagccgctaaccctactgaattgacttatggcgatgtagaaatcgaacatgatgacttcacccacgtaccgcacggggcagacacagccatccgtatacaaggcgattcgatggagccacttattcacgatggtcaaattatcttctaccatcagcaagaagaagttgagaatggtgaaattgctatcgttgaaattgatggagacggtgttacttgtaagcaaatttactacgactacacttccgatgaagtcatcttacgatcaattaacaaaaaatacgaaccacgtcatgttaaagatgaccaggtacgtattataggcagagttatattataggagcttattgctcctatacttatgcgttaaaaagaacacacgttctacatatttagcggtattatacttacataagaccagatacggatgtcgctaaaagctggggaatttggaggaatgtaatatgtcaaaatgcgtgatttgtaaaaataagattggcttttttgcaaagtattttaccgtcgatactggagaaaaagtatgtaaaaattgcctttcaagttctgaaccagaaatattaatcgaaaatctttcctctgcggcggacgtagcttttcatatggataattctgttggcgatgcttatttatcatctattggcgaaaagtctttgtcagattctcgtagagagaacgaggaagctaataagaagcgtctccaacaagaactagaccaaaaacgtcatctcgaagaacttgctaaaaagagaaaagaggatgccgataaagctgcacgacaagaaatatttcattttaaagtacgcggtaccacccactatgacctagcaaaaatggtctcttacgcacgtaaaaatgacttgtttgatccttacgatggatataccgatgcagacatcaaagaattctcaccttacgaagaagtgtatgaaacagaccttgtaggattgataagtgcgatagaatttagaacagaccccaataataaatatgataaaaatgcaatcaaggtcattgctacgcttgatgatggcgaatatatgttaggacatgttcctgccggaagcactaaagatataagtgaaataatgacgaagcaaaataatggaagcatcgcgctaaaaataaactacacactaactggtggtaaatataagattgctgaggaaaaagaagaagaattcaattttgacgaagattgggacgttgagaaggaaatacagcaagaggaaaacgaaacagatttcaccaaaaaccttagaattaagtctggaaagaaagagtatggtttcaatatccaattatttgataataacattcaatgacggaggtttcgtaaatgggactactaataatgatcgtcatctttctagcactatggaagatattaggaacactaggacacatctttttaccaatattggccgtgttatttatcctggcaacctggattccttcacaagcaatcgttatggtgatttgggtgccaatcgcgatattatattttatcggcttggccgggtataaacatgctaagtagaactagtataaatatattttaatcggggtaaaagctatggaattgtatgtaggaacgtacagcacacacgtgttcgactttaccattgcaattggcatcatttgcttcatagcgctagtcgtcatgttagtttactggacccgcaagcgaaagtagcaccctcgcccactaccagcctagcgggcaacatgcgagcgtagttcaacggtagaacggtactcctttgagttgctgactagatactaacagatacaggttcgactcctgccgctcgcattaaaataaagaaagaaggcaatactatgcatcaagatatttcaaggtacgaactaatagaagatattatcagtgacttaacagcctttgtaaaatatgacgccattctctacctatcaaaagatagctattccgaagcagaatacgaccgtatgcttaaaggaattaaagacgatttggtgacacgcttcaagcaaggaaaggaatagtaaaattttgccagtcaagccaattgaatcatttcagttggcatcttgcgagcgtagttcagcggtagaaccttattccaagtcttgaagcccattctttcttggagtactatgcaggtccgactcctgccgctcgcgttgtaacaaaaaagcacatcccctcccgccaagaagatggatgtgctaccaataaaaaccagtggattgctccgctctttttacatacataatattatcacaactaaggaggtgatgcctacaagtccttaaaattctacccgcctaggtgaaatttaaggaggaaattaaaatggcgagtattaaaaagaaaaatggcaaatgggctgttcgtgttagttactatgatgagtttggcaaacggcactttaaaaataagagtggcttttctcgtaaaaaagaggctgaacagtgggcgactaaattggaacaagctaagtttgaccaatccatagggaaaactgacacaacgacagtctttgcagattactacgagaaatggttagaaacctataaatttggcaaagtagcacgaattacagagcaagaatatcgatatactcttcgtcaaattgtggagctactacccaatattaaactatcgtcaatgaccaggttacgttatcaacaatttattaatgaatttgtgcacggtaatactaagcagcgtgcacagcgacaactggcagatgatcaaccatatcacagcaaatcatctgttgaaaaattgcatggccacattcatgctgcaattatcgatgctgtagccgataatttaataaagactgatttctgtttgcatgttgaattaggtggccacgctggtaaatctgcgcaactaaaataccttgacgcaaaagacatgcaaacgctagctatcgaagtcaataaaaacatcaagctaatttctactggaaaatcaatgatctatactggcctactaactggtatgcgagtagccgaagtttctgctctgacttggactgatatcgattggcaaaataagactatccgtgttaataagtcatgggattatgtttatggccaaaaatttaagaaaacaaaaactgaatctagtattcgtacaataactgtaactgacgatcttttaaatcatcttaaaacactgcatgctttacagatggcagctaaattggataacccagatcatctagttttcatgaacaagcgtggtcgtattccatcccctggagcgtgtgataacttgcttaaaaaatattccgattcattgggaattaaacggattagttttcacgggttgcggcacacccatgctagttacctgctctattgtggcgtgaagatggaatacatttccaaacggttgggccataagaacagttccatcactcgtaatgtctacgctcatatgattaaagaagaccaacaacaggaagacgaacggaccttaaaagcactctctcaggtcaattaatatggtgcacttttggtgcactcaccaaaaatgatgacgccaaaaggcttgatatcaatgatacggtagtacactcgaaagtctgtactctccttattaaaatagtagagaccagccagtaaaaacaagaatcccaacaagcattgatttgtcgggattcttgttttttatataattcaaatcaaacaagtcaatatcaacatggtttgctacctactatactgtttggaaatggtatggatactactattacaaaataggttttagacttgagctactcttgcctgctccaaaattttggcactcaatatcaacgctttcttgaaccacctagaggttttctatactattggtttagtaacatgttctaaagctgcttctttaattgttgaatgccaattcaaattcattcacatcaatgccttattaaacatcggcacttgaaataatcataatgatcaacaacatcaatcaagtaataccattccccactaatccacaaaaaatatccgtcagcccttgccaacggatacccaattacttctgttcacgtgcggcttgaccaaaaacaaagaacgaaccaagaatacccacgcatgatagtaaaaataaaatgccatagcacagtacatcccccactgtcactaaagtcttcggaaaaccggcagttgagacccatagaaaaatcacgcttaaccaaaaccaaaatgaacgataaaaccgaaccggtcgacgtatccgcatgacgctcccccctaactcgtgattccaatgaaataaccgattggaataacgcctattataggcagtgcgcaattaggtacaagctctgaatactcaaatccgacgtttaagttacaattcataaccgattacgtttgttaagtgccaatccgattaatatgccccctcgcaacctcaatcacgacgagccagtttacgagcgataatcataaatcggtcttcaaacgtcgtgacgcgaccattaatggccagtaaggattgtaactgatgtaatttgggaagcatccgtgccacgtcaaaattcggaaactcccatggaatcaccgtggtataatagacaattgcgccaatatccgtaaaactcagtgccgcgtaggcttgctcagcccgcagaatttcaaatcccgcagcctgcatttgagccattaccgtcaacaactgattgtcaggatacgccggttcgtaatgctcatcaaagaatcgtgacaacgcataattattggtcgcaccaacttgctgaatcacaagtcggccccccagctttaaaacttccgcaattcgcttcactggcatcgcaccatgactattcgttacaatatcaaatgtcgaatttggtacggccgtcaactgttcggcggcatctggatataatgttatcccctttttaaccaccgtttgcttcaacaactcaatatttggttgccacccctcagtcaccgcagtcagcgctggctgatggttaaaacgccccatcaattcaccaccgcccgtatcaatatccaaccaccgatcatcggcacttagatgctcacgaactagggcagcgtaatcccacggtaagtccgcagtctgccaccggccagccagatgactaaagtcccagccgtgcatggattgctgcgcttcttcaaaccaactgctttctaaagctgtcatattttgcctccttcgtttcctataaaccagaccacccatcaaagtctccgctggcctatttcaatacgaattatgctatgattacaatatctttaaaaggaggttcagtcaatgacacaattactggtcacaaccactgaaaatattccggggcacccctatgaagttatcggtgaagtctttgggctaaccactcaatctaagaatctggtccgtaacattggggcgggcttaaagggcctagttggcggcgaaatcaaggattacaccaagatgctcgaagaatcgcgcgatgtcgcggtcaatcggttgcgcgataatgcaagtgccatgggtgcggatgccgttgtgatgatgcggttcgacaccggctccattagtcaggatatgcaatcggttgccgcatatggtaccgcagttcgttttatcaccgaagacttgaccactgacaatgcttaactgattcgagactaacgaaaccgcctgccggtaatctgggcaagcggtttttagcatggtggcagctgtttgtataacacaattataattttcgtcaccggcgaatgaacagacaaccaccacaagctaacagtaatcccatggccgtcaaataagccgcttctgggctcacgatattatccaacaagaccaatccaacactgccgattggaatcgaaatcgtcgccaatgaatttatgatgccgcctaaactcccaacgatactttgatcggccactttcaataaactcgccatcaatttaggatttgcttgccccatacaaaatcccccaatcatcatgattgtaaccactatccaatagttttgccaaaacaacagattaataaataaaccctcaaacgccacgacggtagttaacatgacaccacgaaacgtccacctctgaaagtaacctgtatgtaacaaattccctgcaaccgatccaaatacgtcagcagtattcatcacaagaattgcgactccgaatgaaagtggtaactgcgtcgcccggtgaatcaggtataaattcaatagtgcatcgacgcttgcacctaccgcattcaagaacaagacgctccccaatagcgccaagacgttcatgtgcacccccgcttccattgcttgtcgtagcagttgacgaaatgtcgacgtcacggtgacagttgcggaaggtaattttagcgtttcatacccgaacagtagcaccagaccggcaatcaagaacgtgattgcattcaaatatcccgcgagacgataatcgcccgttgcggccaatagactgacacccaacgcttggcctatcgtctgcattaacactccgataccttggttgatccctaaggcctcttcttgtaactcagacgcgactttagcttgtaataatggcattcggaggctgccgctcaacatccccaacacgtctgaacacaaattgatgacaataataatcaacagcaacccgacctgtttttcagtaataagttgcgctaacacgagatataatgccgcttgaacaaatttcaaacctgctaaccacccccgcttattggtttgcgagtctgccaatcgaccagtaagcataccaaaaataccaggaagcacagtagccaccgaaactagcgaaaccatcaaatttgcttgtgcaaacgttcgcgcgtacgttaatagaataatgttaaataggctggtaccaattgtctcaaaaagatcagctactgttaacgtgacaaacgctcgattacggcctagatttttcataacgccacttccaatttaatattatttattgcttaaataaatttaaatgataaagcaactttaatcgtttgatttctatttgtcaaatggttaagctagtattgaggtgaaaaacatgtccaaaaacacactggctcagtttgcaaagttaatggccgatcccaaggtggccgctatcttaaaggccaccaaatctaaaactggtttaacaactaagcaaatttcggcccaaactaaaattcccaacaatcagttgtactacaccatcaacaaaatgcaggatgccgacttattaaccatcgttaatcaagttcaggttaaaaatctaactgaaaactactattccagtgcccacctctcccatgagacgccacacgatcttgatggtctcgatactgatctgactgacatctccggtacgtggactcaagcccatgtccaacaagttttacaatggatcatgctattgaaccacgactttaccgaagcctaccaggaagagatgacccgcaagcaacctgacaagtcagccatttttttcagtaacgcgatcctaaacctttcagcggtaggcgagcaccagttgcgcttagatttgatcaaattgcttggcgatgctgaaaagaatgatcctgatcctcagtcaacggacaagcgtcaggttaaactactcattgaaaagtggcaataattagaatatgcaattgttagtctttttggcttggctaccaaagaatcactgactatccaagctaactaacgaccaaaacaagggttagcaaaaaagctccgaatgactaataaatcgtcattcggagcttttaatattggctttaaaattgcatcaagctcaacatatcataatctttaatcttatcgcggccgtgcaactctttgagttcgaccaagaaagccgtcccaaccacgttaccgcctaattcttcaaccatttgaatcgttgctgagatggtcccaccagttgctaataaatcatcagtaactagcacattttgtcccggcttaattgcatctttatgcaaataaagtgcagactgcccgtattccaaatcataagtcgctttgaccgtttcgcgtggtaacttacccttcttacgagcaggtgcaaaaccaacgcctaattcataggccactggacaacccacgataaagccgcgcgcttcaggcccgacaatcatatcaacatgtttatcacgcgcaaattgcacaatctgatcagtcgcttcacggtaagcttccccgtcagccatcagtggtgaaatatcgcgaaaaatgattccaggttcgggatagtccggaatactagccacatacttttttaaatctaatgccatttgttcttaacagctccttcaattcttaaccgcagcctggttcttcacccatacttggagcgctgcagatttactatataaaagcgtttcttcagcaacgatttgttgttcgcgcagctgataactaggggcgtgatgtaaatccgcttttgccggattcgaaacgccattcatgacaccatcatttattttaacaaatccgacctcaaaaaacacctgaatcatgaaaataagcaaatttcgttcaatatgcagatgcttggccactaatgttaattgatgatgaatatcaacatcatggtgcgctgcggtaaactggaaaagtttcgcaaactgcgcgcgatttggcattcccgttaaataaaccgattcttgccgatataagtagagcgtcagctgatcgagcgcaattgtgctgagtacctgggtcatatccgccagcgtgtcaggacaatcgacaatgaagaccgcttgattagccgtcacggcagtcagatccattttcgtatcccccacccatacggcttgcgcttgggaacctaaatactgttcaacttttttcaacagacgctggtggaaaaagaggtaaacccccggtgcttgaaacaaatgggccgaaagatgttgcgtccgggcgtcgatcacctgggtccccgtcactgcaatatccttaaccatgatttggggcttcgtctgaccgttccaagtattttcactcaactcacccactaacgtcacatcggtgggactcgcctgaatagccggcaaggcagtacccatcgaaaaaccgatagcatcaatcgtattggtgccatcacccagttgtaatttcaagtgttgctgatcactaccgatcgcgcgtgcttgcggaacagtcgttggaactaattcaaacaacggtgccgggttatccgttccaaagggggccaacgcttgaatatctgccagagttgccaaggttgcctcagctaatggtaacgtgccgtcaattggtaaactgacttgcgcattatctgctaattgctgactaaccgccgccgcttccatcgcctctttaagcgttgctaactggtcggccatgacagttagtccaaccgccatatgatgaccgccaaaagccaccaatgactcccgaactgggtcgattgcggcaaataaattatacgcttcgacgctccgaccactacctttgagccggccatcatcatcctcatttaacactagggttggtttgccagtcgtttcgaccacgtggctcgcgacgattcccaaaacaccctcgtgccaaccatgcccggtaataactaaggtttggcgggcctcattttccggcgtctgtgcttgctcgattgcactggcactgattgtcttgaccaagccttggcgtttttcattcaattgattgacctgcttggccagcgcggtcgcccgctcatcgtccaaagttgtcaataattctacaccgctctgcgccgactgcagacggccaagtgcgtttagccgaggggcaataccaaacccgatattggtctcggtcaatttatcgggaatcagtccggcttcttgaatcagtgctgccaagcctgggcgggtcgtctgctgtaagaccttcaggccgagcgttaccaaagtccgattttcaccagttaagctgaccaaatcagcaaccgttccaatagcagccagatctaatagttcctcgggtacttcctcaagtagcgccgtcgctactttaaacgccacaccggcaccagaaagaccaccaaatggataactgccctctggatgtcgtggatggacaatggcgtaagcgtgcggcaattcagtcggtaactcatgatgatcggtcactacgacatcgatgccctgttcctgcacttgattgatgaccgcatttcccgcgacaccgttgtccaccgtcacaaacagcttcgttccagccgcaatcagccggtcaaaagcggcctgattaggaccataaccatccttgaaacgatctggaatatagtaattcacgttagcgccaatttggtccaacgtttcatacataattgacgtacttgttaaaccatctgcatcataatcaccgtaaatggtaatttgatccccggcaataatcgcctcttggatgcggtcaacggctttttccatatcgtgcatggtcgttgggtccaacaatggttgttgatccgcgtgcaggaatggggcggcttcttccgccgtattaatgccccgcattattaataaccgggcaactaagggggtcacgctggccgcctcagctaacttatcaacatcggcttcatcaacggccgttgttaaacgtggcacccactttttctttgccgctaacatggcatccttcctttcaacaacttacttatctgctggcgtggttggttgttctgccaccgctcgtttttgtttacctttattattcaaacgcaacgttaattgcttattttcggcagtcaacttgtcaatcttagcctgggccgctgctaaagcttcactatgggctgtccgttccttagattcattgaccgtcgccatcagtactgcggtaatgacacctaagatcaacgtcaccacaatgaccaaaatcagtggccaatgaactgctgtaattccaaaattgattcgaactggttctacgtttaaaattgcaaaaataatcactactagtgcaatgactagtgcactcactaaccgccattgattcttcattaaattcatcccctatttaaaattaaaaaccgtccccgtcagccaatccccgagcttgggtgccagctgataacctaaattagctgcagacatcacccaaggccgattcagttcgcgccgttgatgcccgagtttgcttacaatcaattcagcaaacttaacggggttcaatgccagctggtcgacccggtctaaatagtgccccgtgggatccgcaattttgaaaaagtccgttttaatgggacccggattgaccgtcaatacgttgacatgagcatccttgagttctaagcgcaacgcattatcataagcaataatggccgccttactagccgcataaacggctgatttaggtgttgcgattttgccagccatcgaggcgatgttgacaatttcacctgcatgttgcttgaccatccgttgcgcagccagttggctaacatacatggttcccaatgtattgacgcgcaacattttcgccatcaccggcgcatccatggtgatcaccgtggtcatatcgccaaaaccggcagcgttaatgaccacatccaattgaccaaatagctcatcgatggtcgtaaagacgtgatcaacgtccgccacgtgacccacgtcacaagtaatcgccacggcctgcccttttgataacagacgacattgatcagcaacctgtgttagccgttctcgccgccgggcggctaagacgacattggctccctgactcgccacagctagggctagttgctcgcctagtccactagacgcgccagtaaccaaaacagttttacccactaagttcgtcatttacttgacctaacctttctcaggtaatggaatatcaattacatcaaagtcacgaacgactttcgagtgactaaagactttctgtgcttgtttttgtagttccttactcaacttacccgtgtaccgagccgagatatgggtcaacaatagctgcttaacaccggcctgttgggccacctgggctgcttgggtactcgttgaatggtaatagttatgtgccaacttaccttcatcttttccgaacgtgctctcatgaactaaagcatccgcatcctgtgccaagctgaccgcgtgcggtgtccgccgagtatcaccgagaatcgtcaccgtccgccccttttgtggcgcagcgatgtaatcttgaccattaattgtccgaccatcaggcaacgtcaccgttttgccggcttttaattgaccatagacgggaccactcggaatgttcagggctttgagtcgatcggcttgtaattcacccgggtggtccgcttcttctacccggtaaccaaaacaagcgatccgatgatccagaggttcgcagcttactttgaacgtcgtatcttcaaaaactgtctcagctttcgtgatttcatgaaacttcaatggatatgacaaatgggtgccagagacccgcaacgccgtttgaacgaagtcgcggacaccgactggcccataaatggtgagtggttcgtccccgccttgaaaagaacgcgagctcaataaccccggcaagccaaagatatggtcgccatgcagatgggtaataaatatttttgcaattttgcgtggttttaacgtcgtgcgtaaaatctggtgttgcgtcccttcgccgacatcgaacaaccagacttcatttcgctcatctaatagtcgtaatgctgtgctagtgacattccgaaatttgcccggtgagccggcaccggtacctaaaaattctaattgcatatttttgttcgtcctatctatacagtctgctaactattttaccgaatctagcggcaatacacaattgttagcactgcaaagtcatggccggtcaacaccgtgcgctcaccgaccgcaattctaaaaagcaagcgacgttgggcgactcctcacaattaacaggaagaacacgaacaacgctgctcattttattttaacatgtcaggctaaaattatcgcacttggtttcaagattccacgtgccaagactgcctgccaccggtgttatctataatcaaaaaatgcacttttccgggcaaactgactatgacgggttgtgaccgttttcattcaacccgtcatcgccggcaaatgaatcctcagtccatcttgcttaacccaattgattatcgtatacttgcttacaaatcgtctgaacaagaggtaaccgttatgcgactcatcgactttaacttatcaaccgctgatctacagcaaactttaccactgtattgggaactaacgactaatcaaatctggccaatccaaagtgttacgctcgtcgatcaccagctggttttagtagcttcaaaaagcgcgctcccgctgacactcgaccagttcaatgcgcggacgcgccaaatcgatggtcaaacgcagctctgtattcaaaccccaccgcgcccgcgccgattatttggctatcgcttaagccagcagcgcttactgtttggctgagcatctaatcgcacgtcagctcaaaaacagcgtcgttagttaaaattctaacggcgctgtttttggattgttcattattttatcactagtccacctatcagactgtcgtaacgacaatcatcaactaattatgtcgtcacaaaagtttagtccataaactggaaggagtagtccaagatttgaatcgtatcatcattcttggcaccagctgcacgtaaggcatcatcaacacccatcccacgtaattgtcgagcaaagcgcattaaactttcttcatgatctaaattggtcatcttaaagagccgttctagcttatcaccagacaagacgaacaagcccggttctggattatcaatgctaaagtctgcatccgcttcagtcgtgtaatcacggtgcttcaagtcgtcaacacccttgattgggaattgtggcgtcgtatccaataaatcagccgtcttggctaacaaggcttttagtccctgttgtgtaatcgacgataccggatagacggctggcgtgtttggcaacgtatcatccgtcgctaacttcgccttaaagtcttccagattagcttcggcatccggcatatccatcttagtcgccaccacgatttggggccgcttcaagaggtcaggatcataactcgtcagctcgtgattaattttgtgataatcctcaaacggatcgttttcttctacaccactcatatcaatcagatgtaaaataacgcgcgtccgttcaatatgccgcaagaattgaatccctaagccgaccccgttagccgcaccttcaatcaaaccaggtaaatcagccatgacaaagtcacgaccgtcatccaaacgaaccatcccgagattaggcactaaagttgtgaagtgataggccgcaatcttgggcttagcactcgtgaccactgaaagcagtgtcgacttgccaactgaaggaaaaccaaccagaccaacatcggccaagactttcaattccattcgaatcgttaattcatcgccgggctcaccattttcagcaatttcaggagcagggttcttagcgctagcaaaatgaatatttccccgaccgccccggccacccttggcaaccactaaccgctgatctttattgacgatatcgccaattaactcaccagtttcagcatccgtcaccgttgtcccaagtggtactttgataattgtgtccttcgcggaacgacctgtcatctgcttaatcattccattgccaccagctgcggctttgaacttccgcgtataacgaaaatccatcagtgtccgtaatccttcgtcagcctgcaatacgacgcttccgccgcgaccaccatcaccgccagcgggaccaccattgggaacaaacttttcacggcggaaagcaaccatgccgttaccaccgttaccggcctttacatctacttttacttgatcaacaaacatgttcttttctcccgtttcttctatattattatctacgaaatccgatcgtgcgaaattagatacctgacctagtatacaaatcttcggccacttcgtcaaaagttccacgcctaattagacagatcatctttatttggatgctaatgacgatttgatgacaggttttggattattttgacggtttttgaaggtttttgttgcattttgacgtttaaacaggtatattattatgcggagggatttgaaagtgcttacagaagaacgtcaacagtacattttaaatacgatccgtttcaagggcattattaaaatcaaggacatctgttctgaaactcgttgttccgagtccacggcgcgccgtgacctccaacagctagaagaacagggcgagttactccgcgtgcacggtggtgcgaagtatatgaactcactccaagaggaacccgcgatgaatgataaggtttcccgtaacgttaacgccaaggaccatatcgcgcagcaagccgttgcgaacattcaagttgatgacgtcatttatttggatgctgggacttcaaccctagccatgattcaccatttaaatccgagctacaacttacgtgtcgtgactaatggtgttgtccatgcttccgctttggcagacatgggcatccaaacctacctgcttggtggcaatttgaaaggcaccaccaaagccgtgattggtcccgaagccgttaaatcgttagaggaataccgattcaacaaagtttttcttggtatcaacggtgtccacccaaaattcgggctcacaacgcccgaccccgatgaagcggtcgtcaaaaaaaccgcaattctacaaagtgaagaaagctttatcttagctgacaacactaagttcgaccacgtttcgtttgcgcgcgtcggtgatttatccagtgcaaccatcatcactgaccaactcacgccaagcgttgccgaacagtatcaaccattaactacgattcaggaggttcaatcatgatttataccattactgtcaatccatcaattgactacgtggtgcaactaccccaaatgaccctcggtagtgttaaccggttagcacacacggcgaaactccctggcggtaaaggcatcaatgtatcgcagattctgaacgacctagaccaacccaacaaggccctcggctttatcggtgggtttaccggcacgtttatcagtgatgctttaaaagccaagggcctagattgtcacttcacaccgattgccgatgacacccggatcaacgtgaagattcacgctgaagaagagaccgaattaaacggtgctggcccggacatcaccgccaaagaaacagaagccttctacaccgaattggccaatttaacgccgaatgacgtggtcgtcatgtctggtagtttagcgcctagtttaccagatagcttctactacgatattattcagaaggtcgaagctgctggtgctaactttgtcatcgacacgaccggtgaagctttgaagaaaactttacccagccaccccctcgttgtgaagcctaataaccacgaacttgctgattactaccacacgacgtttaatagccaggctgatatcattgcagcgggccaacggatgctagctgaaggtgcacaacacgtgctgatttcaatggccggcgatggtggcctcctaatcaccaaggatgcggtctactttagtcccgcaccaaagggccaggtaatcaactcagttggtgccggtgattcaatgattggtggctttgtcggcacgttcgccaaaacacacgatgctgttgaaagcttccgctacggcttagcttgtggctccgcaaccgccttctcagaagacattgcgacccgcgccaagatcgatgaaattttgccactcattaacattgaaaaactcgctcactaaagaaaggactgttaactaaacatggatatccgcgatttattactaaaagatgtcatgatcatggacatgcacgccacgaccaaggacgaagcgattgatgagttagttcataaatatgccgaacaaggtatcatcaatgatgaggccctctacaagcaagacatcatcaaacgggaagccgaatcaactaccgggattggcgacgggattgctatgccccatgccaaagataaggctgttaaccgggcaaccgtgatgtttgctaagagtaaggccggcgttgacttcaacgcgttagatggtcaacccgttcatcttttcttcatgattgctgctcctgaaggtgccaacaacacccatttagccgccctcgccgccctctcaagcttattgattgatcctgaattggtcgctaaacttaagaatgcacagtcacctgaagaagttcaacaactcttcggtgatgcccaggctgctaaggaagaaaaggaagccaaagatgcagctgccaaggccgaaaaagaagccgcagctgccagcaccaccactgacgaaaaacgtccctatttagttggggttaccgcctgtccaaacggaatcgcccatacttacatggccgaagcagccttgatcaaagccggtgaagcggccggtgttgacatcaaaatcgaaacgaatggttctgaaggtgttaagcacttattgactgccgatgaaatcgctcgtgccgacggtgttgtgatcgccgctgacaaaaaggtcaagatggcccgttttgatggtaagcacctggttaaccgtcccgttactgacgggatcaacaaggccgatcaattagttcaagaagccttgagcggtaaagctcctgtctatcacgatgctgatggtggtgctgcagatgacgatgaaggtggcagcgctaatggtagtgtttggggtgaagtttacaaagacctcatgaacggaatttcccacatgttgccattcgttgtcggtggtgggatcttaatggccctctccttcattattgagcaattcgttggtagtaagagcttagcctttaccttcttcaaccaagctggtaacatggctttcgccttcatggtacctgttttagccggttacatcgccgaatcaattggtgatcgtcctgctttgatgcccgggttcgttggtgggttcatggccacggtatacactggcgcttacggtggtgtttacacggcctccattaccgccaatgctaagagtcccgctggtttcttaggtggtttagccgctggtttcttagccggttatattactgtttggatgaagaagtggaccaagaacatgccacaatccttagacgggatgaagccaatgctgatcttcccaattctgggcttattgattattgctgcgctaatgttcttcgttgttaacccaatcttctcagttatcaacgcctggattacccacttcctaaactcaatgggtactggtaatgccgttctcctcgggcttgtcctcggtggtatgatgtcgatcgatatgggtggtcctttcaacaaggccgcttacgtcttcgcaactggtgcctttaccgcaactggacatgggaacttaatggccgctgttatggctggtgggatggttccaccattggcaactgcgattgccactgccttctggccaaagaaatttacggatgacgaacgtaaagctggtatctctaactggttacttggtatttccttcattactgaaggtgccattccattcgccacagctgaccccttgcacgttatcggttcaagtgtgattggtgctgccatcgccggtggcttaactcaactttggggcgttgccgtccctgctcctcatggtggcctctgggtctcattactcgccacgaatatctggggctacatcggtgccacaattatcggtgccgttatcgctggggttatccttggtctctggaaaccagctaaagcttctaaataatgtgatatctaaaaagacgatcaaattgatcgtctttttttgttttcaaaattaacgaatcagccgtctaaccccgcaataaaacgggtataatgaaagtaatatactgattatgttaacgagaatcgagacgagtttgatgaaactacgaaaatctatctttggcatcagctgtgtattattcggcatgatgctgctttccggttgccaaaaacaaactaaaatgaccctgccccctgtcagtcacaagaccttaacagcgatggtgatcagtgatgaccatgtcattgcgcccaggctgcatgataatggtaaggctttcacgcagtacgcggctaacgatgccggtgcggatttaaaatacagcgcgacgatttttcgcgcttttattgctaaggcgttaatcaccaagcctgacgttgtgctcatcagtggcgatattactaacaacggtgaaaaagccagtcacgagtacgttgccaagcagcttcgccgactgactgctaagcacatccgcgtctacgtcgtccccggtaatcacgacttgaacaaccccatcgcccgtcgcttcaaaggaaagcatcaatatagcaccgaggcgactagcccgacccagttcaagaagatctatcatcaggccggctacggccaagccagtgaaactgacccaagctcattgggatatttggtaaaacctagtaaacacacttggtttttaatgctaaactccgccatttataaaagtaattatcaacaaggtaattcaacggtcggtggtggcctgaccgatgggaccttacaatggcttactaaagtcggtaagcaagcaaaacaagcccatgcgactctcattcccgtcctacatcacaatacaatggaccacacggtgattcatcaggactatacaatcggttatgccgaagatgtccgtaaggcctttaccactgcgggtatcaagttatcgctcagcggccatattcatgctcaaaatatcaagtctaccaaagtcaagaaccagtcactgactgatattgccagtggcgccctgatactgggatctcactattacggtacgcttaagatcaaccagagtaacgggacggccacgtaccacgcgaccccgttaaacgtgagtgcttacatcaagcaccaccgtggtaataaagcgatgcgcgcctatcaaaagtacgatcatgacgtgttatatgcggctggctataacgcagcactgagtcagttatatgaggaccgtgacgaaacgcaactatcaagcgctaaagttaatcagctagcccgcggcatggcggccgccaatatcgcgctctttcggggcaccccagtcaaaaatagcgccgctattcaagcttggcaacaaatgccccacaatacaagtttgcgcggcttcgtgttagccaccaagaaactacacggcaacgtgacgtggtctgggtccgtacaataaccactttataaactaaaggcgacagcgaattttcaggctgtcgtctttttgattagtcactacttatagctggtcagtcacaccggcaccaccctacttcgattcggctagattggttttcgcacacgtagcatttggttaacaatggtcattaaataatcacgcttgctaaatccgacgacggccgttatcaaaatcaatagataacggagtataacactgtgatagcctcctaaaaatagaaagccaaccgccaaaaaagtgagcgtaatcagccccagtatcttgcgatcatatggaagcgtgccaagtttttcgcgacagattcgattcataaaccaataatgaacaaccgcatacatcacatagcaaattaatgttgtatatcccgccacctcgtatcctaaaattggaatcaaccaataatttagcgccacattcaatactgcgccaataacactggcaatcatgattaaagatgtccgttcataatagaactcaaactttgcaaataaatcaaaagcaaaaatgaaaaagacgctcattgcgattggtggaacgatccaggtcgccttagcatacgctcgtggtgcgaatatcgaaacgatttcgggcgcaaatgcaatcaatagcaggttgacaaccgcaattaaaactaaggcaccgtaagcgacacccgcaatatcggccacccgtcgatccttgattttttgatatatccacggactcagcgtttgcgacaatgcaacgttaaataaaatcatgatttgtgaaagtgagtacgccaaactataaatgcccgcacttttcgtatttaccatgttcgcaatcataatccggtcagcactactcagaacgatttgtgaaagataatgtggggccaacgggatgttgaacattaatgcgtgacgccaaaaatagcgcgagaaaaacgttttgccacgatacatttgcacaaaaaacaagcccgtatagcctaccagttccactaatgctagccctaaaaatcgagccgtcactttatcattcgcatacacaacgagcaatacgcctactaacggtttggcgattgcaaccagcaaggtcaccatcaccaatgatttgtattgcaaggcaactcggcgctcaccagcctaaaaattaaaaactgacgaggtccataccattagaagcatcgccaacatctgcgtcgtcgttaaagaaaagacactattccaaaaatcacgaaagccaagataaactagtgtccatgctaataccaacacaaccgttaatccttgtaattcagccgaatatcgacgtcgatcatggctgaatttgatgagaccttgagtataaacgccgtagcacagatttagtgagacgatgatcgtgacgatagtcagccaggagtacagcacattaaattgaccatactcggaagtagacattattctggtaaaaatgggcgttgcgattattgaaatgctcttttcaaaaaaagcacagattaagaaccaaagtgaggccttaacttgctttggcaaatgccgatatttatttctaatactgactaacataaattcctttctcatagatctgaactgagcatcacatcccgtgcttactaataacaaatctcataagcaccgcacacgttcaatcacttggttgttgtcgataccggcgcccatttaccgaccaaatcgttcttaaacgtaaatagttgatcacatagtaacaattatctggggatgtcaccattgcgcggactaacgcagccagggcctgaccaagttttcgtttgcgcatactggccatcgccatcgtaaaatatttttgcccacgattaaacgtactttgggcacggacgtcatttattttgtctgttaacgccgacatcccgcggccgaaactgtctgctcccgtccgtttacgttccgcatacaattgttgaatatagcgcgataccagatacgttttccacgcgtcgctggtcatactattaccgcgtaaccgatagttcaacactcggcggttaattgacccgattttgaatccattagcaagcagccgcagccagagatcatagtcctcagccgttggtaataaacggtaaccaccgacttgttggacggccgttttccgcattaaaacggtgggatgaataattgtcgaaccatagggcaggattttttgaattagtggttcagcctcgggaatggccgatttttcaccgacaacctcatcctgctcatcaagataagcaatatttccagaaattaaatccaaatcgcgcgtttttagcgcctctaattccacttcgagccgattagtgacagaaatatcatccgcatccatccgcgcaatcaactcattacttgctagctcaatcgccttattgagactagcggccaggccgaggttttctggattgcacactagtttgatcatttccacacggcaatcgtaatccattaacaagtcttttaaatcactccgttctggattatcaagtacgatcacaaactccctcggcaaataggtttgcttcaaaatcgattcaaccgcttgctggacttgctcaggtcgttcattatatacactcataattacgctgattgccattttttctcctcaatcttcaattcagttgaaagtaaataccccaagaatattattgccgtcagtaccatgccgctgcgcgcaacctcacctttataatttgcgattagtagaactacgccaaaggctagaaagattttactatcacgaacaacctttccagactttttgtggcaagccgtcaacgaggctataatcgtaccgtacagtagcgccatgtaaatgatgccccccataaataagtcattaataaagccaatgtcggacgttccgaaccaaatattgctggcattgccaccatatacgcgaacgccataaccaaacacccagtctaaaagctgactcggaaacatcaagaacgagcccgtcagttgttcgtaattgccctgcttactaccttcaaagacgagtgcaaacgtatcttcgaagccactgacgatccaggtatacgtatcaggttggatggattgcaaaaacgctaaacccaatatgataaaggtcacactcaatatgataatcaacacaacttgaaacagccctcgaacactggacagcattcgtttgaccagcatcaaggcaaaaccaaaagccagcgtgatcaagccagttcggccgtttaatacgataataaagacacaaaatggcaggaaccaataatactttttgccaaggttcattcccatatatatcgcaactagtcccatcagactatggtagattggtgtaaaaaatgtgtagtcactgctgattccatacaaacgttcaccataaataaactgattctgaataataccggtggctgtttttgctaaaatcgcagcgcgaatacccgaacttgccagcatgaccaaagcaaacaagcattgaacaaccaccatccatagcatccaggtcaagaccgtttcacttgtcacgttaaaatacttacgaagaacttctagccataacactaaggcaaggacattcaaaataatcacaacattttgaaacacccggggatcagttcctgccagcttcgctctgaacgcaaagtaaatcactgatagcatcacaccaatcacaaaaatgtgcagccgattaatagcaatcgataagtcctttggcgacaatagcaagacgcaaccaccagtaatccccagtgtaacaatcaggggcacataactactgctccaaaagttgggttggtaaatcaggtaaaatccggcaatcaatagtcctagtcttaagaatggcccaccaatctgacgatttactgcagtcatcgttccattactcctttataaacttgctggatccgctgaatgaattgcctttgttcatagtcactaaaatcgaccgctgctattttagccttggtttcctgataaaatttcccatccgaaaagagacgtgtcagtactgccaataattcagcatcactcgcataaaccaggccatttacccttgcggccgtttgagagatgcccccaatgcgggggcaaacggaatcgcacccaataaggctgcctcgaccatggtcaatccaaacgcgtctgatttggacgtcgacagcacaacttttgcatgccgcatgtatttgtaagggttacttttaaaccctaaccaccgtatttgcggggtggctgcaatctgtttagcgatgtgtgcgctcaagctaccatcgccgacaatcccaatctttagttcagggattgcgtctaataatttatgcgcaattctcacaaatcttgcgggatctttaacatcttccaaccgtcccacgaataacaggtcaaatgcagtggttgtactggcagtagccagttggcaaatccgtgaactgtcgattccattgggaataatcgccgtattggttaaatgtttgtggaagcgatacgattctttagcccaatctgaaacatataagactcgtaagctcttgttgccaatatattgaaacgccaaacttttccagttcacactagtctgccatatcggggcttgatggatatgggtgataattggcacatggtgaaaaagcaggttgaccaaaaaactcgctttgaaatcgtgtgcgtgaataatatctggctggagtgccagaatagctcgccgaaatttaagaagctgtttcggcgaaaaactttgatacgcgattccggcagcttgcaagctttcttgtatcgatcctgattgtgagcagtaggtgaaatcataggatccactcaaacccctactgatattaatgaccacctgctcagcaccacctaatttggcggaaaacaagacatgaacaatttttgtcatcgacaatcgtcccttctaggccaagcaacgcaaatagtacgcctgcgtttgttcgagcatctcatgctcagtatagtgacgttgatacatttgataggaattagtcttgacctcggcgatctttttcgattgatagagtgtcagaattttttcagcaatctggcgcgcatcattggtgaccaaaaagccattatgatcaatcaattcctgaatgcccccaacattcgacgcaataatcggcagaccttgggctaaggcttccactaaactgattgggagtgcttcataatcagaaatcagcaccccaacgtccgattgagaataatatttttgtacattatccaccaccccataaaagttcactttaccatccagattcaactggtgcgttagcgttttacaggcttcaatcgaagggccgtcacccagaaaatgacacacgattggtagattttccggcaagtatgtcaatgcttgaatcaggatatcctgccgttttggtgtatcaaagcgtgccgccattgatagtacaaagacctcggaactggtcgccttgtttgcgcccgttaatgctgtcacgccattatggataacacgagcaggatgagcactagtaatcacaccactttggacacccaaatcataatcaaactgcgagacacagatgtaagccgttgtcaggcgacttaatgctttttcaatagttttccccatcaatagctgccgtttcttcccgacaccaggagtaaagccccagccatggaccgtaaaaatgactttcattggcaatctaatcgtggcgagcctcccaatcataccagccttcgaagaatgcaaatgaataatatctggctgccaattttttactaatttccttaacgtgtagattgctttcaaatcactcagcggtgcaatcggatgtaccaggctggcaactctgacaacttgcacgtcttgaaattctttcgcgacgcttgcactcaggcgtccttcaacgccgtatactaaggaaacggcattgccacgcatcacttgcgctttgatcaaactatatagatgcgcctgggccccaccccaagtcgcttgagtaatgatgtaaacaatcttcactaccgcgcaccatccccggaaataatcaccctaaccgttcccatcagcatcttgatatcaaaccaaatcgaaaagtgctcaatgtaatagttatcgtactgacacttggcacccggtgtaatatcatagccaccattgatctgcgcatagccggtaatgccaggaatgattcgtagccgtttcggaaaatcaggatagcgttcactgaattgttcggttagttctggccgttccgggcgaggtccgaccaaactcatatcgcccttcaaaacattccaaaattgtggtaactcatcgatccgagttttgcgcatccagcgtccaaccggcgtcacccgaggatcatttttttgtgcccagatcgcacccgtctgcgcctcagcgtcctgatacattgatcgcagcttaatcacgtcaaaggtcgtccccatccaaccgactcgcgcctgcttgtagaaaacgggaccgtcagaagtcaacttgataagtatggcaaacacaattacgatgggaacgctgagcagtgtgcccaataagccgactgctagatcgaaacaccgctttagatccatcttccagccggtgaccggaacaccaattttgctaataaattcacagtgttgttcgtcagccacgattgattcattaatctcaacttcgtgcatgctcacattccccttcccagtacttggttaatcctcttctcaacggccactctgattcataatttaagcgtgccaacttgccaatacttgcaactgaatgatcaacttcaccaccccgctgctcggcccgtttgatttcaagttgttgaccagcaatctcttgatacatctgaataatgccatttaaactagtttctaagccattggcaatattgatcacttcatgttgcacttgatgttctgtaatcaaccataatgccttgataacatcacttacatatacaaaatcacgggtctgcgttccatcaccgaataatgtaaatggtcgctgtgttttcaaacaatccgtcaaaatcgacaaaacccccgaatacggtgagcttggattctgacgcggtccataaacgttgaagaaccgcacacaaacggtcggcaaatcgtacaactcaccgtatgccaatacaaaacgttcagtcgcatacttatcaatagcatacggtgacacgggtgcgacgcgcgaatcctcgcgttttggtaattcaggtagattgccataaaccgccgccgaagaagtgaatagaaattgcttaataggcaagcgaatttggcgaatatgttcgagcaagttaaataccgcggtatgattgacagcatgcgtttctgccggccgctcaatcgaatccgccacacttgcaatcgctgccagaaaataaatatagtctggccgttcgtctgctaacaattgttgcatgaatttatcgtcacagacatccgcgacgtatatcgtaatctgttcccaatgcttgatattgctgatggcccccattgacagatcgtctaccaccacctcaaagccagattcaactaaatgatcaaccaagtgcgagccaatgaaccccgcacctcccgttaccaatgccttcataactatttacccctctcaaaaaagccaaaattttcgtcgttgatttggtcgcaagacttcccctaacactactggatccccgttcagtagcagtcttgcattcactgcaaaagatgcaggattggtactatctaaccgtgctaatgcctgataacctgcccgcatcataaatcctcgtcgtgccatcaaatgcgcatctgaagcaatcacttggaccagcccgcattcaactaattccagcgctgtacttttaaccgctcgcccaaattgcccaacgagactccccgctgttagctgtgccaaacagccctgctgcactaaatcatagagccgctctggttgtgccataatctgagcatttcgctctggatgggcaatcaccggagtcgtcccttgctgtaagagctcaaagattacttgcgccacgtaattaggtacctgctcgtgtggcaactctagtaacaaatagcgccgaccaacatcaattcctagcaagtgcggcagagctgtcgccaaatcatctcgcaaatggacctcctgaccggcaaaaacggtcagtggaatttgttgccgcttaagttcggcctggagctcggcaacggcacgctcgactaccaggccggtattctgataacgccgatctagatgatgtggcgttgccaagacgtaatgaatgccatcagccaccgcttgtcgcgccatttcgactgcctgagcaagctgctgggggccgtcatccaatcccggtaataagtgacagtgcaggtcaatatactcagttggtctcagtcccataatagccgtacccataaccgtgagttttaatgtccacgtcatttaaaatagtcccgagtaattgtgcgcgagcattcttcaaggcactcactgcctggcgcaccgcaactttttcgacaaagttttggcgaacgactaggacagtgccatccacttgaccagctaaaatccgagcgtcggtcacgggcagtatcggcggcgcatcaacaatcactaaatctaacttacgtgttgcgaccgttaaaaacttggtcattctatcgctggctaataactcagctggattgggtggtttaggtccactcggcatgacaaacaaatgatcaagtacgggataaatggcttcgttcacgtccgtcagttgcccgcttaaccatgaactcactccccgttggttactgatcgcaaacgtctgatgaatcgtcggccgccgcaaatcagcatcgacaagtaagacttgcaggcctttcttggcgtattccacggctaagttgctgccgaccgttgattttccctcgccctgaatcgctgacgtgatcattagtgttttcaacggtttaccgaccatcgcatagttaagatttgttcggatcgttttgacttgctcagttacgactgacatcggtgccgtcaaagttgttaactgtatgccggtatgcatattcgctactcttcgcctcaatttcataaccgttcccccctatgttaaactcgtttgactgccgctttaacaactgacgtcaccggctgtggtttaatcgccggttggtcgtgagtcgctgtgaccggctgctgatgattaatgattcctagacttgtcagcattaattcatctgctaggtattcgagtgtctgcacccgccgattggacaagattcggacacttgcatacaccaatcccaaaatcagccccccccccacgaaaccaattaggatattgatgatttttttaggcgctaccggctgatccggcgtctctgcgggtgcaacgatcgttacattattgaccctaataatatgctggacctgatctttaaacgttgcagcaatttggttcgcaatcattgcactagctttcgcatttttatcacgaacaacgattgaaaacacctgcgaattggccgtactggtcacgctgaccgtttgcttaagcgactcaagtgagcgtcgaatgtcagtttctgccattaaagtctgccgtgccggcttcaacacgactggttttgtaattaattccttataagtcgtaatcatctgcacatcggcttgctggcccgtcaaatccgcgcccgcactactgtgtttgcggttcactaatatttgaacattggcttgatactcgggctgaatgacccacaaagtcaccactgttgcaatcgtcccgcccaaaatcattaaactcaataataccttccaatactgacgaatgagtttaacaataaaatcaaaggttattacttgctccattccacacgctccaatatttcttgactgacttttattaaacgattgacattattgtagaaaaccagttgcaaacgacgcaatagttttcacgaattttcatgaaactcatataaatacaagcgaatattcgacaatctctaaatttaaattgacattatagacaataatgttatatttattgatagttactgatcaaaataatataaatcgtataattatttgactttattttagctcgtatttacccacaattatttcgattaaatcatcggttactccagcaaccaatgtgcttttcaactaatcacaaaatcgacatttttacaaatcaatgatgttttcaagcatcaaaaaagaccacctagttcgtgaaaactagatggtcttcttaacattaattacattagttagccagatgacaactatgtggcgcccttttgataatgcttcggtgttacaccaccaccggctaatgaaaatttgacagtttgtgcaacgtttttagcaattcccagggactgaatctcttccagtgaggcaccagcaattttactcatcgatccaaatttacgcaacaacttattacgcgtcttcggcccaaccccggggatctcgtccaagcgcgaactcaatgaatgtttggtatggacttgtcggtgaaacgtaatcgcaaagcggtgcacttcatcttgaatccgttgtaataaataaaatccttgactcttcggatctagatgcaaatgctgatcaccagcagaagcgagtaggtccgccgtcttatgatggtcatttttgaccattgccgcgactggcgttgcaatccctaattcgttctctaagacgtccttagcggcttccagctggatctcgccaccatccatcaaaatcaggtcgggcaatgctgcatgctccttcagtagccgtgtatagcgccgccgaatcacttcacgggtcgatgcagcttcatcagcatgatcgaccgtccgcaacttatatttccgatacaattttttattcggttgcccgtccgtgaagacgaccatggcagaaaccaagtcggccccctgaatatgagagtggtcaaaagcctcaattttatgaccagcaggaatgcctaaagcatccgtgatttcttgcatcgcccccgtcgtcttgcgctcatccaattccaacaaccggaacttctcttctaagacgattcgagcatttttttgtgccatgtccagcaaatcctttttctggccgcgttgaggggtccttaccggaattccgagaatgtcactcaggacctgcttatcaagaccgttggggactaaaacttcgcgtggtagaacgttatttttgcgattataaaattgcaagataaagctcgtcatttcttcaggtgcagttgacactactgggaacaagcgtttctcgcgcttcatcaaccgcgcttgccgaataaagaagacctgaatcgaaagccagcctttatcaagatagaaattaaacaggtcgcggggcgtattatcgtttgaaataattttctgcttttcaaccgtcatttcaatataattcagttgatcacgtaattcagcggctcgttcaaattctaggtcagcggccgcttgatccattcgtttagttaactgcttcttgaccgtttcaacgtgaccattcaaaaaggatttaatccgcttgatctgagcgtcatattctgccaccggcaccgttttaaagcaagctcccaagcattggcccatatgataatagagacacggccgcttctggaaaccatggcaacgccgcaacggatagaccttctgaataaaattgaccgtttcctgagccgcgtaaacattgggatatggcccaaagtagtagccaccatctttacgaacatcactgacgatcaggatctgggggtctcgttcattggtaatcttaatgtacggataaccggttcccttttttaatttaatattaaagtacggttgatgtttttgaattaacgtaatttctagcaggaaggcttccttatccgttgaggtcacaataaactcaaagtccgcaatctctgatactaaccgcgcggtcttaccagtatggctgcttttgaaatatgaacgcacccgatttttcaagttcttggccttacccacataaatgatctgactgtttaagttcttcatcagataacatcctggtaagtccggtaacaaggataacttatgttcaatatgcgcggatgccataacacaccttcccttcatttagattagcattattagtataccgcctgctagcatggggctcaaccaaacagcccggaaatatgatttttattatgaccgactattcatcactgtcgctactgatcacagtgtagcaaaaaaccggtaatcagcaactgagctgattaccggttatgtgttgtttacatcaaaattttagaaagaaaatcttgggcccgctctgtttgcgggttcgcaaagaattcctcaggcgtattattctcctgaatatagccatcagccatgaaccagattcgatccgctactgacttagcaaaacccatttcgtgagtgaccacaaccatggtcatcccatccttagcaagttcttgcatcacgtttaacacttccccaaccatttccgggtccaaggcagacgttggttcgtcaaacagcatcacttcagggttcatcgccaacgcacgagcaatcgccacccgttgagcctgaccacctgaaagactacttggaaaggcatccgcatgatcgtccaacccaacgcgttgcaataattcgtgcgcttgcttagtcgccgcggcatcatcgacatgcttgaccttcatcggcgccaatttaatgttttccaatacagtcatgttgggaaatagattaaacccttggaaaaccattcccattttttcacgtagcgcgttaacactcttcgtatccaaagttgtgagatcttgaccttcgaaagcgacttgaccacttgtgggcgtctcgagtaagtttaaacaacgtaagaaggtactcttcccaccaccagaaggaccaatcaccacgatcacctgaccgggttcaactttttctgtaatatcctttaaaacgtcattttcaccgaagctcttcgcaaggtctttaacttcaattactggtttagtcatgttgcattctcctttcgaagtagttcaagatccgtgaagcggtaaaggttaagatgaagtatagcaccataataacaacgatcggtgcaaccccccggtacgtatctgaacgaacaatgttactttgataaattaattcagtgaccccaataatcgaaacgatggaactatccttgatcaacgtaataaattcgttcccaagtgatggccaaatgttcttcaatgcttgtggcaagaccacgtaacgcatcgtttcaccgttggacattcctaaactccgagcagcttccgtctgcccaacatcgacggaattaatcccgccacgaatatattcagcaacgtacgcaccagagttcaaggaaatcgcaataatcccagaagtcagtgctggtaaattgacgaataacccaagtccgaagtacacaaacatcacttggaccatcattggcgtcccacgaataaattcaacatacgcagttgctaaccaccgaatggcagtcttaagtggatttcctttagccatccgtgctaatgccaataaaataccgatgataaaaccgaagaaaacggagcaaaccgtaatgattaacgtatattcgatcccggttgcaaaagccttccagtaatgtcccattgacgtattaacggtattggtcttcaaatacttgccggctgccggtaagtattgctttttaacgaggttctgtttcttaatccgatcaacggtcttattgactttgttaacaagactagttgaacctttccgaaatgcgatcgccgaactcgttgcactagagctcatgttgaagtcactaggaatagcaaccaaactcttattgtttgcaacataggcttctgcagaaggcttttccatagcaaccccatcaactttgtgactctgaagtgccaaaatcagatcagattgtgaagtcatccctttagccttggcagtcgtttggtttttgacggcattatattgagtcgttccagtttgggcacccaacgtgccattcttgaatgaattcttattcttgtacttgcccttatcagtcttattgatgacaatatcgtagccaccttgataataaacgtgggtaaaatcaacatttttccgccgtgaaggggttgggttcatcccagagataatcatatcaaccttgccagtttggagtgccactagcaatgagtcaaatgacatggatttgatcttcagcttcacgcccagatccttagcaacttgtttcccaatctgaacatccatcccaacgatcttactcttaccgttgaccgttgcttgaaactcatacggtggataatcaggcgacgtccccattactaagacgccctttttctgaatttgttctaatgaattatcgaccgcttgcgcatgttgcgtctgtccgagtgggacgacggtcatgatcagggccacaataatggctaaaaaccacccaaatctttttttcataggtattctcctcgttttgtaatttacaagaataaagtataaccgcatatgattatttatgcaagtatttttgagaatttctttattttatgcataaacaagtcgtttatacacgttttgacccattgattatgcataaaagacgaataactgacaaattgtcggaaatttgctatgataggcgttaatcgaaaggaatgattttatgagtttaaaagtacagcgtcaagataaccttgataagctattcgacaagtttgccattggtcctgacgataaggataaactcaccactaaagcggttcaggatactattgacgaacatgctaaacgcaaagaaaataaggcagctgataaaaaggacgcccataaatagcagtcaaaaaaaacgcaatggcagttagccatcgcgtttttatttgaataactatttagcaaattttagtcccgattgtttgcatcttttcgcgccgctctgcttccgtttctggtgaaacatcgcgccaatcaacaacagccaaagcaccgtcgagcatcccgctatcatccttgagcgctaaagcattatgccagcgagaaatgttgaggccgttccccaagtaggcttcatcagccggtgcaacgtgcatcacataaccagcattattttctaatggcgtggtatagtcgggatcagcggctttaagaataactaactgaaacttattaccaatggcacagctaccgcctaaactcgaatatttgttagaaccatcgtcagttgttaaaattacttgactccctgccggaatcttatctgcaaggtaggcttgagcatcgtctttgatattaatcttcatagttaagcatcctttccgtttcaaaaacatttaagttgtgcacaactcttttacagtctttaatttacgctatttcagctgcaaatgcaattaatttacctagaaaagtgaaaataaacagccgaactcaataatgacacaatctttgcaaatgatatgtggtcgtccgtcgcaataaaaaagagttgggctgccagccttacctgctgacagcccaactcttcaggttagaccactcttcaccgactatttaactggtttaccattcgggtacttatcgttgagtttaacaatattttgttgcgcaacttcttcgaacggaatatccgcccattcagcaacttgtgataagtaccataacacatcgcccatctgtttcgtcagctgatctttattcaaacgttcaccatgaaacgtatactttttgactaagtcaacgacttgaccagtctctgaagctaatcccagcgataagttcgtcagcacctgctcattaccatataatgtccgatttgctaacgactgatactcattaaattccaagttagttgcctcccacagtgtgcgcttcgatccattgccaaacagcatccttgccttctttggtcttagctgaaaaggcgataaaatcgtcttcagcttggaagttaagcgtctttttaattaaactttcctgtttgttccacttaccacgcggaattttatcactcttagttgccacgaccagtaatggcatctcatagtaacgcatccactcgtacattgcgacatcgtctttagttggcgcatgacgtgcatcgactagaataacgacacctcgcagtgtctctcggcttgttagatacgtctcaatcatttgtccccacttctcacgttccttcttagataccttagcataaccgtatcccggaacatcgacgaagtataattgatcttcaactttataaaagttcagtgtttgggtcttcccaggttgactagacgtccgcgcatagctattgcggttaatcaacacattaatcagggatgattttccgacgttagagcgccccgctaacccaatttctggaaacccagtagtcgggtactggctcggcgctaccgcgctcatgacaagttcaacgttatgcacttccatcgaattaactccttctgcaatcgtattgcattcattttaccataatttttgcagcgggttgtcatccgcgctcaaattcgatttaaacagcactcaggaccgcgaatgaaaactcatcgcggtcctgagtaatgtctattgatcttctgaacgaaacgttaggaagctttttgatcagctaaaaccagttctggttcagcgtgatcagcaaccgtctcgcgagtaataatcacctttttaacatcttcacgacttggaatatcatacataatgtcccgcatcgtgtcttcaataatcgagcgtagaccccgagcaccagtattacgtgctaaggcttcttgcgcgatggcacgtaaagcgtcatcgttaaagtctaattctgcaccgtctagagcaattaggcgttgatattgcttgacaagcgcattctttggttccgttaagatccggaccaaatcatcttccgttaaacgttctagcgcagtcaagattggaaggcgcccaataaattcaggaattaaaccgaattgtaagaggtcttctggcacaacttgttgcatgagactcttggaatcgtctagaacggcattcttaccatcggtgtccgtaccgaaaccaatcgttttatcgcctaggcgacgtttgacgatgtcttcgattccatcaaaggccccaccaacgatgaataaaatgttggtcgtgtcaatttgaataaactcttgttggggatgcttacgcccgccctgcggtggcacattggcaatcgtaccttccaaaatcttcaagagggcttgttgaaccccttcaccggaaacatcccgtgtaattgagacattttcactcttcttggcgatcttatcgatttcatcaatataaatgatccctttttcggcacgttcaacgtcgtaatccgcattttgcagtaatttcagcaaaatattttcaacgtcttcaccaacatagccggcttcggttaacgtcgtggcatccgcaatagcaaatggcacatccaaaattcgcgctaaactctgagctaagaaagtcttaccagaaccagttggtcccactaagctaatattactcttttgtaattcaggaccatcttcggtctcttcatcattatcagccatggccttaacccgcttgtagtggttataaaccgcaactgatagggtccgcttagcttcattttggccgatcacgtattggtctaactcgtctacaatttcctttggcgttgggatatctgttaattcatgggtttgttcttcgctaaactcttcatcgataatttctttacataaatcgatacattcattacagatataaacgccggggccagccacgatctttttaacttgatcttgtgatttaccacaaaatgagcagttcacagggccgtttgtctcggtattttcaaacattcattctcacctcatcgatgtatttacatggattaatcataacagaaaaactgagaacgtgtttggatactttgacattcgatttgattttagttaaattagatcaaaaacaggagtttttaatccatgaaaagctttgcacaccattatagtagcgacatc

SEQ ID NO: 7 - DNA, 180162 bp, synthetic construct
  source 1..180162: mol_type = other DNA; note = Lactobacillus plantarum PDA6 - Contig 7
ccaaaggaaaataccaaagacaagtggacctgtgattaccacgtttattgtgagcgccatttgattgagaacttcttcaatcagttgaagaactttcgtaggattgcaacgtgttatgataagctcgctcatgtttatctggctacggtctacattgcctcaatttgcatcttacttaagtagttttaagacggaccctaatcctgaatcctagcgcgaagtagggtatgataatagataggttaataaatgatgattaatcaacaaagttagcaatcgtaattaacttggaggacgttgcactatgaaattattaatgattgaagataataaatcggtctctgaaatgatggccatgttttttaagaaggaaaagtgggatgcccattttgcttatgatggcaatgaagctgtcgaaatgttcaatgaagatgtcgatggctgggatatggtgacgctcgacttgaacttgccaggcaaggatggcatgcaagttagtgcggatattcgcaaggcttccccaactgtaccaattattatgttgacggcccgtgattcggaaagtgatcaggtacttggcttagagatgggcgctgatgattatgtcaccaagccgttttcaccgattacactgattgctcggatcaaggcccttcatcgccgagcagatttggctaagaccacgccggctgaccaacctgccagcacggtgagttcctttgatgttcagacggaccattttaaactgaataccaagacgcgggaagcctatttagcagacaaacaaattcaagacttgacccccaaagaatttgatttattgaagaccttagctcaaaagccgcggcaagttttctcacgcgaacaacttttgcaactggtctgggattatgaatattatggtgacgaacgtactgtggatgcacatatcaaaaaattgcgccaaaagattgaaaaagctgggccacaaattattcagacggtttggggggtcggctacaagtttgatgatagtggagttgacgctcaatgaaactgatttatcaacaaatgctagcgttctttgccgtcattattacggtaatcgtcgtcctcggattttcatttattcgaacgactagaacgatgctttatcaaaactcatggcaacaattgcagcagtacgccgcgagtattgaaaaggaagctattcggtataatacgaagactaatcaagttgtcgggtttaatcaacaatttctaaatgatgggaccgtcatcttacgagatcaacatattcacttttcggtatatgatgctaacaaaaagttggtctatccaagtggtatggggacaacaatgagtgggacccctggtggctcgatttatgatcccaagatctcagccaaagattggaagaagctgaagcggaataagattattacgcagtcgccccacgtaacgttcagaacacgcaatcgtgatcaacccgtgaatacaccgtcgttgcgaaccattgacgttttagtgccccttttctataagaatggagcaacgaagaagtttgttggggccatctcgattgggtcgtttgaacagaccttgcaggccaatgaacagcagatcgaaaaaaatctgttcattgcactgttagtctcggggattgcggctctgttgttaagttacattttggcacgttattccgttcgtcgtattaatcgattgcggtacgcgacgcactcggtcgcaaatggtgattttgacattcaagttgacagtaatcataaggatgagattgatgacttggcggatgatttcaacggcatggtcaactccctgcgaacttccaatgaagaaattaagcgacaggaaaagcggcgtcgggagtttatggccgatgcggcccacgaaatgcgaacgccgttgactacgatcaatggtattttggaagggttagcgtacgatgctattccagaagaagacaagggtcattcaattgaactgatgcaaaatgagacgaaacggttgattcgactagtcaatgagaacttggattacgaaaaaattcgaaccggacagattgctttgaacaagaccaattttgatggcgccgaggttttgcataacttagttgaacagctcacaaagaaagcggccgccgcggatgatgaatttaagctgacggttcccgagaaactgccagtatgggccgattatgatcgctttgttcaggtcttgtttaacatcatgcagaatgccattcagttttcacaagctaacgtgatcgaagtaacgggtagccgtacggatcatgcgacggttgtcgcgattcaagaccatgggattgggatgacaccggaccaagtcaaaaatatttgggaacggtattataaggctgacccatcacgaaagaatacgaagtatggtgaatcaggtttagggctagcaatttcacatcaattagtccaacaacatggtggttcgatcaaggttgacagtgtggagaacgaagggacgtgctttaccgttactttcccagatgaaggttttgataaaccgattattgatgattaacgtgatagtttaaagcgggtaaatccgtacggaccgggcttggggatcgtaatgatctcgaggcccggttttgctaatgcggggtaacggtgggccatagcaataacccatcattaatagtaggaacggacgtttaatagtaatcgattgcggaccttaagcctaatacttttcagcgattgacactgttctacctcgcactctgaggctaaatatgttacccttaacaaggctgcaaacagcgatttatcaatagtttagataagatttgaaatgaataggagaaacaacaactatgcaaagagtacaaattacgggaaattcgcaacgtaaagtcaaggacggctatcctttactcgtacaagatgatctcaaggatccgagtatgaaactaaccgatggctcttttgtggcgttaatggcaagttctcaatttatgggctacgcgctgattgcgaagcatcgtcggcaactaggctgggtcttgagcttggatgaaagtgagacgccaacgaccgattactttcgtaagttattcaaacaggcgttggtccggcgagcaacgagcatggatccacagttaccacaacgggtcttcaatgcggatggcgacggtctcggcgggttagcaatcgatcgttatcaagattactatgtctttacatggtacgcacaaggtgtttaccagcaacgcgaaatgatctatgcggcttttgaagcggctactgaacatcaatttaaaggcatctatgcgaaattacgatttaatgtcgaagaagctaacttaaagagtcaactcgtcacgggtgaagcagcaccagagccgttattagtgactgaaggcgcggtgacgtatccattacaccttgctgatgatttaacgaccgggttactattagatatgcgtcccatccgggaatggttggccggagccgaattgcaaggtaagacggtcttgaacttgtttagccaggaaaatggggttacggctgctgctgccgttgcgggtgctgccaagacgatttccattgaaacaagtaagaagggtgccaaagagaccgctgatcaattggcggtcaataatattgaccctgataagcaggaaattcgagcaatcgaagtgaacagctatctagattacgcccagaagcaccgactaagttatgacgttgttgtcgtaacggcaccgacttttgcgcgggtgaaaaagcagaagttccaagttgcaactgatttaactgacttattgacagcgaccttaccagttgttcggcgtgatgggcaattagtgattgcaacgactgcgaataatttttcaatgaagaagtttaaagccgcggtcacggcggcctttgtgggcagtgatcggcacttcacacttagtgagacgttccggttaccagcagacttcgtgacgcgcaaggcttacttggcaagcaactatttgaaggttctggttttgacactcgataagtagtgtgtgcgccataatttaagtggaatagaaaaaaattttaaagggtatttcggggaccgttttcattaattgaaaacggtccctatcgctaagaaaacgaattcatgaaaatataaaaaataattatatttaaccctgaatccctgattgtgactggtaaaacggttacttaactggtaaaataattccttgtcgttaggcaagagagaaaacatagaaatgaggattattagtaatgggaattctaattgcactgattcctgcgattgcgtggggcagtatcggcttaattagtggccgaatgggcggtaccgctcggcaacagacccttgggatgaccatgggagccttggtatttggcttggcactctgggccgtagaacagccaactttaacaagcaaaatttggttgattgggattgtctctgggttattctggagtattggtcaaggtcaacaatttacgtcaatgaaggcggttggtatttcacggactacgccgatttcaactgggatgcaactggttgctaatgcgttggccggtgtgctgttattcaatgaatggcacggaaacatgtattggattggctccgcttctgtaattgtgttgattgccggggctgttttaacttccttaactgataagactgatccgaaccgtagtgcttctgaaaattggggtgttgggattcgtgccttgatcttatcaacgattggatacgctggctatacgattgtggtccattatggtaacgtcaatgcacaggcagttgtaatgcctcaagctgttgggatgttgctgggtgctttgatctggtcctttaaggataagccatgggttgttaaagcaacttatcgtaatatcgtcactggtctggtctggggtattgggaatctcttcatgtttatggcaatggcccaaatcggacaagctgtcgcatactccctttcgcaaatgggaattgttatttcgacgtttgggagtatctacctcttaggagagcacaagacgaagcgagaaatggtttacgtggtgattggctcgatcctggtcattgttggtggggtcgcgttatccttaatgaaggcttagtaaagctttactaaaaaattaattatttgatttacagattaaaaaaatctgttgaaggtgcggtaacggtaagttatcagcaccttttttgttaataattgtatttattttttacacaaatgacgaaaatttacgaaaaaagggaggaagcgcttttcattattaggcgagctattgtataatatgacatgtaaatacgtatagaaagaggtaatagtaaatggcacacatttcatttgacagctctaatttaactaagttcgtccataataacgaacttggcgaaatgcaagctatggtcacagctgctgataaggagctgcgtgaaggaaccggcgccggtaatgatttccgtggctggttaaatttaccaacagattacgataaggaagaatttgcacggattaaaaccgctgcaaagaagattcaagacgattcagacgtcctcgttgtaatcgggattggtggttcatacctcggtgcacgggcagccattgaattcttacacgaaactttctggtcatcactttcacgtgaagaccgtaaattcccacaagttgtctttgctgggaactcaatctcatcttcatacgtcaacgacttaattcacttaatcggcgatcgtgacttctctgttaacatcatttcgaagtcagggactacgacggaaccttcaattgcattccgggtcttcaaggaacgtttaatcgcgaagtatggtgaagaagctgctaagggccggatctatgccacaactgaccgcaagcgcggtgcgttgaagcaagaagctgacgctgaaggctacgaaacctttgttattcctgatgatgttggtggtcgtttcactgttttgacaccagttggtttgttaccaattgcggtatcaggcggcgacatcgattcattaatgaagggtgctgcggatgcccaaaatgaatacaaagatgccgatttatctaagaacgaagcttaccaatacgctgcttaccggaacatcttgtaccggaagggctacaccactgaaattcttgaaaactacgaaccaaacatggcgatgttctcagaatggtggaagcaattaatgggtgaatctgaagggaaagaccaaaaggggatctacccatcatcagctaactttacgactgacttacactcattgggtcaatatatccaagaaggccgtcgtaacttgatggaaacggtcgttaaagttgacaacgctactagtgatgttgacattcctaaggaaaccgaaaaccttgatgggttgaagtatcttgaaggcaagacgatggctcaagttaacaccaaagctttcgaaggggttattatggcccacgttgatggcggtgttcctaacatggtcgttaacattccttcacaggatgcctatacgttaggttacacgatgtacttctttgaagctgcagttgccatttctggttacttgaacgggatcaacccattcaaccaacctggtgttgaagcttacaagaacaacatgttcgccttacttggcaagcctggttacgaagaattaactaagaagttaaccgcacgtcttagtgactaaggtgctagcactttagaaattaagatggaagctcctaaaacaaacaactatcagctggctgataggctgcttgttttgggggctttttgcttgtctttctgacgctgtgttcgtagctgttattgagcgtcgtcgctaatctaaaatttatgaatcacaacgttgttggcgaaatgaatcgctacgtccgcaagatgaccctaatttaacatggtgacgctcgtaatttttgaccgcactggtcgcactaactttgaatgacatcacgcaatgaaaaatctgccgacctatctcgagtttaatcgtgagtggttggcatgtgatttaacagcagacgggttataatagattaggtgttaaaggacaaatatagtcatgcatggtagttgctcgcaacgatgtgtgatgtacgtgaggagtttgagatgcgtaaattaaacattatcgaaagtatcattattgttctcgggttactagtcttttggctggggagtgaagtgacagtaatcaggcaacaattgccatggttgcaatttgcagggctgattgtcgtatttgtgactggtttagcggatgcgatttaccgcgtggtcacgaagcggtccttttttaagtaggaatcctgctgattgaagttggagtcattaggtgtaatttaatacgatgaagcgtccgttactggcagtcagtgtgcctagtaatggacgctttttagttcatgccttgaatgtgtggggtgcttggatttatctctgctgacggttaagtcgtgattgccgtcataaaataagttcgaaatagaaaaaattttattgtaaaaatcagcaaaatgggtgatattttacaaattgtaactaccaagtaggtggtttattaggatttaggatgattataattttaattatgaatgatgaccacaggtattcaataacactttacatcattcaccaaaaatcgcaatgttattaatgaggaaatacattgtggggaatgtagttaataaaatagtggaggtacatatatgagctttttagaattacacgatattcgtaaggcctataccttaaatcaccaagagaatgtcatcttgaagggcattaatctaaacttcgaacggggggagtttatttccattcttggggagtctggtggtggtaagtcaacgttaatgaatattattggtggcttggatcatcattatgatggagatgtcttgttagacggccaatccttgcgttcaatgaatgtgcggcaaatggaccggtatcgtcgggagacaatcgggtttatctttcagaactttaacttggtaagttacctaactgtcttggataacgtcatgctttcattaaagatgactaagacgtcccatgcgcaacaagtccagcaagcacaggacctactcaagcgggtgggacttgagcaacagacgcaccagtatccaaatgaactatccggtggtcaaaagcaacgggtcgccatcgctcgcgcactagccagtgaccccgatattattatcgcagatgagccgaccggggcgttggatagtgaaaatacccaagaagtaatggatattttatactcaatcgctgcggaaggtaaacttgtgatcaccgtgacccattcgcaggaagtggctgactacgggacgcggatcgttcatttggatgacggccagattcatgacgaattagtgatcggggcgcctttcgacgtggtcgataagcaaccgacgcgttaccgaacacttggctttcggcagatgttccggatgtccatgcaacatatgcgtcgaatgtggcttcgttacctgctgattatctttggatcgtcgatcgggatcagtagtatcgtcgtaatgctgggcttgggatcagggattcaaaattatatgaatcaccagattacgtctcaagttaatccaaccgctgtccaagtatcaaagaagacggggaaagtcagcacggctgcgcgtaaaaaagcaaccagtgcagcagcttacaaagcagcggttaaccaagaacaagtcacagccgcgaagaatgccgaagtgacgactgcaaacgtcaaacaattagcggctatcaaacatgttaagtctgctaagctgggctattacacgagcacacaagcgagttataaaaaaacaaccgtgacggccagtctccagacggataaccccacaattttgagtaagacaattaaggacggttcacgtcctgaaaatggtcaagttttgattggtcgtaagttagctaagaagatggtgggtaagaaaaattatcaacaagcgctcaataagaagttgaccgttaaattggcaacggttaatcgcaagaatcagtccgtaacggtcagtcagacgctgaccgtcagcggaattacgggtagcaatgatactagcgtcgtggtcttaccacaaaccgtcaaaaagatgttaactgctaagaatgtggcttatcgaccaaattttgccattgttcaaatagataaattggcgaatgttaagcaagtcgaacaccaaatcaaggcaatcaagggaacgaataagaagcaacagtataactataccggaatcggtgatttaattgattcattgaatacctatattcgtttagccactaacgtattgaccggggtggctggtattgcgttattagtctcagcaattatgatcattgttgtcctgtacgtcagcgtttctgaacggactcgtgaaattggggttttgcgcgcacttggcgcccgcaaacgcgatattagtcatttgttctttgctgaggccttaactatcggggtattagccgccgttatggggttactgtttggagaaggttggcaattcttaggcaatatggccatctatagcttaattaagtatccaatcgttcgaatctccggggcagcaatgctgggcggcattacagtcagtgttgtcatcagtttattggctgctttggcaccggcacatatggcggcacggttggatccagtcgagagtttatcacatgaataaaagcgggggcgtagcaaatgtatttctttattacgagcaaaattgattcgacgccatcagctattgagttagccatgattcagcgtcaaaaattattcacaaagcaccgggtacctgcgttgatcgtgacccgtaactttgtacgcgatttacatcataatatgcaactcattgggtatgatgatgagttccaggtcaatatgtatgattattttcaaggcactacgaattacgaaggcgaaccgttaactgcggccaattatccacgggtgacgggtgaaacgctggaacgggtcagcgctaatgaatttgacgtcattcaacgggaacaacggcaaaaagcactgatgttaaatgcgcaggggaatattgattacgtcgatattctcaatccacagggcgcggtcagccgtcgagactattatgatacgcggggcttcttaacggtggcccagtactttgatgacaagcagaatattgtgttagagcaacactgtaatttacaacaacagcctgtcttagagacgtttttccggccaaatgagaagcaacaaccagttgccactcatcaacggctgttaaactatcacgggcataattacgaatttgaggactgggatcagctgactgcctttttcttagacgcgttaaatactgagtatggcggtcacggaaccatgatcgtggatcgtagtgatgctgggatgaatccgattgttaaaatgtccacagcagcgcgcaagtatgagttcttacacagtaatttcacgctggacccacttgacgttgtgaactcaccaattgtgccgtacactcaaatcgggttagatcacgccagtcaaatggctggtttgatcatgtccacgcaagaagagtgtgatgatatgacgaaccacattcataatgtgattccaactttagcgattccagttggtagtgtaagtgacgaacaattagcagctcgtccggttgactttaaggatcggattgagggcaaggtgattgccgttgctcgcttatcggcagagaaaaatttggaacaattgattaaggcggtcgcctatgttcatgaaaaacagtcgaatgtgaccttagatatttatggttatggtgattcatggactggatttaaagaagaaaatcggttgcgagccttggtcagttcgcaacgttggcagtcatttatcacgtttaagggctttgagcgcgatttgacaccggtctataaccaagcacaactgatggtccttactagccaatatgagggctttaacttaggtattttagaagggttaagtcatggcgttccggtggttgcctatgacattaagtatggtccggcaacgatgattacggatggtgaaaatgggcgattgatcacccccaataatttagttgaattgggcaaggtgattttaacgctcttacaacaccctaaacagttggcgaagatgagtgaacgggcatatggcaacagtagccgtttttctgaggctatgatttggcaacgttggaatgatcatgtcattcagcctgatattcaagcaatgaggggagttacaaccaatggaaacgcatatcacgtcatcggctaaacaaccacatgccaagtatgggacccgtgatttattgagattgatcatgacccatgctcacccgaagaagggactctttgtgattggaatcctgttgtcgtttgtcgcaacgatttgtagtcttggcattacgttgatgttgaaggagtttatcgacgcctttaaccatggtacttcgggtcaactgttgcttcggttaggcgctgtgattgtcgtgcagctatttgcaagtgttgcgtcgagttttctacttagttatacgggggtcgacgccgtttcgacgttgcggagcgcgttatggcaacatatcgtggacttgccgattccatattttgaccataaccggacgggggaactgtctagtcgggtagttaacgatacatcgacgatttttgaattgatttcaagtcagttttcgaatgccattaatgggatcatctcaattgtgggttccttgacgttaatgttgttattaaacttccgcttaacgattattattttaattgtggttccattgatggccgtgatcattgtgccaatgggtcaagtgttagcgcggatctccaaagcgattcaaaaagaaacggccaacttaaatagtgcagcagtacaaatgattggtcaaaatcggttagtgaaagcaatggttgctgaaaaggcactgaaacaacagggaaaagatcaagttgatcggatcaaaggcttcagtgtccgtcaaatcaagctgatctcggtgcttaatccagtgctaaacatcatgttactggccgcaattttcattatcattgtttatggtgggatcttggtacaaacgaacgcgttgacaattggaagtttagtagctttcttaatgtatgctgttcaaatgatttcaccactgagtagcgtaactggcttagtgactgccttgcaacaaacggtcggggcaactgagcgaatcgacaacattttagatagtccggaagaagataagcggttgtcaggcgaaacgctgtcaaaaatcgatacggtcgactttgatcacgtcgattttggctacgaaagtgataaaccggtgcttaaggacattgatttgacaattcatcgcggtgagcggattgccttgattggtgagagtggtagcgggaaaacgaccttagtttcgctcttagaggcttactatacgccaactcgtggtgagctggacgtgaacggcgagacaatggccagttatacgattccctcgattcgtaatcagatcggctacgtgagccaagaagtagacttgatgcccgggacgattcgcgataatctcctgttaggttcgacggaaccggtccctgatgaacaattgagtgcgttgttgacacaagtcggcttagcggactggctagctgaactgtcagctggtcttgatacggacgtcggtgaacggggcttgaatgtttctggtgggcagcggcaacgtttggccatcgtccgggcactcgtccgccacccgtcgttattgattttagacgaagcgacggctagtcttgataatcagaaccaagaacgggtgacccagctcttggcgacgttaccagctgacctgacgactattacgattgtccatcggttaaaccagatcgaagcttatccgcgaattctcttcatggaggatggtcagattacgggtgatggcaatcatgagtccttattagcaacccatgaacgttatcgtgacttttatcggctgcagtatcaacacggttaaaaaaggccttagtgaaatattgtttgattattaaaattagtaagtggttattgctgagtgttggcaatagccacttttttgatccgaaaatatgtatttaaatggataatgatggtcacggcgtgaaataaaaccgccgtaaaaaatataaaaagtattaataattttaataataagtcgaaaaaagcgatatttataattattttttagggaataaatttcccgatggtatggttcataattcggaaaaaaagaggggatgtcgcaccaagtaactacgctgaaatgctgatattatcaggggcttaaacgctttctactggcatagttaactggtgataaatataaataatattgatattggacacaaattttgaccgttaatgaaacgcgtaagttgtccatagtatacacatttactgattgaatatgatactgccctgtatttattcaaatattagtaattttattgacgattgtggggcgaattagttaatatttaaatcgtaaacgaggttacttgtttcacgttcgcattagtaatcaatattagttatttaacagactaaattaaattaatgattattgagctgctaatttgtgaacaatttgtaaattttctaaggaggatattaacatgagtttcttcagtgatttacatctcttaccagggacccacacatcatcacatactagttatgtcagcaaccaaccacttggtactttctatcagtttgtgttgaacgtgattgccgcaatcaaaggttaagcgttgctagagacgggtgttagggaattcaatgattaattagttgaattttctaaccgtttaatcaagtttgtcggaatttaatttgttttccaaactctcaagtcttgccatacaagtggctaggcttggggatttaaccattaactaacttaaaaggaggagttattcatgagtttctttactgatttgcacttcttaccgggaacccacacgtcatcatacacatcaagtgtttcaaatgacatcttcggtggcttccacagcttcatcttaaacttgattcctgcaatcaagagtttgttcagcaaataatcatagttaattttataggaggatttcaacatgagtttctttaacgatttccacgtattaccaggtacgcatacgtcatcatacacatcaagtgtttcaaacgatatcttcggtggtttccacagcttcgtcttgaacttgattgctgcattcaaaaagtaatttagtcaaacaatcataggaggatttacattatgagtttctttaacgatttccacgtattaccaggtacacatacgtcatcatacacatcaagtgtttcaaacgatatctttggtggcttccacagcttcgtcttgaacttgatcgctgcattcaaaaagtaatttagtcaaacaattataggaggatttacattatgagtttctttaacgatttccacgtattaccaggtacgcatacgtcatcatacacatcaagtgtttcaaacgacatcttcggtggtttccatagctttatcttaaacttgattcctgcaatcaagagcttattcagcaagtaatcaaaactaatcttttaggaggatttatattatgagtttctttaacgatttccacgtattgccaggtacgcatacgtcatcatacacatcaagtgtttcaaatgatatctttggtggcttgcacagcttcatcttgaacgttattaaagcgatcaagggataatctatttcgataaactaattaattaatatattaattaatgtcttgatattatttagataatgagggaggatatacattatgagtttcttttcagatttacactttttaccaggtacgcatacttcatcacacaccagctacgttagcaaccaaccacttggtactttctaccaattcgtattgaacgtaattgctgcattcaaaggctaattaattaacaattaaaggggattaatctcatgagttttttcaatgattttcatattttaccaggtacacacacatcatcatatacatcaagtgtttccaacgacatctttggtggattacacagttttatcttaaacgtaattgccgcattcaagggctaattcgttaaatataactgaaatgccaacaaaatcgttatggtgttattaagcacgacacgataagcacgactaagatgatgggctggcaagcgatttgtcgcccatcattttacataaatgcagaaaatcgtgggtgctcggggaggattccatatgtcaaaagataatcaaaaaatgaccggtgattcggtttatcgggtaaaaatgtataaagatggcaagcgttgggtttatgccggcgcaaccacgttagctttggctgcaggtttagtatttgccaacgttaatgcttctgctgatactgctgctagctcagacgcaaccacggaacaagtttctagtgctgccagctcgactgcttcttcagctgctacgtcaacaacgagtgcggctagttcttcagctgcaactgtcagtgcgactacaccagcaagcagtgatgcgacatcgacttcaacggcaactgttgcagcaacggctgctaaggcatcagttgcaacaccagcttctgctgcagcaacggcaaccacaactgctacgaccacggctgcgactacagccccaacagtaacggcaccagcttctgaagctgctaatcaaactgctgctggctcagttgacgctggaacattgacgagtgctactcagtcgggtggtccgggcaacttacaagaccaagcacaatacattcaggaaaatgttgatggcacgaacatcaaagttactgccgggcatacgtacgcagttgccatccggttaaccaagagccaagcgcttgattgggctaatgcttctggtcaagtttcaattgcgccaaatggttccaacagtaatggcacttggactgccgttgaatacgcaactgaatccggtaaggaatacagttacgcagctggtgcttcaactgccactgtggacatcacgaagctaactgatgctgatagttatgtcactgttctctatactttcaaagctaacgacgacgcgacgacgggtagccgggctgcatatttggaatttacagggactacctcagttaataagttatcaactaatactaacaacactgatgccaatcagcagattgaggcttggagctatgcaacccaagtaatggatacttctgttgccgctggtacggtcgttgtccattacgttgatgaaaacggcaataagattgcggatgacacgactgttcaaggcgatgttgacaatacttacaccgttacacctgctactttcagtaattacacgttagatacgactaagtccagtgctttgactggaacagttgccgctgacaccactgattctgatggtaatgtgacggctgctggtactgaattgacgttagtctactcacaaaataccgaagcttcaaacttgactgttaactacgttgatgctgatggcaatacgatcttaccttctaagacttatacagaaggtgctgatggtactgcagctgaagttggcggtgcttacagtgtaaatgccgcttcgattgacggttataccttaacgggtgatgcaacccaaactgggacttttgtttctggtggtaacacggttaccttcacttatacgaaggatgcagccccagttgaacaatcaacggttacggtaaactacgttgatgctgatggtaacacgatcaaggccgctacgacccaaactttggataacggctcaacttatacggttgaaacgccaacgatcgatggttacacttacaagtcagctgatgccgctttgactggtacggttgatggtaataagacgattaccttaacttacaccaaggattcaacgacaccagttgaaaataaagctaacttgacgatcaattatgttgacgctgatggtaacaccatcaaagcatccagcgtaactgaatatatcgttggtcaagcttacacggttggtcaaccagaaattgctggttacacttatgaccatgccactggtgatgccattgccggaacgattgcctacaacggtaacacagttacccttgtttacacgaagaacggtggcactactccaactgaacaaactaagacgatcacagttaactatgttgacgcagatggtaatacgatcaagagtgcgacgaccacaacttacaaagttggggacacttacacggtcgcaacaccttcaatcgatggttacacttacaagtcagctgatggtgctttgagtggtacggtggctgatgacgcgacgatcaccttaacttatgctaagaatgataacggcggctcaacgactgcacctaccaccgcacctggtaccggtgacaatggtaataacggtggtggcacgacgacaaccgcacctacgactgcacctggcactggtgacaacgtcaacggtggcggtactggtacaactacaactgctcctgttacgacgccaagtgacgatactgttgataatggtaatggttcatcaaacaacggttcatcaacgacgacttcaacggcaccagcaaccacggtttctgatgatgaagtaacgccaacgacgacggctactactaacaatgggactagtggggttgttcctgcatcagcctcattgaagccagtagttacgactaagacgacgacttcagacgcaaagacgttaccacaaacggatgaagacgaaaacgggactgccttggctgtcttgggtctttcaaccttattgatgggttcagcgctatactttggcgtttctcgtcggaagcatgaagcataataattagaatagcttgattatttgctgaacggatagaaaggtcagcgatgacctttctactctttgagcaaacaatcaagtttatggaggagttgcattatgaagatgttcaataaaaagcgcagagataagaatgaggattaccgtaatcattctgagcgtgcaacggcgacttcaaccgttgctgctcaaaagccaaaaccaaaggcgactcaaagtagtacgacccccaatgtgcggtcatctgctggtgtccggccaactagtagcagcgtgactgcttcaactagtgccccagttaagggccaaaaccgggtcaaccaacggcgtgctacccaaacagcagccaaaaacagtgtggccattgaacgcgaaatggctgacttaaacaagcaataccaaactttacgtggggagcttaaggtccaattagttcaggatcgtaagcacgaaaagcaacagtatgaaactttagttgccgaacagttaaacttagaacaacagttaaaggacgctaaggttactctgtctaaacaggacaaagtcgttaacacgaacgatagcgaacggcagggaatggtcaagaccatcaatgctgctcaaaaacgttatgatgatgctaagaaagctcttgctaagagcgatcaaaccatcaaatcgttggaaaagaagattacgcagtctgaacaatcattagctgatttgaagcaaaatgaagctgatatgcgtaaagcaattcagggcgaacaggatcttaagaagttattcgtgttgatgaagcaacaggagaagcaagcacaggatctgtatcaaaagagtgacgcaatcaacagtgaactcgtgaaactccagaagcgtgaacagactgaaacccgtgaacgttcgcggaaggaacacgcgattacgagtgcggaaaaagacttacataccgctcaagatgcgttagttgcttatgatcgtaagaagaagagtgctcaagacgaacaagaacgttcactcaacttgattaatcagaaaatcaatcgattacaacatgattatgatcaaaatgccacgattgttaaggggctccaacaaaagattgaaagcattgatgccaagttaaaatcggattacgggacgactcacttagtatcgcccgtcgaatttgaccagtctgcaaagtacttcttgttcagcaccgatctgattcaatcattgtctggtgatgaaaaggcttcgatggaaatgatcatgggcttattgaagagtgaagttaaggataaagctaatgttattacggttaactataatgacagcttgccagaaatttggaacagttaccaatcagctggcttagttgataaacgaactggcttgtacaacatgtactacacgattcaggcaaaggtaccgggtgccgttgcgaagactaaaccagaattacctgataatcctgcatggcaatataagcgcaatgctgataagcagattgtgtcaattgccgatgacggcggtaactcaattatgacattgaagtaccgtaagaatggtgccatttggtacatgacttacttcaatgggtcattagcaactcgtcgggatgtgtacgatgctgccgggttcttgtcagtcactcagtaccttgaccggacgaataactcacaagtgacactagaaaacttctatcgtccagaccactctttagcaatggtcaagcaatatggtagtaaccacgaattatcaattcaattagtgaacaaggaagaagccatcacgaatgtcttccattctgaagcacaattattgaactggtggttggcatcagtcttacaacaacaaaacagtgtgttggttatgggagttaacgccccattgttcgaccaatgcttacaagcaacgaatgataatttccatctcttaccaatcgtctctgctgatgatttggataatcaacacgtccaagatattatcaacggaaagagtaagttgtcgagcttagttgtaacggatcgtgatgttcagactgcgattgagaaacaaatgacacgtgatcttgaaatcaccgttatgccagctgcagaagtccgtgcgtaatcacggggttgttgatgatgccttgaacgtgacgcatgaatggggttttaaataatgatgaagactaatactaagaaggccaagtacgacgatgcggaattgttcgaaaaagtcttagtgggcatgtcatggcttgaaagccatcttcgcgagattattcaaacgatggtgactgatgcggacgtgtcgttcgaacagttcttgattctctactatcttgaccatagcactgatcaccggattacggtgaaagagctagccgctgactgccacgtctcttcttcagcgatttcaaggaaactgacctacttgatcaacaatgacttgattgtgttgaacatcgatccttatgatcgtcggtaccgttatctaacgttaaccgccaaaggtgagaagttagcacgggtcattgaaaaagttaacgaagaacgccttggcaagttcctcgacgaatttggccggattcgaacctctgaattaactgatgagcttcggatggtcagcaaagttttagtggataccaaggaaattaaaggctagtaaaaaagagtcattcaacttgtataagctgaatgactctttttagtgttaaatattgatcgctaatgagaacaagataaaaccaccaagtaacatggcaagaatcaccacgaccacccacagcacttgacggacgttgtgccgcacgcgtcgctcaacatggctctttgattggagatgctcatgttgggcattaaatagcgaagcattcgtgtctttgacccaatcagcaccatgctgaccatagtaggggttggtgttatgattgagcgagtggggaacccggccatttgatttggttaacggttgatagcgccgcatcgtaatcctcttttcaacggttgtttagtttttctgggccttataaggaacggcatagttcttaggggcgtcgctagcttttgcatacttccagtgcccagacatcttcttttcgagtggggcatcatctttgatgcaagtaaagcgagagccaacttcattttcgataatgaagatccggttaaactcgtgccgcgtctgaacaatgtgacaatcattgtgatcgataccaaaaacatctttgtataccaacaacattatctcctttggattgaatttaaaatagtgacaattttacaaggcttcacagacagtctacactatctattataaacccctaatcaagtccgtaaaccgttttgagtgaaaaaagataaaattgcactggcaagggtgtgacaattcataaaaagccacgcaggtaaatttgatcttacctgcgtggctttatccgtacttctgattgggtatactgggaacgacccccgtattatcataaatgcttgtatatcagctattacaaggtgttcaggccattaaaaaaattagttggctgtccttttggctgactacctttaaattaaccctatttcctgctagaactggaaatgttttttttaacgtggtccacgtggtccggtggtccaaacgctgatatatcaacgctttaaagacctcttgacgtggtccatatggtggtccaacgtggtccacctgctaaaatgtgtcaaatttagcagtctaaatattaaaaattaaggtaattagccagtttttcggtggcttcatttttttgcttggcagtaactgcggtgtaaatatctaaagtcgtgcgatagcttgaatgccctagctggtcttgtactgacttgatggaagcatgggcttcaaatgcaagtgtcgcataagtgtggcggaatgcgtgaaccgtgacatgcttcaagtcatatttagttagagtatgttcaagccatttacgtggcttagatggttgaaacatttcgttattttcattggcaaacacatagtggctaccctgattaatgttgaatccgaaacgcagtagccattctttttgatcaacttgccagcgttgcaatattttgaccgtattggaatctaaatacaccgtccgattgctacgcgctgtcttaggcgcttgtactagcagacgggcaccatcaccacgggattgtgttttattaacccgtatagtgtgattgctaaaatcaatgtcagaccattctaagcaaagcatttcagattttctcataccagtaaaggccgctaaacgaaagaatacactggcttgcggtgtattgtcatcatcattcaggcactcaaagaagtgttgtaattcagccttgtcaaagtaattttctaaatttttgcgtgaacgatcgtttttattcactggtacaataacacgcttagccggattttcattgattaagtcaatgttgatggcgtaatcaagcaccttggcaacgtagttcattagcgtgtggtacttggccaagccagcattaaaccactggttaatggctttttgacaatccttaatggatattttagcaatccggtaatcactaaatattggtaaaatatgaagccggaacagccgttgagtcgttacccaagtgctttccttaactgtttgtttatattgtgtgaaccacagctggtaaatatctttaaaaattgtattatcgtttttagttggtagcccatgattgtaaatatcaagttcaagtcttgataatacaatctgggcttctttttttgtcttgaatccacggcgtcgggtatttttcttttttcccgttagtggatcaacacctaaataaacttgaaactgataacgggtattcccgtccttgtcctgatacttcttgattgttgccatttataatttcctccataacgtaccgtgcgggggcagtgttatgtagaactgattatatttatggtatcaattacttagacgaatctatttttttaaaaaagtctagtgaaacagcgttttcctcttcaaactcaaaattcttatctttggctagtttcaatagggaatggatagcattttcccggatctttttaaattctgggactacttgtgccatattgtctttttgcttttgggtcaagttcaaattatcatcaacgagttttcctcctgcatgatcaagttctaaatacaagtatgttaacattccagaaacactaaaatcataagtctctactcttaatagtacatattcagatacaacatatattgcttgattaactttgtcattgagtgatttataatcagactcattactaaaaatataatctataagcgggttgttatcaatacagtcttctaggtactcatttattttttcataagaatatccccccttgtcttctgatatgccaatattcaagttttggctcttcatttttgaaatggcgccatcttttataagagaatgaacatctttagttccatttaaatagagaggtggcactttaaaaatttctgatagcgttactaacacactttttttaggatttctttcgccacgttcatatttgcttaataaatctggagatattcttaaatctgatagtttaaataacatttctgagagttcagccaaggttaggctattttccttgcgtagttttctaagcctgtttttcatatgttatcacctctaaaagaagtataagccattaacaagattgaaacaagacaaaaagtatttttaactattgacaagacaaaatgtataatatatgatgaactcgttggtaagacaaaaagtattgttaaaggagacgaaatagaatgaagaaagaattgccacgttatatgacatataagcaagctatggactgcttaaatatcaagtcatacaacacgctttacaaatatattaagcagggtttacgagtagttgcaatcaacggtacaaaacgtattgaccaactagacgctgataagttcatggaagcacataaaatttaattgtaccgtgcgggggcagaataaatttaagggaggtgattttatgatagcaacagcaatcttatgggcaatcaagtttatgattgtgtcgtttgttggcaacgtggtggttaagttaatcaagaacccgcgtcgttattttggaatgtgaggtcagtcgcatgggaaagcatacaaaaaagacctactttactttggcgagtagtaggtctaagagataatcaaaaatatgctttcccttattttaacacgaataaggagaatggaaaatgacaaatagtgaattagtggaacaatctgaaaaattagaaacggcgtgggaatcattgaaagtaagtattgataatttatcaatggcaatgactgttacgaaatatgatagtgattggtgtgactatttctttaagagccagcaatcaagcaaccttgaaaataatctattgaatattgctagtgtgatgttagaagttagcaatgccatttgtcccgaagattaggcggtgttgaaaaatgaaagagttcgcaacgcttgataaagccattgagctggcccaacaaggctatgcggtttacccactgattaagaatacgaaaaagccacctaaaggggtggccggctaccaagccgcaactagtgaccagaacaccatcttagcatggttcgaaaagcacccaacttacaacttaggcttgcggctagatttatcggatttattagttgttgacattgatatgcacgagccaactaaaaatggtcggactagcttggtacaactatttaagcaagggctgacattgccgaaagatacttacattgaacggacggctaacggcggcgtccattacttttttaaatacgtgggtgctaaggttcgcaaaattgacgtttggcccggaattgacttgctaagtgacttcacggtgattgcaccaagtgagattaacggcaaagtgtatgaacccttaggtggccgaacgttggctgatattaagccggctcctcaatggctagttgataagttgacggggcaaaaagtgaactggccgtcagaacgcgcctatgccacacgccaaaagaagtataccggtcgcttgttagatgaaatggtaactgggacaacccaaggtaatcgcaatgcttggttaactaaaattgccggtcgtatgtttggcgtcggtgctgatcccaagacagtctataacatgctgtcagtgatcaatgattcgttcgttgatccggcactaccaagcaaggaagttaatgtgatttttcaatccattttaaaacgagagagtaagggggttcattaatgggcaaagcaatggatttaccagcagagacccgagaagcggccaataatgttatcaaaatgcaacgtgacgctgattggcagaatgatttcaaaaaaaattcggacgatgggatcaaaacacagtctctttacaatatccgtttaattatggaacatgacgaaatgttgaaaggactagttgtctttgacgagttctcggaacaaattgtcaaaacaccacaagcagacaactcactgttcaaaaaaggtttttggaatgatagtgatgacacgttattgagaagttatattgaagatcattacaacttgttattcagcaaggaaaacattaccgacgcggtagttacagaagcacgccgcaagacaatcaatccggttaaggctcgtattgaagcggtagaatgggacggccagccacgtgctgaacgttatttcattgattacttaggtgccgaagataatcactacacccgcaccatcactaagaaatggctaactggtcttattgcccgggcctatgttcccggagttaagtttgaaattgtccctatcttagagggaagccaaggacttggcaagagtacggctggtaagaatctatacccagataaattcaatgattcgttgaaaggaatggggaagcagaaagacgattatcaacagttacaaggtagttggattattgaagttgccgagctttccgccatgaaaaaaacggacgttgagggaattaaaaattttattagtgcacaatccgacacatatcggaatagttacggccgctatgcgttgccacacccgcgtaaatgcgtatttattggcacgactaaccaaaccgactatttaaaggacgcgaccggtgaacggcgcttctatccaattaaatgtggggtcaacaaggccaaattagatgtatggcacccggacgagaattatatacttcaagtattggcggaggccgtgtactggtttaggaatggcgaaccgctatatctggatcaggccaccgtgaaagaggctaaggcgtatcagatggctgcggaagctgtcgaccctatgcgagatgccatcgaagcgtttttagcaatggaagttcccacagattggggaaaaatgagtaccagcttaaaacaaagctatgtcagtgactacggtcagcaatctaagtggctacaagatcaagttagcaatgaacggaaactgctcaatcaaacaacaactcgggaaattatggaagttgtcttccataaaacagttgatcgttatttaaccgggcgaacgaactcggaagctaagcgaattaagttgttaatggacaatatggacggttggaaaagtcaacgaatgagaatgaatggtcaacgtctacatgggtatatgcgcgaagtttaatcagaaatttaccaagtggaccacgttggaccaccatatggaccacgtcagggggtcttttaagtgctgatatatcagcgtttggaccaccggaccacgtggaccacgttaaaaaaaacatttccagttctaggaggaaacacgtatgaaatggcaagaaattcaattattgagagacacaaaatatagcagttcagaaaacctcaaaaaatttgaagacgtatttaagtttgataaatgtgccgtgtatgaacgcccacatagtcttgaaaaactgttagctggtgagcgttcatacaatgcgggtaataagtatgacacaccaccttaccttggggaatggttagatcatgccgaattgcaaaaggtaagtggaactacacgaattgttgcaattgctcatgattatgggccggccgatagcgttcatagcaaaatagcggagcacgtcttgtcgcttgatttagtgggcgtgatatttgatagcaaagtagattggtattatcccggccagtcttcactagtaatgattatgagcaaggaaacatataactactattactatgacctgttagcaagtcattatgttgttgatgtagttaagaagcaatattttagagaataaaaggagcttaaataatgaaaattaagatggtacatgctgacaatatggaggagttatttgcacaagtttcggaagtcgacaaagcacaagatattgatgacgaactgttagatgtagaatttgattttattaaggtgagcgattcaaaagtgatttattgcgaagcattggtttataggactggtgatgaagatgaagaactataatctaagccgcctaaatgagcgggtacagtttggcaccgtcaagtctgttcagaacccaataaacggcacaaccaaacagcaatttgtgccactgttcactgtctggtgtggtgagtatacgttgaccatcagtaacactattagtcttactggtacgactgcgacaactaaccagctaattgcagtgcgccatgacgaccggatcacgacaactttggaagcaatattagatggggtgacgtataaggttgctggtgttagttctgatagtgatatgaatgcttatgacgtggtcacactaaccaaggtcaacggtcatggctaagccaatgaagcaatgcgagcacccgggttgtcggacgttggttgcctatgacacacgctactgcgagaagcaccgcaaggcgactaacaagtggcggtatcataaacgcatgtacgattcagacgagagtaagtaccaacagttctacaagtcttcagcatggcgcaagttgtcacggcggtttcttgaaagcaatccggtatgcgttcaatgttatcaagatggggtgatccgtaaagccgatgtggtcgaccacgttattgaaatcaaagacgactggtcacgtcgcttagatgaaagtaacctacaaccattgtgttaccgacatcataaccggaagaccagactggctagagaacaacgggaacaaccaactaaataaccaatgagtgtcgtgctgaaaggtgcggcgctttttagttgagcggagttttccgctgagtgaaccagactggctaagtttaacttaggcaatagatctgcgcaatactgcgctgaactttcagccgagctactgagtcgaaattttcgaccgagttaaccaacccgcattttgcgtctaagttgcccaacttggcaattgactgcgacgagttttcggctgagttggacagcaaagatgtttcctcacaagtgcggaatactgccctgaattttcgggtgagttagtgagtagaaattttcgacttgcaattcaagttggcggcttaattttcggccacgagactaattcaaaacggcatgacagcccagaaacgttgatatggggggctatggccgacccgagaggagcgacagacggacttttgggtttataaaagtcccttttgaactttgattttttgctgattttgctggattgtgaaatatccctactaataatgcgaaatttgaacaaataaacagtcagggggtgatgtgtaaatataaacatgttattaattgcactttctcggaatatgtgcgataatataggtataataaacgaattctggatatatgtatcaatcagccgctatgggtctaacccgtgggggctttttggtacgtaaatttaaacgaaaggagtgctccgaatgagccaaaaagtaaaagccttagccagtatgaagaaacatttaaccaatgatgagcgtgatcaacgtaaagacgctgaaagggccttgtttgattatccggtgcttgatttaaccccgccagattggttacatgatcgggccttaactgaatggcaacgggtagcgccttatttaaaggccaataccccaattagtgaacttgaccgggccatgttagccagttattgccgcgcttatgcaacggtacagacttgtgagaatgatattcgtaagaacggactggtacaaactaatcaagatactggtgtacgtaagccgaacccttacgtggccttgcagtcacaagcgatgaaagatttaaaagccttagccaatgatttaggcatgtcgctatcgagccgggcccgcatggaattaaacaagcagaaagatgagacacccgaagatactttcgaggcgatgttgtcatgattgaatatgttgaccaagttttatcgggccaagtgttggctggtcaaaagattaaatgggcgtgcgagcgatttaaacgcgatttaagccgttctaaagaagacagcttcccgttctactatgacgaagacaaagcggcacaggcggttaaatttatcgaattaatgcctaagactgacggtagcaaactcaccatgcaaccctttcaaaaatggattatcagtgagctgtatggctggcgtgaaaaagcaaccggtaatcggcgctatgatcgagcattcattagtatggctcggaagaacggtaaaacctatctggcttctggtatggccgctaatgggcttttaagagaacgtcagcccgcccgtaaccgacaggtattattcgtcagcaacgcccttaaacaagctaaattaggctacgacatgctatcaagtgggctacgacaagtccgtaagcaatcaaagtacatgcggcaacggattaaggtacagaaacaagccattaccgacctagaaactgattcgcaagccctagcccttgccagtgataccagtacgcttgatggttatgccgggactaccgttattttagatgaatggcacgaagctaaagaccgcaaggtgtacaacgttttaaagtctggtcaggcgcaagaggataattccctgctggcggtgatttccacctcgggtcttaaccttaacgttccaatgcacgccgaatatgacatgctgacggacgttttaaagggcaaaaccgaagctgaccgttattttgtggcaatctgggaactggacgaccgcgaagaagtttacgatcaagctaattggatcaaggcgaacccgttattcagtgaaccacacgttaagcaacgcatgacggagaaaattcaggccgatgttgaccttgcaattaagcaaaataaccttattccggtactggttaagaacttcaatatgtggttgcaagccagcgaggacagttatatttcagcagacgattgggccgctggtaaattggccaaggtgcccgacttacataatcgtgacgcctatattggcattgatttatcaaaaagtaatgacttgaccgcggttagttggctcgttccaattggcaacggtcagttttattgtgatagtcattcgtttgttggcacgaagtacggactggattctaagattaaacgtgatgggattgattaccggtcaatggagcgcgctggtgagtgtagtattactcgccttgatagcggtgtgattgattatgatgagctattcgactacgtgcaaaatctggtcggtcaatataactggaaagtaaaagccatcgcgtatgacccatacaatgcgcagaccttgattactaagtttgaaaaactcaattatccattatttgaagtgcgacaaggcaccaagactttgaatattcccacccgtaactttcgtgaccagctttacgatggcaagattaaacataacggtaacaagattctcgcttatgcggtcaataacgccatcttgaaagtgataaacaatggctggcaactggataaggcacgcaatagcaaccggattgacccggtagcagccttaattaattcttacgttgccggtatggactattaccaagaaagtgaggatcaacagcatgcagaagattactacaaaacagcgactgcggcagatctgttctgattatgtacaaacgatcttgttggtgcttggcttaatctgcttagtgattggttttggttgctggatcagctggcaagcgggattaatattggctggtatagccatgattatgctggccttgctaattaattatgaaaagcaaagaggtgattaaatgagtttcttcgtaaaaagcagtaccaccagcggcacgcatgatccggtagccgacgccttggttagtttatcaagcaatgacccgtatacgtttgtgagtgcggcggtgttgcgtaatagtgacatttacgcggcaattaacattattgcgagcgatattgccagcaatccaattatgtgtgatacggcaatctttaacacgatgattaatcagacccccaatagtcagatggacgggtaccattttaaatatgcgttggcggctaacttgttactcaatggcaatagttttgctgagattttgcctaatcacacacttaaatttgtgcaaaataaccaaatgacagttgaacaagatgacgtcagtggggcgttgacctacacctataccccaattggcggtaacagtcgtcagatcgcgcctaacaacattttacattttaaatatttcaccaaagacggcgtatcgggaattagtccgttatatgccctcaaagatgagcgccagattcagtcggccggcaataaattgctaaccggcttttttactgctggtgtgcatggcaccacgattattaaagtccatcaatctgatttagggccggaagccaagggcaatattcgcaaccagtttgatgaagccaatacaggtgataatgcggttaatacgattgtgaccgatgacacgatggatattagtaacctatcattaaataccgatgtattaaaactggtcaactcgaatgactggacgacccgacaaattgctaaagcctttggcttaccccccgagcgcttaggggttgagaacgatcactctaaccaagaacaaagcggcgtgcagtatcttcaaggcacgttgcaacattactttgatagctttaccagcgagctgtcgttcaagtttggtcatgactttacgtttaatacggacaagctattgagccttgatccgcaaacgcaacaagcccaagcggtggctggtttcactggcggcgttatgagccgtaacgaagctcgggccaagattggcttgccaccaactgacgatggcaatattttcttaaacttacaaaagaatggagtgactaattcatgaaacaagaccgacggttaacgattaacgcggaattacgggcacaacagccacaggctgaaaaccctgaaacaccgccaacagacgaacaacaaccagataaccagcaacaacctgataagcaagaccaacaaggcaaaacaattagtggttatgcaattgtatggaactcaccaagcaaagatttaggcggtttcaccgagattgtaacccccaaggcccttgatggtgtcgatttatcaaacgtgcttatgcttaataaccacgactatacccaagtgttagccagtgccaaggcgggcacgttaacgctagaaacggacgataaggggctacatttcattgcgcaactaccaaatacgtcttttgctaatgatgtatacgaagaagttcaaagtgggaacgttgattcctgttcatttggatttgatagtgacgacaacaccgatgaatgggctaaagatgatgatggcaatatcacccgaaccattaatcaagttaagagcttgttcgatgtttcagtggttgctgttcccgcttatgacgataccaatgttcaagttgatacccgtagctatgaaaaatttattaaccaagaaaaggagcctgataacatggcaaaacaaacaattattgatcccaataacaacgacaatggcaacgaaaacaaaactggtattcccgcctttgaacaatatgtccggacgcacggggaaactcgggacggtttaaagacggacggtgccagtgccgttattcctaaggaactgattacccctgttttccaattaaagcaatctaagtacaaccttgcccaatatgcaacggttaagcaagtttctagcggttccgggacttatccaattgccactagtcaacaatctgcggtgctggctactaagaacgaactagcggacattgccgacgttgacgcaaacatgtttacggaagtgccgtttgatgtgaagacccgggcgggtaaaattgccttatctaacgaagtagtggaagacgccgaagttgatattgtcagtgaagtcaaaacgcaattacaacaattggttgataacacggacaacacgcagatcatgggactgttaacgggtagtagctttgctaaagcaacggccaccagtattgatgatcttaaaaagattttcaacgtgacgttagatcccgccttgagcaagatgtggctagtgaaccaatccgggtttaattaccttgatacactcaaggacaccgagggccgttacttattacagcctaatccaacagcacccagtggtttcaccttattaggggcaccagtcgtcatgatcagtgataaattactggctaacaacgcggacgggacgttcccaatgattgcgggggacttatcacaagcggtggctgttttccggcgtaaccaagtaactgcccaatgggacaagttcgaccagttcagccaaggtctttccgtaattgtgcggaatgattatgaagtgattgataaaaccgctgtaatcaacgtggcgttaggaactgcgactgctggtaaataggaagacaaaatgagtgggatttcaagcaacaagtgatagtatgatgataacgcttatcagattttaatagagcgtgcagctataattttaggagtgattccatgaagaacacatttatccttgcatacagtggtattatcatcacgtatgtattcgccgcatatgttgcttttaaagtgtttgaggtaatctattatgctatgacttggtaataaaaaggccgtgacttcaaggtcacggccttttatgataaatatgtgttttggaaactgctcgggctgggatcgaaccagcgacctcttgattaacagtcaattattctaccgctgaactaccgagcaatgagtactctatacttataccatataattttatgagagtaaagttaaacttatgaggaagtgattagttgtcagtgactgtagacgacattaaactaagcctgcgaatcgatgtaaccgaagatgatccaatgattcaaagctatttagacgccgctaaggactacgtgcagacggccgttagcaagaatgaagatctgactgtctataaacagtacgattttgcggtgtccttgctgacacaattctggtatcaaaacagagtaactgatatgacaaagacaccgtatcaagttgtcagtatgattcaacaactgcgtggaaaaattgaagcttaggattgacatatgaaatgattggtactaaaattaatgttgtaatttgtcctaatattactttcccgtaataacggcgattatcatatcctatagtgagaggctcttcccccgagcctcttttttatacatatatctgggatcagaaagtgtgattccgatgcgtcaagatgttaagaaaattcgtaatttattaaagcaatatgccaaactaaaacgtgatttgacggcttttaatcaagtttccagcccctcattcgatggagtgtcaagccatagcagccgaaacggcgctgaaagccgcctgataaaccatgttgacctgtcttaccagctaaaagaagtcgaagacgccctaaatgcaattgatgatccacaatatcaatttattttacatgattacgttattgagaagcatttcacccgcaatgaagcttgtaaccaattatcggttagtgttagcaagtttaattatatgaagaatgaagcattacacgcttttgcaaaattttacagtgatctaacggtttgaatgctactatagccaaacttcaacaattttactgtataattaataatgtgcagttaaatatttactggagtgtccttgtaaatgagttatttcattaaaaaatggttgttcgaagttactgtaaatattacattgttgattgttccggcatatttgataacatgtagcatattacaatatggccgcatggctttcagcttgtctatgccggtgactgtttatgggctaaatttattagcgtttaactttatgattctgtcagtatttgactttattcagtggccgtttgattatcatgaacctaaaactataagaaaggttatttttgtgatacacattactattgcagtcattgccttgataataagcgttagactaatggcctaacgaaaaaaactgctaaccaaagttggctaacagtcactgccccgcgcaagtattaagtcactggaaacagtggcttttttgttatatttttggctgtccttttggctgacttttagtgaaaagagatgacaattaatgataaactaaagtaataaaaaagctgcaatcacggtgtttttgacaaccaatgataacagctgataacgaatattgggtatactgggctcgaaccagtaaattacggattcagagtccgctgccttaccaatttggcgaatacccaataacaactatttaatagtaacttttccagcaaatactgtcaaggctttgctgaaactttgtgtctattttttgcatttttgcttgaatatcgtatcagttggtggctaaactagttaaatggaaggtgagtgtatgtcgaagtcagaattagatcatttattcgatcatctgcgacaacaattgatcgtatgggcggtcacggccatcggattagcagttatgcgcagctttttgttaccgcaattattgactttcgttttttggtgtagtgtggtctactgtttgctcttatttgttggtttagttgttgtgacgatttttaggtggcaaaaatcttaattatatttgacaagccgcttatcattcggtaagataataaatgaatttgtgcccgctggtcaaattggttaagacgtcgccctctcaaggcggagttacgggttcgatccccgtgcgggtgataagtcgacgtcggtagataaaaagagaagcgtcataatgctggtatatcagcattatgacgcttctcttttgctaattggtatcaaattaaaaccccaattttgcgttttggctgttgtgatcacaacagcactgttaagcgctcataaaaaagggttttgggatcgtgtcacaagtaagggtcctatgaattaattattactcgttaatagtgtctgaaaggccgttagcgacattccaggtacgacccgttgtcgagtgagattgtatgggttctgtgtgctggtggcgatgccaggtgccgttgatagggcatactgatagccagcctgtttatcggctttaatggtctgctgattagcacggccggctgggtaacaaataacttgtgtgttctgttgtaaattatgatcgagccattttttggaacttgataattccgtaagttgaacctggtaagttaaattatttaaatccagatggcgaacggtgtgactttgaaaatcaatattaccggatgcttgcatccgcttagcatcagctaaagttaagtggtttttcttatgggtaaagccggtaataaaattaatggtggcgtgttggtgcgtctgtttcaaaattggccaagctgctgtcatgttatctttatagctatcgtcgagtgtgatccagacaatcttcttttgtggaattcgccgatgtttgagcgcgtatacggcttcattggcagtcagcgttcggtagccgtgtgcctttagataagtcatttcagtttgaaattctttggcggggacacgtaactggttcccgctagaaatactgtgatacatcaaaataggcaagtgaacatctttgacggtatgccaatgttgataaggccgtgcttgtgcttggtgtttagccgagctgtgaacgcttttagcgctagtcttagatgattgactgctggcttttgtttagttgccggtgaagccgcctgacagcctgctaacaggccgagcgcgacgccgagacctaatacaaagttgataccccgcatgtgcatgataaatccccccatgatttaaaaactacttcctattctaatagaatagcatgtaaagcgcgataattattgaagtattgttaaaataatttccttaatgtttaaggaaactcgaatttgattagtaatcgtttaaactgattaagaaagcctagttagggtagccagaggaactttactccgatacgattaataaaataattaattcgggggatagtgtttatgaataaaaaatgggctgtttggttggtggcgattattatgatgattagtgtaggtacattgttaattgtaccgacgatgacgaagaatcaggggagtgagctggcaatggcggtggataacttaaacccatttgttaaggtacaaacggtctatggtcggactaatcaggcaatcggccactcgactggtcagatgggcgaagatatctatacctaccgaatgctgaccagcgatgcgcaaggtaagcaacgctggttgacatttaccgcagatcaccggctaaagcaacgacactatttaaagattgagacgaagggacaaaacgtgaattcatgggaggccgttgtgacaaatcaggtacctcaaaatatacaagaagtattggcttaaatttaggcatagtgccgtgtcagcgattagtgacgcagcactttttttgtgttattacgaaggcgagcttaataaattcttaaattcttttgagtgctaaactgcgatgagcgcgttacaatattttacgtgagacttgtaaagatggttgacaaaaggaccatttttagttagattaagatactgcattattatgtaataatgaatgaatgaaggggagcgtgcaaatgcttaaaatagcaaagggtcggatttcgtatcccgcggtaatcggtgcggtcttatttatgatcgtgcaagtgattgcgaccttaaatctgcctagtttgacatctaatattgtgaataacggggtggctactggtgacattagttatatctggaaaatcggatttgaaatgattggtttttcattgttatcagtcgtcgcagcgtttggcaacgtctttttggcggcgcggtcatcacaacaattagggaagaatttacggtcggatatttataaaaaggtcatcaatttttcaaatgatgaatttgataaagttgagacgtcttcactaatcactcgaacgaccaatgacgtcgtccagattcaaaacgtggccatgatggcgttacgaatgatgattatggcaccaatcatgctgattggtgcaagctttttagcgtataccaagagtcatgaattaacttggatcttcgtggtttctattccggtactattgatttttattggtttgatcatggcatttgcaataccgttgtttcgggcgatgcaaactaagactgaccgcatcaaccttgtttttcgtgaaggcttaacgggagtacgcgttattcgggcattccgtcaagataaatttgaacaggaccgttttgaagacgctaaccaagattacacgcacaatgcgattaaggttaatacgattgtggccttggcttacccggtaatgactttgattatgagtgggactaatgtggcaattgtctggtttggtggccaattgattagtagtcaaacaatgcaagttgggaatatgattgcgtttatgacttatgccatgcaagtattgatgagtttcatgatgcttgccatggtatttgcgttcattccacgggcggccgcttccgcttcccggattcaagaagtcttaagtattgaacctaaaattactgaccctgacaaggcagcaacgttaccagcgacgactgaacacagcttagaatttgatcatgtcaactatcgatatcaaagtgcggagcaattagcgctggcagatattgactttaaagcccattctggacagaccgttgccattattggtgggaccggttctgggaagaccacgctcgttaatttaatcccccgattctatgatattgagagtggggcggtcaaattagatgggaaagatgttcggcagttgaagttagctgatttacaccaagccgtttcgtttgttccgcaaactgctactttattcacggggacgattcgtgaaaatatgcaattcggtaacgaacacgcgaccgatgatgaaatctggcatgcgttagaaattgctcgttcaactgacttcgttaaagaagaaggcggcctggatgcacacgttgaacaaggtgggggtaacttctctggtggtcaacggcaacgattagcaattgctcgtgcacttgtcaaacaggcttccgcttatgtatttgatgattctttctccgcattggacttcaagactgatgctcaattacgggctgaattacgccaggataaacagattcaacagagtgtcgtagtcatcgtggcgcaacggattgcgacggtggcggatgctgatctgatcttggtcctagataacggtaagttagtcggcaaggggacccacgctgaattgaaagctaataatgaagtttatcaagaaattatgaagtcacaattacgagaggaggatcagctgtaatgagcgaaaagaatacgagttctactaagcctgcacgtcctgctggcggtcatggccccggtggtcatgctggactagttgaaaagcctaagagtttttggaaaacggcgattcgattgatgcgctacatgtcagaccggtgggtcggtttggcagtggtcatgatttttgccattgcttccgtgattttccagattcgaacacctaagattttaggtaaagcaacgaccgaactttataagggaattatgaagggggccgcgcaacagaaggctggtatcagtcaatccggttacccaatcaactttgaaaaaatcggtcagattattatgatcgttttgatcatgtacttggcctcagcactgttcaactttattcaacagtacattatgacgcggatttcccaacggaccgtgtataagttgcggcgttcatttaagggtaagatgcaaaaggtgccgatttcatattatgatacccattcgaatggggacattatgagtcgggccgtcaatgatatggataatattgccaacacgttgcagcaaaacctaacccaagcggtgacaagtaccgtcacctttgttggaaccttatggatgatgctgacgattagttggaagctgaccttggttgcactcgttaccattccactgagtgtcgtggtggttggtgtgattgcgccgaaatcacagaaattcttcggaacacagcaaaagagcttggggttgttgaataaccaagttgaagaaaactatgctggacacgtggtcatcaagagctttaacaaggaacaagatgccatcgatgattttgaaatccaaaacaataattattatcaatcagcctggaaagcgcaatttatttcaggtattatcatgccactgatgatgttcttaaataatattggctacgtctttgttgccatcattggtgggattgatgtggctaacgggaacgtttcgttaggtaacattcaagcgttcttacaatacacgcaacaattttcacaaccgatttcacaaatggcgaacttgttgaacacgattcaatcgaccgtggcttccgctgaacgggtctttgaagtgcttgatgaagaagaaatgaaacagacgaaatccaacttaccagccgaaccagatagtgataacttgattagtctgcaacacgttcaatttggttatgcggataacgacctgttaatgaaggattataatctggacgttaaacgtgggcaacaagtggccatcgttgggccaactggtgctggtaagacgaccatcattaatttgttggaacgtttttatgacatcaaaggtggttctattaaattgaaagggaccgatacacgggacctggatcgtgaagacttgcggtcacactttgcgatggtgcttcaagatacctggctctttactgggacgatttttgacaacttgaagtacggccgtgaagatgcgtcagatgaagagatttatgctgcggctaaagcggcccatgttgatagctttgttcgcaaattgccagatggttatcagacggttctgaacgaagaagcttcaaatatttcacagggacaacgccaattattgacgattgcccgggcgtttgtggctaatccagaaattctgattttggatgaagcaacgagttcggttgatacgcggactgaagtgcatattcagcatgccatggaacgactcctgaagaaccggaccagttttgtggttgcgcaccggttatcaacgattcagggtgcggacaacattattgtgatgaaccatgggtcagtggttgaaactgggacgcatgaacagttgatggctcaaaatgggttctatgcggatctatataacagtcaatttactggcaatattagtctcgactaaaggaggggtgtcaattgttccggaaaacagcaatggttgccgttactgcgggtgcgctaacgttcttattagcgggctgtggtaagacaaccttatcaacgactaaaaccacatacaagccgaacgggttagtagcggccgtcaaaggaaaatccaacgttaaaaaggttcattatcagcttgacggtggtcagacgaagacggcgacggtgcgtaatcatacgtttgttattcaagttccgaccaagacgacccgccaaacggtgaagattaaggccggttcggataccacgacggtgcacgtaaagggcgccaagaagctagttggctatcaaaagatggcgacgacttacaatcaggctttgattgcttctaaactcagcaagtctgatcaacaggcggctaagaagttgcaaactgagggtgcagcccttaaaaagcaacaagcaacgatccaagccaaagtcaagcaagcccaggcccaaatcaaggctggcggtacggcggctgccacgggtgctaagacactccaagcccaacaaactgctgcggcgcagctcaagaccaaagcagctagtttgcaaacgactcagaagcaggtcgaagcggcaatggcaacggcgaaaaagcaggtcaagtcgcaattgttaccgacgaagacgccaagtgatggcatcacgaacgtgttaacaactaaggattataagatccggctaaatgttcagaagggtgacgtattaggggcagcgatgattgttccaaccaaggcctttaagaacaagacccgccagaagaactttgggacggcgtttgctttgatgacgacaacaacgggcgccaatgccaagaaggttatgaaacagttccagaaggaaaccaaggataatagtggtagtacgacgacaatcgatccgattacctctaagggcgttcgcttcacgattggtgtctccacgtctgacttgtatatctttatgactaagtaatgttttatgagcgcgactggactttgattagtcaagtaaagctcactattcgaggttatgacgggacgaacccgtagttctaagtcggctgcattttacgcttgtaaagtaatcaaaaaatcaccacctggatgaacataatccaggtggtgattttttgattgatccattttaaatttgattccaaatagaccgtaaaggttacgtgcgttaaattactcaaatgataactctaagaagtataagtgtttggctggtaaatgggccgaagaaacccacacttcatggtagttagggacttttttctctgtgtaatcgaagaagaaatcaagtaagttgccgtttttagcgacaaagtcatcctgaaatcggttgactaatagcttgttgtcaggaaaataaatttcggggttagcgaccttaatatgatcggggacacccatccgaacgacattcgtgtattccggttgggtaaactgaatttcagtcgggtgatgggtgatatagaacatgacgttataaattgaatctgaattactagccacgacaaaccagtcctttgctaaatttacactcattataccaaaaaaatcttaaagcgttggaaatgtttgacgggcccttgacaaacttctaattaaccattaatcttttaattaaattcaaattaattaatttggaaaattacatataaaggaagtcgaagcatatggcagacgtacaattagactggaacaacttggggtttgaatatcggaatcttccgtaccgttatcgtgcgtattggaaagatggtgcttggtacaaaaaagaattaacgggagatgcaactttacatattagtgaaggctcaacagcattacactatggtcaacaagactttgaaggcttaaaagcttaccgcactaaagatggtagtgttcaattattccggccagatcgtaatgcagcccgaatgcagaccagctgtgaacggttattaatgccacaagtgccgacagacatgtttgtggacgctgttaaacaggttgttaaggctaatcaagattacgtgccaccgtatggaactggtgcgactttatacttacggccattgatgatcggggttgggggtaacattggtgttcatccagctcaggaatacatcttcacggtctttgcaatgccagttggtagttatttcaaaggcgggatgacgccaaccaactttacgacgtccgaatatgatcgtgcggcccataaaggaaccggggcttataaagttggtgggaattatgcggctagcttattcccaggtcaagaagctcatgccaacggtttctccgactgtgtttatcttgacccggttgaacatcgtaagattgaagaagtaggttcagcgaacttcttcgggattactaaggatggcacttttgtgacacccaagtcaccatcaattctaccttccgttacgaaatattcattactctacttggcagaacataaatttgggatgaagactgaacaaggcgacgtctacattgatgatttagaccggtttgctgaagctggggcttgtgggacagctgcggttatttcaccaatcggtggcttggaacatcaaggcaagttacacgtgttctacagtgaaacggaagttggtccggtaacgaaaaaattatatgatgaattaactggaattcaatttggcgatcgggaagcgcctgaaggttgggtccagaaagttgaattagactaagtacagtgttgtttgtgtgaataaaaagacggctttagtaagacccgtgatacgggtggaactaaagtcgtttttatgtgcgtgcgcatgatgcacgtggtattgtgaatagtaagaaatgctgtctaatcagtagacgcatgatcggaacgacagttattcggctaaggggacgttacggttaggttaagattgctgattgtgatgtaaagttgctgaagaaacgctaaaattaaagggagttgggcaagatgataaagtggagtaatcgacattggcaggcagttgaatgggtcagcacgggaattttggtgggctgtacgttactgtataatcatcaggttgtctcgaatcaatggcttctcatcattggcggggccgctttaatcagttattggttggtcacattaccgcggttattcggaagtcagcactagcttcgggcaggtcgttgatgcaatcaggtcagttcgtatccgcagaaattgtcagggtaaaacgtggacactttgccaggttacttggttgatactgaccttgaaggcggtttagccacagtcaatcccaacttgaatcatgatcctaataagagagaatgaataaattaatgttaacttttagtagaaccgcagcactaattaaccaaatggtccaagatcaagtgatcccaggggcgagttatgccttgattgatggggctgagtggcacacgaatcaagtgggcgtcgctcaaataaaaccaacgatcaaaccattatggccggatgcgatgtatgatttagcctcggttactaaggtcgtgggaacaacaaccgtggcgatgcagttgatgcaaaatgggcaacttgaaattgaccgccccgtgcatgactacctaccggctttacagtccacaacgattacggttcgtaatttgatgacccatacaagtgggctgagtggttatattccaaatcggaatgcgttgtctgcagatgcgttattagccgcgattcaacagctaccaatcagtgagcgtaaccgcaatcatcgggtggtttatacggatttaggcttgatcatcatggggcaagtcattgaacgaattcttggagcggccattcagccaattatcactgagcgcgttttgcagccattagggttagcacacacgagtttccaacctcaactagcgcaaaccgttccgacgacgtattccatgaaaactgggttgttacgggggatcgttcatgatcctaaggccagagtcttaggtgaacactgtggttccgccggtttatttgccagtgtgacagaccttgttcggttttcacaattgatgctcggccaaatcgacgtaccagctgtgctatcacaggccacgattgcaagcttgtatcaagattggacgcccaatcaacacttacgccggagctttggttggaacctctggcaccgttctaatgagacgctgccggtgatttttcatactggttatactggcacgctcctgatgcttgaccgtcaacggcaacggggccttgttttcttatccaaccgggtgcatccagttgcaaataattcggtattccttccagcacgtcgccggttaattgcggcttggttggcggatacggttacaaattagctacttcggtttcacaaccgctttcatttatgctaaaatttagatattaaattcaacaatggagtgagtagatcttatgagtgagccatactttttaaagccggtgttccatgaaaaaatttggggcggtaccaaattacatgatgattttaattatgatattcccagtgatcatactggtgaatgttgggctatttcagctcatccgcatggtccagcgaccgttgaaaatgggccgtacgctggcatgacactggatcgagtatgggcagaacatcgtgatgtgttcggtgatgctaagggagatgtcttcccactattaacgaaaatcttggatgctagtgaagatttgtcggtgcaagtgcatcctgatgatgcgtacgcggctgaacacgagcacgaacttggcaagactgaatgctggtacgtgattgcggctgaaccgggtgcaacgatgatttatggtcatcatgcgaagacccgtgaacagctcgctgaatggatcaacaacggtgaatggaataagctattacggcgagtgcccgttaagcccggcgatttcctttatgtcccatctggaacgattcacgccgttggtaagggaattatggtgttagaaacgcagcagagttctgatacgacttaccggctatatgattgggaccgggtcgacaagaccactggtcagaagcgcgagctgcatttgcaacaatccattgatacaactaacgttccgcatcatgaccctgatcttgacatcacgactacccaggttggggatgcaacggtgaccaaatacgtccaatcaccattctttggtgtttggcaatggcggctaacaaatgggcaagcaacttttaaccggggaacagcaccttatacgttagtctctgtacttgatggtgaaggtagcattgtcgttgacggtcaagactatccattgagtaagggcgtccactttatcttgccatttgacgtaaaacaatggacattgaaaggcgatttacaaattattgcttcagaacctggggctaaggcataattagttaaccccttgatgggataaaaaagattgatactggttggaagccaatatcaatctttttttgcgcatctactgatagtatcagtttattaataatcactatctgaaagtatataaatatttattatagcttgaaggggtttactaatgagaaggcttccaaaaaactattatcattgtaaccaattaatacggatcaaactaaaaaaatcgtcactggctggtaactaagtcagtggcgattttgagtgatacgttttaaggtttcacgatgacgtttttagtgaggtcttcgttgagttgatccagtgcatcgaagttgccttcagggtatttacgttgtaaggccagtttcaagattcgtttggcgagggcttcattgcgtgcaaggattggaccatggaagtaagacccaaaggtgttcttgtagataacgccctcagattgatctttgccattattgccgttaccttggagcacttgaccaaggggccgttcaccttcgcccaggaaggtcatcccgttgtggttttcaaaaccatagtaggtctggtgggtttcggcgttctcaatggttatattaccaataaagcgattgttatcctgactgagcgtgtaatgatctaaggcaccgatacccgcgatcttttcaccatgggccccaacgtagtaatggcccagcatttgaaagccaccacagattgctaataatgggccaccggcttcgatatatgcggtcaaggcgtcttttttcgtttgtaaatccttggaaacaatcgtttgctcgtaatcctgaccaccgccgaagagggcgaagtcatatttttcttcgtcaaaccgatcatccaagctaactaagtcaacagtgatgtcggcatccactgctttagcatagtagcgcattgctaaaatgttaccgatatcaccatacgtgttcattagatcgccgtagaggtgtgcggcgtgtagtgtataagtcatggttaagccatccccccatcgataatgccttggctagcaagttgttttcgtaattgcaacatcgcggtgtaagttgcgacgacgtagacttgcttggtcggtagtttttgaattgcggtcgtcatgttggtcaggtcaggaataatggttaactgatcttccggtaccccagcaacttttagccggaacgtgatatcacgataacgttcacccccactaatataggcgggaatattcaatgccggtaatttttcaaaattaccatcccagatccaactagtatcaataccatctgcatagtttgcgttgagcagagcggcaaatgagaatggccggtcatcggtgctgattgtttgcaagacttggttaaggcccactggattcttgacgagaatcagcgtaacgtccttttcgccaacgtgaaaggtctcttggcgaccaaagacttgttcatcgttgtcgctaagggcgtgcgcgattttggccggcgtgacgtccatgaagcgcccaaccgcgtaggcagctagcgcattataaatattgtattgaccaccgatattaagatgcatggcctgaccgttgatttcaaagtctgagctagtcggtgtcatagcggttagggcgtttaatttgtatgtcaactgtggacgctcaaaaccgcagtggggacaataatacttgcccatattgctataagttcgactatggtaacgtaaaatatgctgacaacgcggacaaagcaggccatccgtatttgctggcgcttgttggtcatggtcgggctggtagtcaaatccgtaatacagtatcggattaggcaattgtttggcattgaagagtggcaaatcaccgttggcaataattgtcgcttcaggtgctaaagcaaccccgtctaagattttttgatatgtcgtgtagatttcaccatatcgatccatctggtcacggaaaatgttcgtgaagacaaaggcttttggtgtgatgtacttggtgaccatgattacgttagcttcgtcgacttctagaactgcgagtggcttttggtgcgctttaggtgcccgtaaaaaggtcgtgacgataccttgcttcatgttggatccgcttggattggttaaaatgtcagggtactgttcacgtaaaaccttgaccgtcaaggcggtcgttaacgttttaccgttggtcccagtgatgacgatgacgtcgtagtttttagcgagatgctttaaaatcgttggatcgagcttcagcgctaacttgccggggagtgagctcccaccgccacggaaggtgtgtaaaaaccaatatgcggatttacccgtccaggtggctaatgtactattaattgacataagttatcggtacccctaattcttgatttacctgggaaatgatcagtgtgaccaactaccgggtattaaaatcataattaccggacaaaatgtcctactctcaagtattttatactgaacgtccctaaaagaaaagtgatactcccgccatttaaccgcatattatcaattcgttaattagttttaatgacagaatgctgaaattcacggccaaatccgctataattgactagaaatgtgtaaaaaaggggaatgagtcgcttggcacagttattttttcgatatggcgcgatgaacagtggtaaaaccattgaaattttgaaagttgcccataactatgaggaacaagataagtcggtcattatcttaacgagtggcttagataatcgtgatggtgtgggctatgttgcgagtcgcattggccttaaacgtgaagcaacgccagtatttgatgataccaatatttttgagatcgttaaacaaacgaatccggatgctgcgtgcgttttaatcgacgaagcccaatttttgaaaaagcatcacgtcctagaattggctgacattgttgatgagctaaagattccagtgatgacgtttggtttaaagaatgattttcgtaacgaattgttcgaaggtagcaagtacctactgctatatgcggacaagatcgaagaaatgaagacgatctgctggttctgtcgtaaaaaagcaattatgaatttacggttccacgatggtcagcccgtttatgaaggcgaacaagttcaaatcgggggtaatgaggcgtactacccagtttgtcgtcatcattatttttacccgccgaaattaacaaagtgaggattaactgagaatggataagttttttgataagttacaagccgttgccgatcggtatgaggaactcggtgaactattaagtgatccggaagttatttcggattctcaacgtttcatgaagttatctaaggaaatgggtaatattcgtgaaacggttgaaaaatataatcactacaaggaagtcacgagtcagatcgaagaaaatgacgaattgcttcatgaaaagctcgacgatgagatgaacgcgatggtcaaagatgatttaaagaaccttaacgcggaaaaggatcaattggaacatgaaatcacgttattgatgttgcctaaagaccctaacgatgacaagaatatcatcatggaaattcacggtgctgctggtggtgacgaagctagtttgtttgctgcggacctgttcaacatgtactcgaagtacgcagaacgtcaaggctggcaagtagaagtggctgatcgtaatgaaactgaagttggtggctttaaagaaatcgttctgatcatttctggtgacaaggtctactctaagctgaagtatgagagtggcgcgcaccgggtacagcgggtgccagtgactgaatcagctgggcgggttcatacctcaactgcaacagtcggcgttatgccggaagcgcaggatgttgacattgatattgatcaaaaagatattcggaccgatgtctttcgttcatctggtgctggtggtcagcatatcaacaagacgtcttcagcggtgcggatgacccacttaccaaccggtatcgtggtctcgatgcaagaccaacgttcgcaacagcaaaaccgggccaaagcgatggaaatcttgcgggcacgggtctacgactactatcagtcacgggaacaaaacgaatatgatgctgaacgtaaatcagccgttgggacgggtgaccgttctgaacgtattcggacttacaattttccacaaaatcgggtgacggatcatcgaattgggttaacgctcaacaaacttgaccgggtgatgaacggcgagttagacgaagttattgatgccctcgttttagctgatcaagctgaaaaaatggagcgcttaactaatgaataagcccactcaacccacttattttgaagcccagcagtgggcttctttttgtctaaaaacggcccagttgccgactgatagtgctcgcttcctgttattgggcttgagtcggctagaccagacacaattactcattcgttaccgcgagccgctacccagtgctgtttggcatgcttatcagcaggggattgaccgggttgttgctggtgagccagtgcagtacgtactcggagacgcaccgttttatggactcacgttacaagttgatccagcagtgcttattcctagagtcgaaacagaagaattggtagactggattttgacggatgtcccagcgacagcgccagttcgactcttagacgttggtaccggctcgggcgccattgcattggcaatcaaacacgaacggccggcatgggagattacggccagcgacatttcaaccgctgcgctgcaagttgccaaagccaatgcggaccgcctacatttagatgttaagctggttcacagtgatctattgaccagcgtatctgcgcagccgtttgatattattgtcagtaatccgccatacatcgctgcgagcgaaaaagacgtcatggacgccagcgtcctcgcccacgagccacaaacggccttacttgctgaccacgatgggttggcactttacgagcagttagcgacgacggttgccgatcatctgacttcggccggtcgcttatacttggaattcggctaccatcagggaccggccttgcagacgcttttcgcgcagtcgatgcccgacgcgaccgtgacgctgcgacaagatatggcgggtcacgatcggatgctgcgagttgcaatgactctgactcggcaatagttgcgcgttatcctggagaatgctgataaaagcgggccgattaggtagattgctgtttgtaatccgcgtcccattccggccttcgggggtgggtgaacgcagtcgtcgatttgagctcgcgcataacccgcgttatctcaaatgtgagtcttatcctaagcgggctgtttttaacctgggaggtacggcgtgaatttatgagcaattgattaagtccgtgatgtaaataataaataatattatatgaaagtaacgatgaattaataataaagtagaggtttgaatatattatggaaacgaaagtatatacgccggcggagattccggccgctgcggcgttgttaactgcggggcagttagtggcattcccaacggagacggtctatgggctaggtgccgatgcgacaaatgtggatgctgttaagcaagtgtacttagctaaaggccgcccgagtgataatcctttgatcgtgcatgttgctgatgtggaaaccgttgagcggtttgctcaaccgttatcggaagcagccaagaagctgattaaggcgttttggccaggccccctgacgatgatttttaaattgaaaccagatgcgttggcaccagaagttactggtgggctgcagacggcggctttccgtaatcctgataatgaggcaaccctggctttgattcgtgcggccggaacgcctatcgtgggaccatccgctaatacatctggtaagccaagtccgacgacggcgcaacacgtattgcatgatctacgtggtaaaattgctggtattctggatgatggtccgacgaaggttggcgttgaatctacagttctggatctttcaaccgaccaaccagcaattctacggcccggtgccgtaacgcctgaagcaatcgaacgggtcattggcatgccagttcaaaccgaattgcaccatgtcggagctaaggaagttcctaaggcgccggggatgaaatataagcactatgcgccaaacgcacaagtttatatcgttgatcgttcggaagattggccagaagcgctggcgtgggcagcccagcaagatgtgccaatgggcgttatggcaacagatgatattttaactaacaatcaaattccgactaattgcgaacaattttcgcttggagaagatattcaatcggcaagtcgggagctgttcgcgggcttgcggcactttgatactgagacggaaattaaagatattctgtgccaagcctttgaaaataaaggacttgggcttgcctacatgaaccgattaaataaatctgccggtcagactcattttagtgtataatgattgcaagtcgggaaaacccgaaagttgtcacttgcgaaatggaggagatttattcatgaattaccaggaacaagatccagaagtatgggctgcgattagtaaggaacaggcacggcaacaacataatattgagttgattgcttctgagaacatcgtttcaaagggcgtccgggcagcgcaggggagtgtgctgaccaataaatactctgaaggctatccgggtcaccgcttttacggtggtaacgaatacattgaccaagtggaaaccttagccattgaacgggctaagaaattatttggtgcggaatatgctaatgtgcaaccacactctggttcccaagccaatgcggctgcatatatggcactgattcaacctggtgaccgggtgatggggatgtcactagatgctgggggacacttaacacatggatctagtgtgaacttctctggtaaactttacgattttcaaggttatgggctcgatcctgaaactgaagaattaaactacgatgcaattcttgcacaagcacaagattttcaaccaaagttaatcgttgcgggggcttctgcttatagtcgattgattgatttcaagaagtttcgcgagattgcggatcaagttggggccttattgatggttgatatggctcatattgccggcttagttgcggccggactacatcctaatccggtgccatatgctgatgtggttacgacaacgacacacaaaacgttacgggggccccgtggcggtatgattttagcgaaagaaaagtatggcaagaagatcaactcggccgtttttcctggcaatcagggtgggccgttggatcacgtaattgcgggtaaagcgattgctttgggcgaagacttacagcctgagtttaaggtttatgcccaacatatcattgataatgccaaggcaatggcgaaggtcttcaatgactctgacttggttcgggttatttctggtggcacggacaatcatttaatgacgattgatgtcactaagtctggtttgaacggtcgccaagtacaagatctgttagatacggtttatattacggtcaacaaagaagcgattccgaatgagacgttaggggctttcaagacctctggtattcggttgggaacacctgcgattacgacccgtggttttgacgaagctgatgcaactaaggtcgctgaattgattttgcaagcgttacaagcaccgacagatcaagcaaatctagatgacgttaaacagcaagcaatggctttaacagcgaagcacccgatcgatgttgattaagtaatttatatcaggtctggttttttctctctaaattagctacaatagaaagaaatcactaaggagtgtgcgtagcaacatgggtaagtttgaggttttggatcatccgctcattcaacataaattgacgatcattcgggaaaagaactgtggtactaaggtcttccgggaaatggttaacgaaatttcaacgttgatggcgtacgaagtatcacgcgatatgccgttgaaggacattgagattgaaacaccgattgccaagtcaacgcaaaaaacgttggcaggtaagaaagtcgccattgtaccaatcttacgggctggcttagggatggttgacggtttcttaaacatgattccggcagctaaagttgggcacgttgggatgtatcgggatgaaaagaccttgaagccggtcgaatatttcgttaaattaccaagtgatatttcacaacggcaattatttgtcgttgatccaatgttagccactggtggttcagccatcatggcgatggatatgttgaaaaagcgcggcgcaagtaatattaagtttatgtgtttagttgcggcgcctgagggtgttaaggcacttcgggacgcacatccagacatcgacgtttacacggcagcacttgatgaccatttaaatgaagatggctacatcgttcctggtttgggcgatgcgggcgaccggttatttggtacgaagtaagttgcattgacaaaaggtagcaccgccaggcaatgtctggggggctacctttttgttttccaaaattattaacaactctagctataatcatccgcattctgtgagttcattagtcatgaatcgtgactaaaacgtgctaatttctaagattaaaagcagccagctatggaccactggaaacgggtgtaagtgggcgtaaacatgctttgctggttcgtcctaagccgacttccagtcgtgacagtgttcgaatggctgacgaagatgtacctaacttttgatgaatttgtcgttgctttttacaaccagtaattttgtcaatcaaccggcagactgaaaatgatattgagatagctcactaatcctgaattggtgtagtaaaatttaatctcttgacaaagtgctaatgcacctaacgctttgtttaaagttccagtgtcaaaatagtcagcgacaaattgtaccaagttaagtggccgttcatcagccatttgagcggcttaccgaccggaggggctgggtgacaatgcccagtagccaaattattcttagctggaagtggtctgcttccggcttagaataagactcgtatttgagatgacgcgggttatgcgttagctcaaatcgatgtcggctgcgttccagcaattgtcacccagccccggaggtcggaataggacccacaccggctgacgtacaacaatctaattagcacgttttaatcaccgttaatgccaaataataatttgtacaacgcgtatattataggtagttattgacattaactgttgggggacactggataattagggtgttttagatggcgattacgctgtattggtcgaatattcggtaacgttgggtgagaaagtcacattatttcaggaatgttgtcataaatattatgatgttttgaactaatatcgtttttaggggctgttactggttcggttcaaacattgagttgacaattatttcggagacgagtagactaattgcaattaaacagttcctttaaattagctcagagaggctgaaaaggatgaacggacgtgcgctttcaaggaagctgtgcgtaatttcggacagcctagccgctttgagtggtgggctgtcttttcttttgcaatcattcataaaaaggggtgcgttatgacaaagaaagcggcgtttcataatgatgaagtcgtgttagatattcatgaccgaccaaaattaggtagttggttaggcttgtcggtgcaacatctgttctcgatgtttggttccacggtattggtgccaatcctggtgggattaaatccaggtattgcgctgtttagctctggtgttgggacgctaatgtatatcctcatcacgcgcggaaagattccggcgtatatgggctcgagcttttcatttatcgttgtgatgcagtctctgatgaagaccgcaggatatccggccatcgctcaggggactgtcgcggtgggctgtgtgtacctgctagttagtttattagttactttaatcggttctgactggatcgataaggcgcttcccccgatcgtcgtggggccgattgtgatggtaattgggttgtcactcgcagggacggcagctaaggacgcaacgatgaacgggagtagttatgatattaaatatttcggcgtcgcgatggcgacgatgttactgaccgtcatttttaacatgtacttgcgtggatttatgagtttagtaccgatattgttgggaatcgtctgtgggtatatcattgccgtgttagttggaatcgttgacttttctggtgtggaaaaagcgcagtggtttgcgatgcccgcctttcaattgccttttattagttatcatcctggcatttattggggcgcgattctgagtatggcaccaatcgcctttgtgacgatgtcagaacatatgggccatattatggtactcaataagttgactaagcggaatttcttcaagaatccaggtttgaaccatacattggctggcgacgggacagcctcgattatcgccggctttgtcggtggaccacccgtgacctcctatggtgaaaatattggggtgctggcaattacgcgggtccacagtatttatgtgctcggtggggccgccttttttgccatcgtctttagttttgtgggtaagttatccgcgttgatcgagagtattccatcacccgtcatcggtggggtcagctttctactgtttggggtaattgcttcaagtgggatgcgaattctgattgataataaagttgattttaatcagaagcgaaatttaatgattgcatcagcgattttggtcattggaattggcaatgcctatttacaactgggaagctttcagttcagtggtctagcagttgcaacggtgctcggaattgtgatgaacttggtgctgccaaagacggcggtaaatgagaagtaggccgtcattgcgcgtgccaagaatgaaaataaagtcaaaataatgaaaatccaacgatttgaaagcttaatgagagcttgatattgttggatttttattgattgacgaaatgttgaaattattttgaattttttcgacggtggtggtattattacctttgtattttgattaggggtgtctctaatctaccatttcaggttacgataaaattgacgttgactagctcaaaggttaaggttatcgtagcaccgaaattaaaggaaagaggtgatattcagtgggtgatccagttcctacagtcaaattccttggactgacgtttaatatcgcgaatgacatctcagtaattgtgacttgtctgattgttttcttgtttgtttttttactttcgcgacatttaacaatgaagcccaagggtggacaaaatgtgctggagtggctcatcgagttcacgaatggcattgtcaaagggtcgatcaagggtaacgaagcgtctaacttcggtttgtacgcatttacattgtttctctttatcttcatcgctaaccaacttggattgttcattcacgttcaggtcgggcagtatacgtatctgaagagtccaaccgccgatccgattgtgactttgacgttatcgtttatgaccgttgcacttgcacatgctgcgggtgttcgtaagaaaggtatgggtggttatttgaaagaatacacacaaccttttgctgttttctcggttgttaacgtctttgaacaatttaccgatttcctaactttaggtcttcggctgttcgggaacatctttgctggtgaaatgttactaacgaaggttgctgatttggcaaagagcaacggttggttgagctatgtttactcatttccaattgaactcttatggcaaggtttctcagtgtttatcgggagcattcaagcgttcgtgttcgtaaccttgacttcagtttatatttctcagaaggttaacgacgaggaataatttctagttttttaattttaaggaggatacacagattatgggagcaattgctgcaggtattgctatgtgtggtgccgctataggtgctggtattggtaacggtttggttatttctaagatgcttgaagggatggcccgtcaaccagaattatctggtcaattacggactaacatgttcatcggtgttgggttggtcgaatcaatgcctatcatttccttcgttgttgctttgatggttatgaacaagtaatcattggtcaacgagttcattttaatgaaaatgaaagaaggaggtgtcattagatgctctcgcatttaattatcggtgcatccggtctctaccttggtgatatgttgtttatcgggattagctttattgttttgatggcattgatctctgttgttgcttggaagcccatcacaaaaatgatggctgatcgagccgacaagattgcgaacgacattgattcagcacaaaagtctcggcaagaagcgagtgacttagctgatcaacggcgtgatgcgctatcacactctcgcgctgaagcgagtgaaattgtcgctgacgcgaaaaagagtggcgaaaagcaacggtcaagtatcattgccgatgcgcaaaacgaagcaacgcagtataaacaaaatgcgcgtaaggatattgaacaggagcgtcaagatgccttgaagaacgtccaatcagacgtcgctgacatttcgattgcgattgctacgaagattattaagaagcaattggatccggaaggccaacaggcattaattaattcgtatattgaagggttgggaaagcatgagtcttgataatcttacaattgcaagtcgttattcaaaggcactctttgaacttgcagttgaaaaagatcagaccgaagcattcctggccgagttaaagcaattacggcaagtctttgtcgacaacccgcaattggcagaggtcctctcaggatcattgcttccggttgatcaaaaacagacaacgttgtcaactttgactgaccacgcttcagaatacattaaaaactttattcaaatgttgtatgattacggccgcatgtcgaacttagttggcattgttgacgcgtttgaagcacgtttcgatgagagtcgcaaaatagtgcatgccgaagtaacgtctgcggtcaagttgtcagatgagcaagctgatgcaatcgcaaaggcattcgccaagcgtgttggtgccaatcaggttgttttgtcacgtaaagtcgatgaagcaatcattggcggtgtaattgtgaagtcaaataatcaaacgtttgatggtagcgttgcgttacaactaacgaatttaagacgagcactcatcaacaattagtttacgaagaggtgaaacttttatgagcattaaatctgaagaaatcagtgctctaatcaaacaacaattagaaagttatcaaactgagctctcagttgctgaaaccggtactgtcacctacgttggtgatgggatcgcccgtgctcacggactcgacaacgccttacaaggtgaattactcgaattcagtaacggagtttacgggatggtacaaaacctcgaaagcaacgatgttggtatcgttgttttaggggattttgatggtattcgtgaaggcgatactgttaagcggactggccgcatcatggaagttccagtcggtgacgccatgattggccgggtcgttaacccattaggtcaaccagttgacggtttaggtgagattaagaccacgaatacgcggccaatcgaacataaagctcctggtattatgcaacggcaatcagttagcgaaccacttcaaactgggatcaaggccattgatgccttagttccaattggtcggggccaacgtgaattgattatcggtgaccgtaagactgggaagacgtccgttgccattgatgccattttgaaccaaaaggaccaagacatgatttgtgtctacgttgcaatcggtcaaaaggactcaactgtacgggcccaagttgaaacgttgaagaagttaggtgcgatggactacacaatcgttgtaactgccggacctgctgaaccagcgccattactgtacttagctccttatgctggggcagcgatgggtgaagaatttatgatgaacggcaagcacgttttgatcgtctatgatgacctttcaaagcaagcaacggcttaccgtgaactttccttgatcctccgtcgtcctccaggtcgtgaagcttatcctggggatgtcttctacttgcactcacggttactcgaacgggctgccaagttgagcgatgaattgggtggcggttcaatgacggccttaccaattatcgaaacgcaagctggggatatttcggcttatattccaactaacgttatttcaatcaccgatgggcaaatcttcttggatagtgattcattctattcaggtgtgcggccagcgattgatgccggggcctctgtttcccgggttggtggggatgcgcaaattaaagcgatgaagtccgttgccgggaccttgcgtcttgacttggcttcttatcgtgaattggaatccttctcacaattcggttctgacttggatgctgcaacccaagcgaaattaaatcgtgggcaacggatcgttgaagtcttaaaacaacctgttcattcaccattgaaggtcgaagaacaagtaatgattttatatgctttgaccaacggttatttggataaagtggcagttgatgatattgcccgttaccaaagtgaattgtttgaatttattcatgctagtcatcaggacctctttgatacgattttggcaaccaagaagttaccagaagctgataagatgaatggggccttagatgcgtttgcagaacaattccagccaaccgctgccgctgcgaagtagttatggctgaaaaggatggtgagtagtgcatggcagaatcattaatggatgtcaagcgccgaattgactcaacaaagaagactcatcaaattacgtcggcaatgcaaatggtctcaacttcaaaattgaaccagattcaaaagcataccagcacgtatcaggtgtacgcttctaaagttgaaagcatcgtttcacatcttgccaaagctcatctgatgtcagcaagtgccggtgttgctaacagtaattcgaacacgatttcagttagtgaattgctcgcgcaacgccccgttaaaaagactggtttattggtgatcacttcggaccgtggcctcgttggtagttacaacagtaacgtgttgaaacagactaacgatttcatgcggacgcacaaggttgatgccgataacgcagtcgttttggcggttggtggcactggtgcggatttctataaaaagaacgggttaaacgtggcttatgagtaccgcggcgtctctgatgtcccaacttttaaagaggttcgtgaaatcgttaagacagtcacatcaatgtaccacaacgaagtctttgatgaactttacgtcttctacaaccactttattaatcggctctcttctggttttcgggccgttaagatgttaccgatctccgaagagacctttgaacaaagtgagtcagataatcgtaaagccaaggatagccgggtagatgtcggtcccgagtatgaaatggaaccgtcagaagaagccattttgtcggccgtgttgccacaatatgctgaaagcttggtttatggtgcaatcttggatgccaagactgctgaacatgcttcgtcgtcaaccgcgatgaaggctgcatcagataacgctggcgatttaatcgataaattaaatctgaaatataaccgtgcgcgtcaagctgctattaccactgaaatcactgaaatcactggtggtttggttgcgcaagaataacgaagtgggaggaattaacgactaatgagtacaggtaaagttgtacaagttattggacccgttgttgacgttgaattctctctaaacgataagttacccgatattaataacgccttgatcattcagaaggacaacgatgacactttaacggtggaagtatcgttggaattaggtgatggggttgttcggaccgtcgcgatggatggtacggatggcttgcgccggggaatgacagttgaagacactggttcttcaattactgttcccgttggtaaagagacgttaggccgggtcttcaacgttttaggggaaaccattgatggtggtccagaattcggtccagacgcagaacgtaacccgattcatcgggatgcgcctaaatatgatgaattaacgaccagtactgaagtattggaaactggaattaaagttattgacctcttagcaccttatgttcgtggtggtaagattgggttgttcggtggtgccggtgttggtaaaactgttttaatccaggaattaattcataacattgcccaagaacataacgggatttccgtgtttaccggtgttggtgaacggacgcgtgaagggaatgacctttacttcgaaatgaaggcttccggcgttttgaagaataccgccatggtttatggtcaaatgaacgaaccacctggtgcccggatgcgggtggccttgaccggtttgacgattgcggaatacttccgtgatgttcaaggtcaagacgtgttgttattcatcgacaatatcttccggttcacgcaagctggttctgaagtttccgccttacttggtcggattccttcagccgttggttaccaaccaaccttagccactgaaatgggtcaattacaagaacggatcacttctaccaagaaggggtcagttacttcgattcaagccgtttatgtacctgccgatgattataccgacccggcacctgcaacgactttcgcccatttggatgcgacgaccaacttggaacgttctttgacggaacaagggatctacccagccgttgacccattagcttcttcttcaatcgctctggacccatcaatcgtgggcgaagaacattatcaagttgcaacggaagttcaacgggtcttgcaacgttatcgtgaattgcaagatattatctcgattttagggatggatgaattatctgacgaagaaaagacaactgttgcgcgtgcacggcggattcaattcttcttgtcacaaaacttcttcgttgccgaaaactttacgggccaacctggttcgtatgtgccaatcaacgataccatcaagggcttcaaagaaattcttgaaggtaaatatgatgacctaccagaagacgcattccgtcaagttggtaagatcgacgacgtggtcgaaaaagcgaaatcgatggtaactgattaggaggggtttacatggctgacaatgcaaaatcattaaccgttagcatcgtaactccagacggtcaggtctatgagaataagacgccaatgttgatcgtgcgaacgattgacggcgaactcggaattttgccgaaccatattcctgtgattgcatcgcttgcaatcgatgaggttcggatcaagcaacttgaaagtgatcaggaagatgacgaaattgccgttaatggtggttttgttgagttcagtaataatacggcaacgattgttgccgatagtgctgaacgtcagaatgacattgacgttgctcgagctgaaaatgcacggaaacgcgctgaaacacggattcaaaatgcccaacaaaagcacgatgatgctgagttggcgcgggcccaagtcgctttgcggcgtgccatgaaccgtttgaatgttgctcggcattaacaacttaaaattctgaaaagcatctgcaattatttgcgggtgctttttttgtgcggttcagttaagccgcgatgcacaagttagtcaaacttaccgcggtgagtcgtacccgttactgtccagttttaagcttgcacggttcaaagccgattggaaccgtgggttgatcaagggccaagcactggcttactaatggcgatatcgcgttgttaactagaagaatcggtctgattcgaatatttttcgccaatattgcatcagtatctggcagagcagtaattaagacgtggatcgcgacttaaatgggtgatcatcacgttccgacaattggcagcaattccaaaggtcggcataggaaacatgaacaactaagtttacagcgaacttaaacgtttcagcggccaattttgtcgcgacgttgaaatgttttgtccagtcggcgcggatgttcgtgaactaaattttactaatcgattgagcgtattaggggcattgcgataagtggaatggtagaatgcaacttatagtgagattacaataaagaaaacgattacaaacgaacgatactgctaatcaatatgggtatggcttgtcaaataattgcacgacggacttctaattagttaactaatcataagtatttaatatttgtgttgaaattgtaacgaaaatgtaaaatgtaatatttatccactagtgttctatggtatgatgattaggaaccgatttgaacctgcatgctgctattggcacgttgccatggtgtgtccaggttgttttgatggttaagctggtgtttggattgcacaccgcgcgttgccgatttgcttagtacagcggtgaacagtggaatttgggcaggtgcgaggcatctgatccaatcgggttcttttagtaagtgtgctttttacgcaatccgaaatctcacgtaacttgtttgttgattatcgtttagtgatggagggtttatccatggaggaaattgtagttcatggcggtcaacgtttgacaggaaatgtccatattgagggcgctaaaaatgccgtgttaccaatcttagccgcaagcttgttggctagttctggtcagacacatttatcaaatgtaccagtgttatcagacgtttttacaatgaacaacgtcttgaaatttttgaatactaaaattgattttgatgaaattaataaaacaattgatattgacgctagtcgtcaattatcatccgaagcaccatttcaatacgtatccaaaatgcgtgcttcaatcgtggtcatgggaccactattagcacgattaggccatgcgaaagtcgcgatgccaggtggctgtgcgattggttcacgaccaatcgatttacacttaaaggggctgaacgcgcttggtgctgaaatcgaacgccacgatggctatgttgaagcaaccgcgaaccagttacacggagcggccatttacttagattttccaagtgttggggcaacgcagaacataatgatggcggcaacacttgcagatggcatcacgacgatggaaaacgtcgctcgtgaacctgaaattgtggacctagcgaactatttgaatcagatgggtgctaaggttaccggggccggtactgaaacgatccgcattgaaggggttaaagcgatgcatggctgtgaccatagtatcgttcaggatcggattgaagctgggacattcatggtcgctgctgcggtgactcagggaaacgtcttggttgaggatgctattgccgaacataataagccattgatctcgaagatgcgtgagatgggcgtcacagtaacggaagaaccggctggtattcgggtcattggtccagaaatcttgaagccaacctccgttaagacgatgccccatccgggtttcccaacggatatgcaaccacaaatgacaattttgcagttgtgtgcgcagggcactagtttattaactgaaacggtttttgagaatcgcttcatgcatcttgatgagttacggcgaatgaacgccgacttcaaagttgaagggcgctccgtcattatgtatggtcccactgactttaacggggcccaggtcactgcgacggatcttcgggcagctgcagcgttagtaatcgctggactggtcagtcggggttacactgaagtgactaatttgaagtatcttgatcggggctactttaacttccatggtaagctggctaaattaggtgctgagattaaacgagttgatgttcccgatggcaccgtttatgcgttgaatcctgattttgcgaacgaagctgcggaataaatcgaaataaatgcttacaaaaccttcaaagtgcgataaactcgtttttgaaggcttttttgtggcgaagcggggtaacccggcgccaacattcaggaggacagcttatgtttattaatattatcgacaaacacatttcattgaaaccaactgaagtggctgacgcggagccgcttttcgacttagttgatcataatcgcgaccatttgaagttatggatgccgtgggttgatgcgacggcgaccgtgcaagacgagcgtcattttatcgaatcaatgttgaccaagcaggctcatggacaggtgtttatcaccaccatcattgtggatggcgaagtcgctgggatgctagacttgcataatattagtgccattaatcacaacggtgagattggctactggctgggccagaaatatactggtcgtggcgtcatgactaaagcgctcgaacgattagaagaaattgcttttacggagcttgatctgcacaaggtcatcttaggtgcagacgttgccaaccaggcaagtcgggctgttgctgagcgacgccaatatcatttggatgcgaccctgccagaaaatatcttgttaaatggtcaatatcgtgatgaagcaatttattcgctgacggtcgatgagtggtcgaaacgacaggatgattaggcacagccaattgattggtagtgacaaatgaacgagtggctaggacagccgtcagttctcatcaactgtagagtatggtataatgattagtcgtataattgtatgtttgagaggagcaaaaacatggctttagatattggtattgacttaggtactgccaatgttttaatttacgtatcgggtaagggcatcgtccttaacgaaccatccgtggtcgctatcgatacgaacacgaatcaagtgttggcagtcgggtccgaagcctaccaaatggttggaaagacgcctagtaacattcgggcaattcgaccattaaaagacggagtaatttcggattttgatgtcaccgaagaaatgctgtcctattttattaaaaaattaaatgtccgtggcattatgtcgcggccaagtatcatgatctgtaccccaacgaacactactgaaattgaacgcaaggcaatcttgcaagctgctgaaaaatctggcggtaacaaggtttacttggaagttgaaccaaaagtggcggctattggcgcagggatggatattttccaaccacgtgggaatatggtcattgacattggtggtgggactagtgatatcgctgtcctatcattaggtgacattgtggcaagtagttcgttacgaatggccggcgaccggatgaatcaggacatcgtgaactacgtcaaagatcaacatcacttgttgatcggtgaacgcagtgcagaacaagttaagattcaaatcgcacaagttttcaagcaggacggcgatgatgataaggtcacccaagttcgtggtcgagatactgtgacggggatgccgcgctcaattgacattgactccaatcaagttgaagaagctattcacgaaacgctgatgcagatcgttagcacggcccatcacgtgatggaaactttaccaccagaaattgcggccgatattattgaccgtggaattacgttgactggtggtggcgcactgttgagtggcctcgatcaattgatcagtgaaaacttaaaggtgcccgtaatggttgccgaacacccattgaacaacgttgctcagggggctggaattttacttgaacatatgcagaaaactgctaagaacaagaaataaattacgatgcgacggttattaatgaaaggcatccgcttttatcagcgggccttttctgcgtttagtccggctcattgtcgctattatccaacctgttctaattacacgttagaagcgatcgatcggtttggcgcagttaaaggcgttctaatgggagttgcacgtatcttacgttgtcagcccttagttaagggcggctttgatccggtaccagcccatttttcattgcgtcgtaatccgcaatacaaggaggaagaccaccgtggcaagaaaagataaggcgatttcggtcactttaaacgaaactaaggtcaacggtcaaccagttaccgaagttttgatcggtaaacaagtgattggacaagtgactcaagtcggtgaacgatttgaagctgaaatggttagtgacaaccaaccatttgcgcataccaaatcttttgatgagagtctgcaagagatcttgtcggcttaccatctacacaaaggctaatttttagtaaaccttcaacctggttccgagaattcggcaccaggttgttgtataataaaaactatcttaaagtacaaaatgatattgtgaatagggttagtctgacgcgtgcggtgggctaatcccaacaggttaggagcgttatttgtggcagaagaatctagactccgcagtcaagacgaggattcaagaattgactggggtatcatattttcagtgatgatgctaggattgatcgggctggcgtcgatttatgtcgccgcagtgcacgactctagttcagtaaacgtcacgaagcaggtgatttctcaagtcatgtggttcgtgattgggaccgcgattgccgtaattgtgatgcaatttgattcggaacagttatggcgagtggcaccgattgcctattggtttgggatcttcctgcttgcggccgttttggtcttgtacagtagatcactgtttgcgagcactggggctaaaagttggttcgcagttggttccttgacgttgcaaccgtctgaagtcatgaagcccgccttcatcttgatgcttggacgagtcgtgacaatgcataacacggagcacccaacacatacgatggcgagcgattggcaactcattgggaagttaattgcgtacatggtgccagttgctatccttttgaagttacagaatgactttgggacgatgctggtgttcttcgcgattcttgggggcgttatcttagtttctgggatttcgtggcgattattggcaccgacgtttgccattgtggcggcgattgcggggactgcgttatatctcgtgatctcgcagagtggtcgccatattttggaagctatcggttttaagcaataccaatttgcgcggatcgatacgtggttgaatccgtcgacggacacgtctaacaatgcttatcaagtttggcagagtatgaaagcgattggttcaggtcagattactgggcggggatttaacgtttcccacgtgactgttcctgtgcgtgaatctgatatgattttctcggtaattggtgaaaactttggctttatcggttgtgccgtggtcattttattgtatttcttattgatttaccagatgatccgagtgacgtttgatacgaagaacgaattctacgcttacatttcaaccggggtcattatgatgattctcttccacgtgttcgaaaatattgggatgagtatcggactgttaccaatgactgggattcccttgccgtttattagtcaagggggttcggcgttgattgccaatatggctgggataggtttaatgatgtcgatgcgatatcattacaagtcctacatgttcagtcgtaacgaccggtttgaatagtaaaattattgtaaaggtatggtgtttagtatgagtgaagatgcagcttatttttggacaaaagacgttgatggacatacgcggttaggtttaactaaggccgcccatgaggctcttggtgaagtgaaatatgctgagttaccagctatcggtgacaaggtcagtcagaacagcgcttttctgagcgttgaagcgaccaaagccgtttctgaattcaactgtccaatcaatgggaccgtggttgcggtcaacccggcgttgagtgagaacttcgatgcgttaaatagcgttgaagacggcgttgcttggttaatcgacgtggactaattgccaggccttgacaattagaaacaggctcggtatactcgttacattaacaattgattaaaaaagttatcattttgaaaagatgagtacgcggttatgattacttagagagtccctgattggtgaaaggggattaatcgtgaagctgaagatggtcttgaagtaatgaagtttagtgagcagtcgcaagctaagcttgggtcgcacccattatcatgcggagttcaaagtaactcttgagacaactggcgtgagctagttgtgaagatgggtggtaccacgaggctaagcttctcgtcctattgatgattattgtcgtaattgtctgggatgaggagctttttttgatgcgtaaggaggaattgacttgattgaatttaaagatgtgacgaaaacctttgatgctaagcaaggggcggttcacgccgttcaagatgttaatttaaaaatcgaagatggtcacatttatggcattgttggctattcgggtgctggtaaaagtactctggtacggatgctgaatggcttagagacacccactagtgggtcagttgtgattgatgatgtcaatattacaacgttgagcggggccaagttacgcgcccaacgtcaaaagatcggcatgatttttcaacattttaatctattatggtcgcggaccgttttggagaacattatgtttccacttgaaattgctggtctgtccaaggtggatgcccgtaagaaagccgaacacttagcagacttggttgggttggccggtcgggaaacggcttatccgtcagaattatcaggtggtcagaagcaacgggtcgggattgcccgggcacttgcgaatgatcctcagattttactttctgatgaagccactagtgccctagacccgcagacaactgatgaagtgttggatctgttgttatcgatcaaccagaagctccatttgacgatcgtattgattacgcatgagatgcacgtgattcgcaagatttctgatcatgtcgcggtgatggaagctggtaaaatcgtcgaacaaggaccagtacttgaagtcttcaagcgaccacagcaggctgtgactaagcggtttgttaatgaagaggtcacgccgtcgctgaatgacacaacggtggtcgtggaccagctgctggcgaaatatccaaagggaaccatcgtacaactgacgttccatggcgatcaagcccagctaccgattgtttcagagatgttgaagaagtatccgttagatttaaatattattgagggtgggattcaccaaacccaagaaggggcgattggttcgctgtacttacaactaacgggtgatcaggaacagattaagggcgctctagcgtacctacaaacgatgcgggtggaaacggaggtcttgaaccgtgaatgatcaaggattagattcatattttaaatttgcaaatgtcgattggggtagcatgatgtcggccacgtgggaaacaatttggttgacgattgtgtcgatggtcgtagttgccattctcggaatcgccttaggtctgttactttatgagacggcggggagtcagaatccgctggctaaggccttgaattggattgttgcgctgttcgtcaacgttttccggtcgattcctttcattattttgatcgtgctattattgccggtaacgtctaagttagttggaacgattatcggaccgcgcgcggccttaccatcactgattatttctgctgcgccattctatgcgcggatggttgaattggccttccatgaattggatcatggagtgattgaggccgctgaatcaatgggggcgacccggtggcagattattcgaaaagtcctattgccagaaagcatgccggcattagtttctggaatcacggtcacgacgatttcattaattggctacaccgcgatggcaggagccattggtgctggtggtctgggtaatttggcctaccaagacgggtttcagtccaataacaacgccatcacattagtggcgacggtaatcattgtgattatcgtgtttatcttccaatttatcggggatattgcagttcggcatattgataaacgggttaattaaagttcgtataggaggaaacggaattatgaaaaaaaagggaattctaggattattagcagttgcggcaacggcaattttgttagtcggttgtgggaagtcatcgtcaacaaagacaacaaccattactgtaggggcttcttcagtgccacacgcacaaatcttgaagcacgtgcagccagaattgaaaaaggaaggcgttaacttgaagatcaaagtctttcaagattacgtcttacctaataaggcattggcttcgaaagaattagatgccaactacttccaacacatcccattcttggataactggaataaggaaaataatgggagcctcgtatcagcggggaaggttcacttggaaccaatcggtgtttattccaagaaagttaagagtctaaaagacttgaaagacggcgcaaccgttctggtcagcagcaacgtggctgactatggtcgggtcctgacgttatttaaggatgcgggtttaattactttgaaaaaagggacagatttaacttcagcaacttttaatgacattaagaccaacaaacgtcatttgaagtttaaacattcatacgaagctaagttaatgccaacattctacaaaaataacgagggtgacgcggtcgttattaacgcgaactacgcggttcaagctgggttgaatcctaagaaggatgcgattgcacttgaaaaatcagattcaccatatgccaacattgtggctgttcgtaagggtgataagaacaagccagctattaagaaactaatgaaagctttacgttctaagagcacccagaaatggattgaaaagaagtacaagggtgccatcctgccagtttcggccgactaaacggaccatcttaaatcagaatattgattgattgagctagcttcagggattccctgaggctagcttttttcacggagtttgactacggtaactttccgaagcgggttaatgaaaatgcacgtttgatattatctaagtagtactattgattaaattcttatgagacagcgtcctgcttgactttatagcggttgcaaggtacgctaaccaagttaaataaactacagattggggtttgcagcatgcgtaaatatggtgtgatcgggttaggccaagtcggtgcgacagtggcttatacgttggttcaacaaggaaccgttgatgaattagttttaatcgataagaatgaggccttggccaaggcgcaaaaactcgatttagacgacgcgtcacctcgtctaagctcaaccactaagattattttaaacgattattcagctttggccgatgccgaagtgttgatcgtggcttctggcaatattggtgccattgatatgaatagttccaagggtcgctttggtgagtatgatttaaaccaagcgattgtacgggagatcgcgcccaagattgtggcatctggcttcaagggtattttgatcgatattatgaatccgtgtgacgtcatgacggattatttacaacgaatgacaggttttccacggcaacgggtttttggtacggggaccttcttagatacggcgcggatgcaaaagtatgtcggacaagcagctggtacgaatggtaaaaatgttgcggggtacgtatatggcgaacacggcaactcacaatttgtagcttggtcaacggttagcgtcaatgggcagcctatcaaaaatttcccaggtctgaaccttgatcaacttgaagaagatgcaaggcaaggggcatttgcagtcatggcgggtaagcattatacaaactttgcgattgctacttgtggtgtccgattggcagaagctgtcagcgcggatgcacaactggcttgcccagtttcagcttttgatccgcaatatgggacatacgttggcatgcctgctgtgattggtaaaaacgggattgaatcattaattcaactagatctgaccactgatgaacgagcgtcgttagcagcgtcagcgaagtttatcaagtcgcaagtggacgttttaccgcaagcataagctttttctaagcatggattgaaacatcttgtcattaaacgtggcctaatcagggtgtgcggtgtggacttgggtattggctcaggttggcttcgtgacgtctataattaggtcacgttttatgattgaatggttcttttgggcagacaggcgctgacatgctaaaatagaaggtaaattcgagattacgaggtcattatgcaagcagagaaattgatgcaggttaaggatgcagtgttaaagttaagacaacaacttcgagcgggacaaatctatcagtcactgcccagtcgaatggcaacgctgattaagcagttaccgagtaccgtgacaaccacggtaacgattccgagcgacgaagaggtgcttccactgattgcaacacttcatgagcagttgaagaaaggcacgttgaccgcgatgagcgacgatcaaatcaaattattgatggcacacgttggttcgctgaatccgctggttcgtgatcaaggcgtctactatttgttaaacgaggcattacagcagcaggtactcacaccggaacagttgggcgatatttttgatcagttgattcaagatcagatgttatttgcacacatcgatgagccgcaaaatgatgccatttatcagcggtcatttgcgatactattactgtcagtgctcttgtatgcggaccatgcgggtctcaagtttatgacacccgcgcggctggatctagttgttgagcaaatgacagtctacattttactcgaaaaggatactcgggggtttgtgggcaccaccggttgggcgcatgcgtacacgcatattggtaatatcttagatgaactggcagatgagtctcaactcgcacgtgcggataaattattactgttggccgcattgattgctcgttatcaaaagttaacaacgccgttgatttttggcgagccagaacgactatcgacttatttgaccttgattacaaacaaacatgagctttattgtgattatttgttaactgcgatgaaggactggcatcagcagttgatgatgcatactcgtccggctagtgaagctgaatggacgcagattttcaatcgtaatcgattattggaagcacttgcattacacgatgatctgccaacggccgtcgtagattatttggatgatgaattagaatttttaggttagttttggaaggaagtcttttgaatgcaggcaaaagcagttggattaacgcaagggttgccagtgagcgatccgaatagtttacaagatgtcaccattaatgtaaatcaacctcgtggccgtgatatcttagtagccgtcttagcaaccgcagtcaatccaatcgatacgaagcagcggcaaggtcaatcgccagtgacaacgccgcgaatactaggctttgatgccgttgctaaagtgttggcggtcggtgaagcagtgacaacgattatgacagatgatgtcgtttattatgctggcgccgtcgatcggccggggagtgatgctcagtatcaattggttgatgaacggttagttgcgtgtgccccgaaaacgtggtcgccggcgcagtcagctggtctgccgctaacgacactgacagcttgggaagcattgtttgaaaaattaccattcactgcagtggctgacgcgaatcttggtcagagcgtccttatcatcaatggtgctggtggggttggctcgatggccatccagttggcaaagtgggcgggtcttcaagttattacgacgactggtaagccagaaaccactgaatgggttaagcggttaggtgctgatatcgtcttagattaccatcaagatctgggatcgcaattagctgcggccggtttgcaggctgtcgatcatgcgatactattacactctacggatcaatacttgccattagtgacaccgctagtccggccacttggcacgatcgtcgccgtagtgacaaatcagcaccccttgccaatggcgttactaaagccgaaaagtttgaattttgcttgggagtttatgtttacgaaggctaactatcagttgccatcgatggcgacgcaggggagtattctggcacaggtagcgcaactggccgatgccggggtgattgtaccgacgaccaagcggactttagctggaattaatgcagcaaatttgcgaactgcgcacacaatcgtagagacggggcaaatgttgggtaagattgtcttgactgcgccatttgacgcgtaaaaaacaacgttttattgtaaaaatgttttcaattgtgctcagatattgtagaattaactaagccgtagtatgaaataaaccttgataggatgaacaaaattatggagacacaaaaaaagatccatgttggtatgttgtttggtggtaactcttcagaacatgatgtttcgaagcgttcagcgcacaacatttatgatgccatggacaagaataagtacgagattgacttgtttttaatcacgaagaacgggattgtcttgagtgatgctgcaactcggcgcgtatttgatggtgaaccagaagatcaagtcgtcgccgaagaaatgccaaagttggacatgagtgatccattagctcccatcaagaacctgacactggccaaagatattgatatcttctatccagtggttcatggtaacttaggggaagatggtactttacaagggctgttcaagttattgaaaaagccgtatgttggtagtggtgtcttagcgtcggcagctagttttgataaggatattacgaagcagattttaacgcatcatcatattcaaaacaccaagtacgtggtggttacaccggaaaaccgggaccaaatgacgtacgcttatttacaagtccacgtgggtgatcatttattcattaagccagccaatcaaggatcgtcgattgggattcataaagctgagaatgaacaagaatacttggatggtttggccgatgcgttcaaatatgactacaagattttagttgaagaatcgattgacaatccgcgtgaagtggaatgctcgatcttaggcaatgaaaatcctaaggcatctaagcttggtgccattgatgtgccgaagacggacacgttctacgactataataataagttcgtggatgcgagtggtgtgacgttcgaattaccagtcgaattaccagctgatttgacgaaacggattcaacagatgtcgctagacgcgtttaaagcgcttggtctaaaaggaatggcacgcgttgatttcttagtgtctgaagatggtgaaccatacttgggtgaaatcaatacgttacctggttttactaacattagtttatatccaaagctatgggaagtttcgggcattagttatacggcgttgatcgatcaattgatccaacttggttttgatgaattcaaacgtcaatctgatattcactatgatttcgttgcgttagacgcggaataagatagtaatgagttttgtggtggttgggatgaagcgattcatcacggccgcctttttttgtgaggaggggtcaggttgttaagtcgcggatggcacttagtgatgcagggagcgcgccaactggctggaccgctagcctgctggtggttggccggcatattgctggcggtactcgctaaggtgctcgggattctggtcggtggggtagtcagcttgctaggcttgttgcttttgagtgcctggttaccagccatggtcgctcgtagtaatcatgagtcgtggcaggccggtcaatttttgtatcgctgggtgctgttaatgtttacggcggtgtggtggttaccactcggttggttaggctatttagcaactttacaagcgagcatacaattgccagcgactgttcaaaatataatctttaatacgcgttatgactggcttcctgtggcgggaccactttggctgttgggctggctgattagctggaagtggttaccagcactccaacgccaattgaccgctccgaccagctggcgtaattattggcgaacgggttggcggatttcctggtggacagtctttaaaaaaagtcgaaatgtgtggctgttcctgattagctggctcgttatggcaatcattggtggtggcatagtgtgggctagtggcgctgttagccagctggtcagtcaatttgttgcagttttcatgatgactgtgttgcaactgctggcttggttaatgtttatgggatggtggtcgcgcctttggccagaaacagcaatcgccggtcactctaactggcaaactgggctacttacgttgaccggtttgctagtcttgggtggttacgcaggctggtggctaggaacgccaccaacggcgccgctagcaattattgcacatcggggtgttaatggtcgtgacggtgtccaaaataccacagcggcgcttaaaaggactgtaaagcaagttcagcctgatatggtcgaaatggatatccagccgacagcggatcgccactgggtcgtcatgcatgatccaacgctgaaagctttagcgggtcaacccggtcccgttcatgagtaccccgttgataagttgagtggattaccactacgggagcatggtcaaaaaggctacttgagtacgtttaagcagtactttgcggtggcacacaaattacagcaacctttattagtcgaaatcaagtcagttgggacggctgatcaactaatggggatttttgccgacaactatgcacaacgactgatacaacaaaaaggggcggtacactctttggactatcgtgtgattgaacgattacatcaacgggcggcgcaactaccggttggcttcataacgccgttttatctgacggatttttctaattccgtcgcgggattttattctttacaagcactgaccgcgacccgtgagcagatcagtgcggcccaccgccaacatcggatcgtctacttctggactgttgatcggccgcttgcaatgcagcgactgacggccatgggggctgacgggctgatcacaaatcgaccgggccaactacgaagattacagggtcaatctaagcattattatttttatcaattgataaattggttagttagttggttataaactactgaaagaagtatgagaactaatcttaattattaagccacgtcaaccgattaattgagggtgtcatgacaattgatgtttgctgttaataaggttaattcgctcccctttaaatcgctttcagtagttctcacttttaatgaacaagtccttgattagggtggttaacgaactgtaagcctggataattaataaatgaccttcggccgatatcatggtataaacttaatattaaataagaattacgcgtatttcttgctaaaattccgttatgtgaatataattatatgcgtaattggtattgtccaattggttagtgctcaattattcgaacggattaacgaggattgattaggtgtcacgatacccttgttcatttagtgggggcagcaaggggagttacaaaatgagtttggtttaaggcaatcaatgaagaggggttaagcatgagaatattaggagaaaaagtgcggcagttcagaaagcggaagggcatgtcgcagaaggaactggctgatgggatttgtactcaggcaacgattagtctaatcgagaaaaaaagtaaaattccaagtatgaagattatgatgaaaatttgtaatcgattaggaattcgtttatcggaagtcattattgaaaatgacgaccagttatatcggaccttcaaaaaaattgatactttgattcgacatacacaactggaagaggctcaggatgtgttccagcatatccgtccgaagcagttacgtagtaatacggataagaaacagtattattactatgagggctatcttcaattagtgctcaatgacaatgctgacgaagccatctttaactttgggatgttgcttaatcagttcgtcaagtctagtcacgatatgtttgccatcctggccacacttggaaccggcttagcttatgaacgtaagcaggcctatgacaaggctgaaatttttgtcaaacaggcagttgctaccttacacacaatggatgcgcaagcaatgccgatgggtgacgacgattacttacaaaatgaaattttgatttacgcctcagccgcacaattgtatgctaagatcaattttccagaggaagctttggagttgatcgacttggcactcaagaaggctcaggagagtcagtcactttatttattagaccgtttgtatgcacaaaaggcggccaatgaagttgttttaaataatgtccagtcagcgcatgatcactattacgtggcgtatgcgttaagtctggtgacacataacagtagtttgaccgaaaaaatcacgaaagaaatggccgagtaccatattgcacccttgcaagtggctaacgacgcttagataacgtgataggacagttagcggtgaacggccgcgcttaatgggagatattgcggttcccattaggcacggcacaccgctgactgtcctatttttaataccggggggaatgtgaagatgagttgtcaaaactgtggttaccaaaattcaccgcatgccgtgacttgcctaaaatgtggtcatcgtctaacgccagtgaatggtgatgtcaatcagcaaagccgagtccagcggcggcgtcaacaatcacggcggacaactttttcgagtcgctttaggccacaaacactccttggggtattaattgcggggttactattgctgggtggcggctatatcgtgggacaactattgtggtcgtctacgacatcggcaactgccgagtcggcaggtaaaagccaggtgcataagccggctgccagcgattctgacgcaccgatgaaggcaacacagacatttccgactacgacagttactgatctggttgcgcaagcaacgaatgggttggctggtcaaacttcggtagcggtgatgccattaacgggtagccagaccgtggttttgaataatcgagcgcaacgtgctggcagtttgatcacgttatttattatggtcactgcctttgatcaggtccatcaaaataattggcgcatgcaggatcgttataccctgcgtgctgccgataaagttggtggaaccgggacgttgcacacattaccagctggaagccagttgacgtatgctgaaatcacgaaacgcatgattacggagagtgataatacggctgctaatatcatgttggatcgtgttggcggcttctcggcggtcaacacggaaattgcacagttgggtctgactgatacaaaaatggctcggcggttaatggatactgccgcactaaaggccgggcatgataacgatacttcggttcgggatgtggcaacggtgctgaaacgactggcgaacctgcgtttgatctcgaacaaagccgatcacgcgatgttaacgattttgaaggcgaacacggatcacagtaagttggtcaaaaatctgccaacacgcgcgacgatctataacaaaactggggactatcaagcatacggtgttcaaaatgatgcggccatcgttcagaatcgtcagggaacttttatcatgacgatgatgactgctagtggggaacgtaccgcgcaaacggtcgcgatgaatgatcttggtcaggcgctttaccgggcaattttagagcagtaagtggtatgattttggcaaatagtaaaaaatcggccagtgaggtaagtaacttcactgagccgatttttattgtacgtgtatcaaaagattactttttctttggtttaggagctggcttattttccaagtcagtccggacaacgagaacgtcacaaacagccatccgagtgacatattcggtgactgacccgatcaataagcgttcaaccgcgttgagaccagttgcgccaatcataattaaatcgatgcccatatccttaggaacgtcgcgcgcaataatcgtcttaggtgcgccatattcaatcgaataatccacgttatctaagccgtccgccttagcttctgcaacgtacttgtccaacgttttttgagcagtatcggtcacttgttcaaccatggtcgtatcaaaactagaaatgttttggaaagcacgggtatcaaccacgtggaccatgtgaactgaggcgttaggtccgttccgtttcgcgacggcaaccgcctttttaaatgctaattccgcttcataagaaccatcaacaggaactaaaatgtgttggtattgttgtaacatcattctcacccctcattactttataactatattgtaaaggttttcgcaaaaaataaaaagcgttttctatgagatttgcatgaaactcactaaaattagtgcaattgccatcataatcagtgaaccgctagccagtacaatggcaattagcattgtcgcttgaacaaagatggtcacgaaacaggcgatggtaactagtaacattaagccgccaccatagcgtgcgacgtgtttgattgtcggcgctttgttcgggtcaaaaaagagaaatggtcgggactggtgcgtcagcagataataactgagccaacccgcaatgagcgtgtatatgacaagcagtaatgtaatcaaaatgaacctccaacaggtgatgttaatcttattttagttgattccggaagagaagacaaatgcaatgctagctaaagataagcgattagtactagtagttcacacaacacaatttagcgtcaaatgattgcgacacacgtcatgctggttttatgaggatgagtaattgttcaggagtgccggattgttgcagaaatacccaaaccagcgtgatggactgtatttcagtagccgagattagtcatgtataaccggcttcccaattaaccattctccccatgagttttggacggtgttagtaaaatgacgttgtgaacttgggtcgctttcacgccacaaaaaaaggccaggaacaagtcctgaccaacggaagtaaacttccggaaaaactagtggtgccgttaatcgcccttcagtattgacccgctttaaggcaggtgggacgttctgactaattcgctaactaccaaaggataagacatgttatggaattagctaacggacatcccaaagtagtattaattgttcggcaacactttgtttagagcaatgcgcacaccttagtaatttcgactcttagtctagcatataaaaataaaagttgcaattattagcacaaccaaggtattgttagcgatttctctcgttagcctttaataatttttcgtattgttgcgcaagggctgtttcgtagcggccatttgttttgggctcgtaatacttggctgatttgatggcatctggtaaatactgttgagcgacccaatcacccgggtgatcgtgtggaaaatcgtatccaacaccatgaccgagtttggcagcgccttgataatgcgcatccttgatgtcggccgggatatcaccgaaatggccgtcacggaccgttgtgagcgcggcatcaatggcactgatccctgaatttgactttggcgataaggctaattcaatcacagcgtcagctagcggaatccgtgcttcaggaaatcccaattgatcggcagcttgaacagctgcgacggtgtgggcacacgcggctggattagctaatccaatatcctcataggcaatcaccatcagccgacgcataatactctttaaatcccccgcctcaactagccgggctaagtagtgtaatgcagcgtttacgtcggaaccgcgtatggacttttgaaaggccgagatcacgtcgtagtgggcgtcactatctttatctgcggataaggctttcttttgcaagcattcttcaatcgtttgttgtgaaatggcgatggtgccgtcatcggccggagacgatgataatacggccaattctaacccattaagggcactgcgcaaatcaccgttggtagcggtgcacaggtggtgcatggccgcgggtgctaaatcaacgtggtaactgccaagaccgtttttttcgtcagcgagggctcgttccaccgcgtgctgaatatcatcgtcagtgagcgggaaaacttgaaagatctgcgttcgactacggatggctggattaatgctaatatatggattttcggtcgtagcaccaatcaaaatgatgcggccactttctaagtgaggcaataaaaagtcttgtttagttttatccaaccggtggatttcatccagcagaagaatgaccgtcccgctcattttggcttcttcggctacgatttgaagttgttttttactgtcggtagctgcattcagcatgcgaaaagcatacttggtggaaccggcaatggcactcgcgatactagtcttgccagtacctggtgggccgtatagaatcattgatgatagtcgtttggctttgaccatccgggcgatgatcttgcctgggccgaccaattgttgctggccgacaacgtctttcagcgtttttggtcgcatccggtaggctaatggttgttgcatcgtttgaaatccctccttgcaaaactagtcccaactattatagcatttacaatgaaggacaccgaataatcagtttaacgaacaaaataattataaaggattgatcattatggaattagatgccgttggtaaggcaattgtacagtatcacttagtcccactcgttcatcaggctaatttaggactagaggtcaccatgcaccgggtggacgaccatggtcacttagcgacgacagcacacccgcaagcgtttggatcagcgcaacaaaatcatcagttacgtccgggcttttccgcaagtgctttaaagtttactacgccggtacgtcgtgacattcctgcattgatagcgtatctgaagggcttgaataccgcagcacggcggtcactcgatgcggacgaacgactttggccactgtcgagtacgcctgtgttgccggatgatctaacgaacgtgccactggctgatgttgatcaagtcagctatcagcgtcgtcgcgacttagctcgtaagtatgagttacagcgattaatgacgactggtagtcacgtgaatatgagcttgaatgaagctttattcacccgtttatatactgagactttccatcagcagtatcacagttatgttgactttcgcaatgcaatttatctgaaagtcgctcagggattggtgcgcatgaactggctgattcagtatttatttggcgcttcaccacgcctagccgttacggatactacgagtcgtccacagcgcagtagtgttcaacatcccgatggtcgctacagtcaagtgacgggagactatacgtcaattgatcgctacgtggccaagttgacggcggctgttcgtcaacagcagttgttgtcggtcaatgattttgacgggccagttcggcttcggagtaatgggcagctagctatgatggcccggcagggggtctattatcttgaataccggggcttggatctcgatccaactagtccagtcggggtggacgcgaacgcggtggcatttgttcgtttgttggcgagttatttcgtaatgatgccggtacttccagctaagatggtatcccaagtcaacgctcaagctgaccaattgacccgtcaagttttgggtgaaaatccaacgacggctagtgctcaggccgtgccggctgttcaagttttagatgcacttgctgattttgttaaaacctatggcctaccaaatgaagatgccgtgttactcaaacagttgaagtcgcgggtcactgatccaaagaagacgctgagtgcgcagattgccatgcaagccgatccgttagcatgggcactcgaacgggctgcacgctatcaggaatcgagcaatgaacgtccgtttgaacttgcgggctttaccgcgctagatctatcgagccagcaactagcccagcaggccttgacgcggggagtgcaggtggacgttgttgacccacacgctaacattttacgattgactaagttaggacggtcgcaattagttgtgaatgggagcggaacggatttaaatccacaggcgctaacgaccgtactgacacataaagcagcggccaaacaaattctggctgagcacggggttccggtgccggcttcacagacatatcatacagctaatcagttgattgctgattatgatcggtacgttcaagctggtgggatcgtattaaaagcggcggatgagtcgcacaaagtaattgtctttcggattatgcccgaacgcggactgtttgaacaagtcgtccggcaactatttgagcaaacgtccgcggtaatggccgagaaagtggtagtcgcatcaagttatcgctttttggttatcgatggtcgtgtgcaagcaatcgtcgaacgaattccagccaatattgttggtgatggtcgctcaacagtcaagacgttacttgaccgcaaaaatggtcgagcgttgcgcgggaccgcttttaagtggcctcaatcagcgctacagttaggaacgatcgaacggtatcgcctggactcatatcacttgaccttagattctgtggtcagccggggaactcaaatcttattacgagaggatgcgacttttggtaacggggcggacgtgttagacgcgacggctgatatgcatcaatcctatgtgcaggcggtggaaaagctggtagcagacttacacttagcggtcgctggggtcgacgtgatgattcccaatctctatgccgaattagtgccagagcatcctgaaatggcggtatacttgggtattcatgcggcgccgtacttgtatccgcacttgttcccaatgtttggtactgcccaaccagtggcggggcagttgttggatgcattgtttaaaaatgaagattaaaaacaagaaagctggccttgtccagcttttttgatagctcataattaagtgtcatgattgaaaacacctatttcgaattttatctaaatatctcttgttgaattcctggttgcctgttatactctatttagatatatatctaaataggtgattggaggtagcccgtatggcgttgaatacgacctttaaagcaattgcagatcctgtcagacgccagattttggaagatttacgccagaatcggcaatcggctggtgagattgcggctcatttcaagttaagtaatgcaacggtgtcttatcatctcaagcttttgaagcaagctggtttagttaccgtgaccaaggaaaaaaattatgtgtactatgagctaaatgcgagcgtatttgaggaaatgttgacgtggctatatcgttttagtccaaagcagggggatgaaaagtgatgacaaaaaggaacttgcagttgtggctgagctatattgttattctgttaccaatgagctacggcgtcgtgaattatgcggccttgcccgccaaaatggctattcattttaatttggataatcaacctaatggaatggccgcaaaattattagtggtcgttggctttccaattatgatgatggcgtttcagctgatttgcgttggggtgacacggttgaatgccaatcataaggcaccggcgccacggtttgaacagatgatcatttggatcgtgcctgtactatcaagtgtgatctatgcgacaactatcagttataacttagaccatcaattggatatttggcgtattgccgttagtttgattgcctttattttcatggccatcgggaattatttgccaacaatcagtgcaaatcaatacgcgcagatgcaccgaggtggtcacacgattcggccaatgatttggcggcgtgttcgttattggttgggctatacgctagttggtggtgggatattgttactactgagtatcgtcacaacagcatgggtttcagtcagcctcatggggatcattgttgcggccttagttatcatgagtctttatggcactctagcgcgtaattaacgcagtcaaacgtaaaaaggtcctcatccgtgcgtggatggggacctttgttgtattaaagtaactttttgaatttatctagcaacccaggtgttttctcggcctggggtgttgctgatgaagcctgcgagggataacgctgcgcaacatcaataatatcttggttaatggcgcttgcagcagtgaatacaagcgcgtaatcatcatcagcagtgtggtagatgtcatccgttttgatagtgaatttgatattggcttgactagccgccttgatatacggcccaatcagttcctggtctaaattaccattaatatataattggtcatccggatggctcgtaaatgcttgatgaagtgcgtcgacgtaattggcctgtttaatttgggcaacggtcactgcgacttcgacgcgttcccgaaaggtccccaggtacttgcgttgttcgtcgggatgcaactttggcgtcccgtgcatggccgtttcgatgcggtcaactggttgtttatctgtttcagccattgtctaacatcctttccttgatagtaattatcattgtagcatgttcctccaataatagcgaagggaaggggggtagcgttgcgttagtgaatgcggtatggttaatctaaattagttttggggatgataaaacttgtttacaaatcaagattttgaaatttttaatgaccagacgttagcgggccgcatgcatttaatcaaaacggtgatcgatcctaagttcgaacaggtcgcaccaacgattatagcgagtttacaaacacctagcgagccaccgttctacgcgcacgttgccaaacatttacggcgatttaagaatccaccggtagacacttgggtcgcttttagtcaaaacaaacggagctacaaagcctggccacattttgaattggggctatggcctgaccgtttgtttatctattttgatattttggatgagtgtaaaccggccgtgcaggcaaagatgcaactcgcagatttaacaccacttttgaaggccttgccggcgggctatgttatcagtaataatcatggggtgccggccacgcaacttgcaacaccggccaatattacgcaggccatcaagaaattcgatcagtataaacacagcgagttggtcgtgggccgcgcagtcttggtcggtgatccgttatttgaagatgctgatacgttgaataaattgatcatcacaacattcaaacaattattgtcgatttatcaaccggtcatggcggctgtgagtgctgagcgtcaggtctgaaattaacagaacatacaaaaaaaccgccgcaaacgcgacggtttttaaataccggaaattaaagtttgttgtagtattcaacgattaatgattcgtcgatatctgcttcaagttcttcacgttctggtaaacgagttaatgagccttcaagcttatcagcatcgaattgaacgaagttagggcgtgcaacaacggcttcaacagcaccggtgataacagccaacttcttggacttttcacgaactgagacaacttggccgacactaacttcgtatgaagggatgtcaacacgcttgccatcaacagtgatgtgaccatggtttactaattgacgagcttggcgacgagttgttgctaagcctaaacggtaaaccatgttatccaaacgacgttcgagtaagatcatgaagttaacaccatgcttaccttcgcgaatcttaccagctttgatgaataagttagcgaattgacgttcagttaaaccgtacatcatccgtaacttttgcttttcacgtaattgtgtaccgtattcagaaagcttaccgcgacgaccttggccatgatcaccaggtgcgtaaggacgacgagctaactctttaccagtacctgaaagggacattcccaaacgacgggaaattttccaacttggacctgtataacgagacataaaatgtttcctccaataattttagttggagtaaaataatccgatgtaagttcgatattcgttcagattggactgcaggtttcaccattgcagccgcaggttactaactgaccaaaatattggcaccaatctgttgacgagcttacccactcactgctgcattattttacacaaagagtagcataacacgtttaatgctgattagtcaatgtgtgacgtcagaatcgccacaaattcggtcaattcagcttcgttatcagcattgaatcggtctaatgatggagagtcgacgtcgagtacgccgatttggtggccgtccttggtgattgggaccacgatctcagagttgctggcgctgtcacaagcgatgtggccggggaattgatggacatcggctacccgttggttcgtttgcgtttcaaaagcagttccgacgacaccagccccaactttgatgtgcatgcaagcgactttgccttggaagggacctaagtcgagctcgccagtttgttcgttaaataagtaaaagccggcccagttaaggttgtcataagtactgttgaggagggcactagcattagctaagttcgcgaccaggttagtttcttgaaacagtagggcgtcgagttgttggttcataagtgatgtttccgtggtagccatgtaaaaaatcctccttgaatgttaataaattgttactgtccgttagttacgtctatgttataatttaagatagattttaattggattttcagaaaaaagcaaggttacggttctcaacagggtgaggcgcaacgcaattaaaacggaataaataatgtaaggggtattcgtatgcaagtagcaatcggcattgttgtggttgcgattgtcatctacgcggcggtcaaaggctttcaattttatatcgacaagcaagtccgtcaattgacggaacggcaacaggcgctagtcaagcaatcgcagaccacagatttcgaaaaaattgaacaactcggactaacgggcggatcgttagcgaagttggaagcgttgcagagcgctggtcaagaagttgataatgatcagttacccgccgttagtgagcaattaacggccattacttcgcaggcgcggggcatcagatttctcgatgctcagcagaatctgaagaaggttgcggccacattagatacgattgaacaacgacaggcagaaattcgtcagggcttgcaggccttagatgacgcggatgccgcgcaccgccaagcagtggctagtttagagaagaagtaccaaaacatacggaagacgttattatcgcaaaacttttcatttggtccgagcatcgacaaattggaggatcagttagctaacttagaaagtgattttgatcatttttccgaattagccaaggctggcgatcatgacgcggctgaaaaggttttggatcagttacatcacgatactggcactcttgaaatggatattgatcggattccaccgatttataaggacctagtgagtgggtttcctgatcagttagccgaactggctagtggttatcaacaattaacggctcaacattttcactttgaggtcgaatcgattgatccagaaatcaaagcgttacagcaagcaatcgacgataatattgcgttacttggtgatttgaaagttacggatgctgaaaacggcaatcatgcgattgaaaagcggatcgaccacttatacgacgtgatgcaagcagagatcgatgctaaggccgttgttgatcaacaacaagaagaaatcagtaagttcttgacacatgccatgaatcagaatcaccgcttacaaattgagttggatcgattagcacaaagctatacgttgaataatggcgaagttgaacggacgcgtgaattgaacgaacaactgaagaatatcgaagctgtttatcaggcggacgtcacagctattactagtaagcaagctgtctttagtgagatcgcagctcattttgccgaacaagatgagcagttgaaaggcattgaagaagaacaagtggcaattaacaaaggtgtggcgagtttgaccgctgaagagtccaaagcccacgagacgctgcaacggttcgattttgaaatccacgcgatcaaacgccaggttgaaaatttgaacttgcctggactaccgaaagactatttggactatttcaaagtagttgccaaggaaatcgaacggcttgaccatgatattaataagcttgtgatcaatatggaagacatcacgaaacagttgattgttattcaggcggacatggcgaccttaaaggaaaagaccagtgatttaacggatgctgcggttatggcggaacagctcttacaatacgctaaccgttacaagacgaatcatgaagaggtgcaagaagccagcgtggaagcacaacggttgtttaccgagactcatgactacgcgcggagtttagaagtaattgcaacagctgtggataaagttgatccggggtcctataaacggattgaggacagttactatgcgaacaaacaagctgataagatgaacgatgaggcctgacgaggatagttgggaccgcccatatgcaaaattttagttaactgaaaataaccagctggtggtgattgttaaatgacaaccgccaccagctggtttttagttggcatcatgatgcaagtagtcgtgatggttctgagaagggtgactgggaacggccaacaaaaatggtgtttaggacgcaattgtcgtgtgattaatcagaaatttgaaacaaaaacccttgtttcactagtaatatttggtataattgcaaagaattcttatcgaaagtaagtgcaatgcacactttcttggaaagagaaggcgtagtaatgatttattttgacaatagtgcgacgacgcaagctgctcctgccgtactggagacgtatacaacggtttcccaaaaaatttggggtaatccgtctagtttgcataactttggtgaaacggcctttcatttgttggaacaatcacgtcaacaaattgccggcttactaggtgtgcaagcccacgaaattttcttcacgtctggtgggacggaaggcgataattgggttttgaagggtacagcgattgaaaagcgggcctttgggaagcatctaattaccacggcggtggaacatcctgccattcataattcgatggaacaattgaaggaacttggttatgaagtgacttacttaccggtcgatcaggaaggccgcatcaacgtggcggacttgaaagcggcaattcggcctgacacgattttagtgtcaacgatggcagtcaataatgaaatcggtacgattcagcctttacttggagtggcggaactactgaaacaatatccgaaaattcattttcatattgatgcagtccaaggaattggtaaaggaatccagaacatgatcatgaatgaccgggtggattttgtgaccttttcagggcacaagtttcatgcgactcgcggggttggctttatttacgcgcgcaatggtcgtaagttagcgccattaatgaatggcggcggtcaggaaagtaactggcgttctggaactgagaacttaccagcaattgccggcatggcgaaggccctgcgattgttgctcacggatgaagatggtaaggtagctcgtgagcgagctatcaaacagcgaatctacgagcacattaagtcgtttcctaaagtgacgattttcagtcagccaacgacggggttcgcaccccacatactgtgttttacgatcaacggtgtgcggggcgagaccattgttcacgcgtttgaagatcagggcatttatatctcaacaacgagtgcctgctcatcgaagaaacacttggcctccagtactttaatggcgatgcacgtgcaagaaaacattgcgacgagtgctgtgcgggtcagcctcgatgagaataatacgctggcagaagctgaccagtttattaaagtatttgatcaactttatcaaaaattctcaaaaattaatgcagacgcataacggaaaggaacttgttcatgcagtacactgaaatcatggtacgttatggtgaactatcgaccaagggtaaaaaccggcggaactttatcgatagcttaggccgtaacgtacgcaaagcgttgcacgactttccagaactaaaggtccacgcgaaccgtgaccggatgcacatcatgttaaatggtgaggatgccgataaagtcatgggccgtttgaagctagtttttggaattcaaaacttttcaccaagtattcgcgtcgatgccgacatggatgccgtctatgaaacggcgattgcgatggtcaaagcccagtttaaaccggggatgacttttaaaatttacacacggcgctccgatcatcagtttgaatacgatacaaatcaaatcaatgacatgctcggtgggcaaatcttggaccacgttgacgggattcaagttaagatgaagaatccggacattgtgttacgtgttgaagttcggttaaacggtatcttcttatcatcagaaacgattcagggtgccgggggattaccggtcggcaccgctggcaagggaatgctgatgctttctggtgggattgattcaccagttgccggctaccttggcatgaagcgtggtgtggacatggaaatggtccatttcttcagtccgccatacacgagtgaacaggcgttagcaaaggccaagcagttagcgtcaacgctagcaagttactctggtagcgtgaagtttattcagattccattcactgagattcaagaagaaatcaaagaaaaagtgcccgagggttatcttatgaccgttcaacggcgcctaatgatgcgtttgatggacgccattacgcgtcaacggcatggtaaggcgatttttaatggtgaatcattagggcaagtggcttcacaaacgatggatagcatgattgccatcaatgatgtgaccaccttgccggttttgcgcccagtgatttccatggacaagacggaaattattaagattgccgaagatattgatacctatgacttgtcgatcatgccatttgaagattgttgtacgatttttgcgccgccagcacccaagacgcatccgaagctagaccgttcacggtcctacgaagaacggattgatgttgaaggactgatggcacgcgctttggctggtgttaaaatgactgagatcaagccgggtgaaaattatttgaatacacaagaagacgtttttgctgaactattgtaggtcaaaaacgggtgatattattaccctaaaaacgagtacccggtaatactgggtactcgtttttttgattttttggatgatcaagcagggacgcgcggaagctcatttcgtaatggtaagtcagctaaataataggtcataatcagcgaaccaaggtcgtgactatgctacgataaatttagattgaatcagcgaggtgagtggatggagtggcaacaattattaatggaaaatacggcgttgatcaatgcacaggttgttcagattgggctggaacgggaaggccagcgggtaacggtgaccggtcatttggcggatacggcattatcaccaacacttatcagcgagttgtccggcctgcaacgggactttgcggagacacagttggagttagtcacccaaccgcaagcaagtgcggttgctgcgttgcacgccttaacgatgctcacacaacaagtccggcaaaggcttctgcctgaactgatttggccgctaagcatgccgcccacacttccacgagaagaccgggatattccaatcgctaagttggatgcggccgctgtcgcctatcgacaaggacttgctcaccgctatggccgacgacgtcaaatgttgtcaggtgttcactgtaatgtgagcttggcggctagtctgatgatgggattgtatcaggcccagacagatagtcgtgatttcaccacctttcaaaatcactgttacctgcacattgcgcagaattatttgcactatcgctggctactgacgtatctttatggctgctcaccatgctgctggccacagtctggtcttacgccaccagcccagcccgttcgaagcttacgcaacagttctagcgggtataccaatcggccgggtgttacggtctcgtacgcgtcgttaaatgattattgtcaaacactgcaagcggccgttgataatggaaaattaagtgcgaccaaggaattttacggtcaggttcggttgcgtcatgctggtggtcattcacaactatgtcaggatgggattcaatacttggaattacgtaacttagatctgaacccatgggccggtgcgggcatcgatctgtcccaactgacctgcttaacgtggttcgttttactgatgctctggttaccagtgccagctagtacggataattggattcaggcgggtcagcgcgccaacgaacaagttgccatcgaaacccccatgcaagtgactcgacagctaactgaaggcgaacaactagctgacgcgctacaaactatggctaccagtttacatcaaccacacgcgttgcaagtcgcccaacatatcttaactagtctgcacgacccggccaacacactcgctgcccgctgggaacaacaaacaaacgattcgctcgaacgtgcaacccaacttgcactccagctggctacgacaccacattttaatgcttgaatatactgaaatcggcgtacacacgtgttggcacgttaggacgcacatcggctgacgaacaacaaaccaactaataagcacgtttaaaccatgactaacgtcaaataacgcgtcgcatgtcaagaatgataatttttgagacgattatttgcgcggaaactgaaattgcgttaaatttgagctatactattactaccacaaatattagaaaaccattagttatcgaaggggtgttttacgtgcaagtattatttcatgatcaagcattagacttagtcggtgaaccgttacaagatggtgaccagttaccgaagttcaaagtgttcactacccatgatgaaaagattaagactaaggacttgctaggtaagcctgtcttgttaagtgtgatgccagatattgatacgcgagtttgttctattcaaacaaagaagttcaatcaacaggctgataagtacccccacgttcaatttttagccatttccaataacgcggttgctgaccaagctggttggtgcgctaaggaaggcgttaagaacttaacggtggcttccgatgaagaactatcctttggttacgccaccaatctatacttgcccaacaatgggacgttgacccgggcgatttatgtcgctgatgcggccggtaaaatcgtttatcatgaaatcgtgccagatgttagtcacgagccaaattacgttgcggcactggatgccctaaaacaattcgaataaggattgacggcactcaggaaattcattacaatagtgacaaccagcaatgagcaagagagtagcgataaacaacgtcaacagagagagcgtgaacagtgaaacacgcttggcggttttagcgtgaaggtagcttgcgagctgctattctgaactgttttagtaggaatagccggacgggatacaccgttcgttaacaacgatgtttaagctgtaaagcgatcacttgtgatggctttaaaattaggtggtaccgcgaagtccattcgtcctagtctaataggatgagtggacttttttagtgccaaaagaaaggatgtgccccaatgtcagaagaaccaactactgatatgccaactaagtatgatccgaccgccgtggaatcaggtcgttatcagacttggttagaccaagatttatttaagccttcgggcgacaagaaagctaaaccctattcaatcgtgattccaccgccaaatgtcacgggtaagttgcatttaggccacgcttgggataccacgttacaagatattattattcgtcagaaacgaatgcaaggttttgatactttatggttaccaggaatggatcatgccggcattgccacacaggcaaaggttgaggccaaactgcgcgaacaagggatcagccgttacgatcttggtcgtgagaagtttattcaacaagtttgggattggaaagacgaatacgcgtcgattatcaaacaacagtgggctaagatgggattgtcattggactattctcgtgaacggttcaccatggatgatggcctgtcagatgcggttaagaaagtcttcgttgatctttacaacaagggcttgatttatcgtggtgaatacatcatcaactgggatcctcaagcacggacggctttgtctgatatcgaagtgattcataaggatgacaagggtgcgttctaccacgtcaagtacccatttgctgacaaagactatactttcaatggtaaacattacattgaaattgccacgactcgtcctgaaaccatgatgggcgataccgccgttgcggttaatccgagtgatgaccgttacaaggaattggttggcaaaaaagtcatcttgccattagcagaacgtgaaattccaattatcgccgatgcgtacgttgaccctgagtttggaactggaatggtgaaaatcacgcctgctcatgacccgaatgactttaaagtcggcaaccggcatgatttgaaacggattaacaccatgaatgatgatgcttcaatgaacgccaatgcgggtaaatacgaaggtatggaccgttttgaagcacgtaaagcgatggtcaaggatcttgaagatcaagatttgatgattaaaatcgacccaattgtgcatagcgttgggcattctgaacggactgatgtccaagttgaagcgcggctctcaacccagtggtttgtaaagatgaagccacttgccgaacaagctttgaagaatcaagagggtgacgatgccgttgactttattcctaagcggtttgaagatgcctttaagcagtggatggaaaacatccatgattgggttatttcacgccagctctggtggggacatcggattccagcttggtataacaagacgaccggtgaaacgtatgtcggtgttgatggaccaaaagatccagaaaactgggaacaggatccagacgtgttggatacttggttctcaagtgcactttggccattttcaacaatgggctggccaaacactgatgcggaagactttaagcgctatttcccaacgaataccttagtgactggctatgatattttgccattctgggtttcaaggatgattttccaaagtcttgaatttacaggaaggcgaccattcaagaatgttcttttacatggcctgattcgtgatgaacatggtgttaaaatgagcaaatcactcggtaacgggattgatccaatggatgtgattgaaaagtacggggccgatgcattacggtggttcttatctaacgggtcgacggccggccaagatgtgcggttcagctatacaaagatggatgctgcatggaactttattaacaagatttggaacgccagccgttacgttatcatgaacctgggcaccatggacaaaccggaattaccagctgcaagtgactggacgttagcagataagtggattttgagtcgtttgaacgcgacggtcaaacaagtgacgactacctttgataagtttgactttggtgaagctggtcgagccttgtacaactttatctggaatgacttctgtgactggtatatcgaaatgagtaaggaagtcttgaccggtgatgacgctcaagccaaggccaatacccaaaacgtgttagcctatgtcttggatcaaatcttacggttattgcacccaatcatgccatttgtgaccgaaaagatttggttatcaatgccacacgttggtgaatccttagtagtcgctgcttatcctgttgaccatcctgaatttgatgacgaaacggcggaaagtgatatggcctcacttattgaattgattacggccgttcggagcattcgagcagaagctaatgcgaagatgtcatcagccgtggatctattaattaagacggacaacactcggttacaagctgttttcaaagctaatgaagattatattcaacggtttgcacatccgaagacactgtcaattggcgccgacgtggttgcaccgaagttagccatgacacaagtgattagtgatgcggaagtttacattccgttagctgaacttgttgacctcgatgaagaagtcaaaaaacttgaaaaagaacaagccaagtttgaaagcgaagccgcacgggcgacgaagaagttaggtaacgaacgctttgttgccaatgcccctgaagacgtcgttaatagtgaaaaagagaagttagcggacaatcagacaaaactagctgccttaaagcaacgtttagttgatattaaggctgaagcttaatttgcgataatagttaactgaaatgtgtgttactggtaaaatggtaatcgtcccgttttgggatggttaccattttattattaaaacgtaaaatataagggctcattagctagaagtatggtgagcaaacggccaaatgatgattcgcgcggtttacaggaaggaagaccaacatgattgacacttattcagcagcattagcctttattcacggccggactcagttcaaaaaagccccgacactcagtcgtatgcgccaattcttacatgaattgggtgatccacagttaaaggtggccggcattcacgtggcggggaccaatggcaaggggtcgacggttgcgaatttacgcgaattatttatggcagatgggctaacggtgggaactttcacgtcgccgttcattgttcgcttcaatgaacggatcagtgttgacggcacccccatcagcgatgaagaacttgttggtctggtgcaacagattcaaccgatcgttgccaagcttgacgcgacattggcaagtgggggccccacagaatttgagatcattaccgcaatgatgtttctttactttgctgctcagccaatcgatattgccattattgaagttgggttgggtgggttatacgattctaccaatgtttggacaccagccgttagtgtgattactacgatcggttatgatcatatgcaaattctaggtaatacattgacggcgattgcgactcaaaaagcaggtatcattaagacgcaggtgccggtaattgttggtaaattaccggctgaagcacagcaagtgatgattgataccgccatgagcaaacgggcgccgttgcggacgttgggagttgattttacaaccaaattattaccgccccaaggctggcaagaacggtttaactttgacgggttagaggcgcattttaaagacttgacaactccgctactgggagactatcaagttgataatgcggccgttgcaatagcggcgtacctaacttaccaccaagcgactcagctacccgtggtcactagcgacgtcaaagcggctgtgacagcaacacaatggcctggccgtttcgaacgcttgaatcaggacccactgatcatgattgacggtgcgcacaatgagccggcagtaactgaattagcagctactttgagtgagcgatttggacagcaaaccgtttatgtcatctttgcggtcttagcggataagcagcatcaacaaatgattcagaccttgggcgcattacctaatgttcaattacggttgacacaattcgaaggtccgaacgcaaaacgtccagcgaccgacccgacgatgttggcacatgaaatgccaaatggccggaccgctgaagtatttgataattggcaagctgccttgatgcagacactccaagaaatgtcgagtgatgatgcgttactactaacggggtcgctgtactttattagtgacgtacgggcttatttcaaggatggcagcgactcagaaactgattaggggctgacacggatgcttagaagacaattgcgcaagaaataatactgcgtccttggtactgatattatcaaagatgattgtgagttaactgaaaaaattgcgttaaaatgtcggtgaattaatggttagccggtcactttacgaaactactaggtagaaagggtggtttcaatgacgatgatcagcgaagaacaaataccgacagcacaagttcgtgaattaatgcaagcctactttgggacgtttttacccaacgacgcggtgactagcgcgatgcaggcctttgagcgtgagtacccgatagaggacgctatagagtggttacatgagtcgtctgaaaatccgcgctggcaaggtttaatcgtggcgctcagatgtgggcaactattaccccggccaagtcgattaattttggggcaggtatatggtagtgaacaactgggagccgttttagcacgggactttgccaacttagagcaggaacagttgcaattgttatgcttagatacgaaaaatcaagtgatcaaacgccaggtcgtctttcagggcacgctcaatagttgtccggctcaaccgcgggaaattattaaagttgccctaacgacaccgactgcccgggtcgttattgcacataatcatccgagtggtgatgtgacgccgtcaaaaaaagacgttgaatttaccaagcggttacaactggcttgtgaactgatggggttaccgctcttggatagctttattatcggtgtaaacgattactttagttttgccgagcagggcgtgttaaattgtaatacggattcgtaacagaatgtggtaaaataacggggttaggaccgataatttaatcggcctgatcgcgttttttttgttaaattttatctaagttaaatagtgggactgtatttttcattaatttacggtatgctaggattcaggcaatgcttttttaatgcagtgcgactatgctataatacttactattatgactaaataaaaaattaaatttgttaatgatgaagggatgaatgtagtgttcggatttgggacaaagaatatcgggatcgatctcggtacggccaacacaattgtgtacgttgacggcaagggcatcgtattacgtgaaccatccgtagttgcgaagaacacgaaaactggtgaaattgtatcagttggttcagaagcacgggatatgattgggagaaccccagcaagcattgtggcgattcggccaatgaaggatggcgttattgcggactacgatacgaccgttgcgatgatgaagtactttattcaaaagacactcggccgctcaaatggtaagccatacgtcatggtttgtgtaccaagtggggttaccgaagttgaaaagcgggccgttattgatgcaacacgggttgcaggtgcgcgggatgcatatgtcattgaagaaccatttgcagccgctattggtgcagggctgccagtcatggatccaactgggagcatggtcgttgatattggtggtgggactaccgatgttgcgacaatttccttaggtgggatcgtatcaagccgttcaattcgaatggctggcgataagatcgatgactcaatcatttaccatgttcgccagaagtttaatcttttaattggtgaacgcacagccgaacaacttaaaatcgactgtggctcagcatctttggaagccgctgaagacttggaagggtcaacgattcgtggacgagatcttttgtcgggcttaccaaagacggttgaaatctcatctgtagatgtttcagaagccatccaagaagtggtctctgaaattatttcagccattaaagaaacccttgaagaaacttccccagaaattgcctctgacgtaattgaccacgggattgttttgaccggtggtggtgccttattgaagaatctttccgaagtgattgcggacgaaaccaaagtaccggttttcatcgctaacgaaccgcttgactgtgttgcagttgggaccggtgaatcactcaagagcatcgacgttatgaaaaagcgataacaggtgagcgggaagacgtcttcccgcttatttattgttaaatcattgaattttcgaccgggggttcattatgcaaaagtttttttctaaccgaaaactagtgattgcgattgtcgtgttcattattagtttcggcttgatgagtgtctcagtagccattcgtgataagaaatcgacaccaccattgatccaacaatttggaaacgatgtggctggtgcggttgaccgggtgattgcttggccagtcaatggcttacaaagtgcgaccaactcagtttctgacttgttgaacacctatcaagaaaatcaaaaattgaagaagcaagttgatcaactggcgcaggccaaggttagtgcccagacgacgcgtgcggaaaacaagcagttacgcaagcagttgaaattaaataattcgttatctgattatacgacggtgaccgccaatgttttgacgcggacaccatcatcttggatgaaccaactcgtgatctctaagggtgcgacatccggtgtaaagaagaatatgcctgtcatgtcacaaaagggtttaattggccgggtcgtggaagttaaccaaacgaattctaaggttgaattaatttctaatacgagttcgtcttcgaataagtttgctattcagattacgaatagtgctggtaagactgttaacgggattatttcaggttatgataagagcaataatcttttagagatgggttccgtgacgtctaacgttaaaatcaaaaaaggcgataaagtcgtgacgagtggtttaggcggcaatacgccgaagggactttatgtcggcacggttgctagtgtcaagcaggatgattacgggctagcatccgaagtggaaatcacacccgcagcggaccttagtgacttaacagttgtgacggtcgctgaacagtagggaggtgcaacggtgcgttactcaagattaaaaatcatctttccaattgggttatttgttgcactctttttagacggctcggtgtcaaatgtttttgccggtaaactatttagttacccgtacgccagtgtcttacacctagttttactgtggattgtcttcgctgtctttttagacgaccgtgataatctgtcggttggaatctggtctgcattcgtgggcttggtgtttgactggtactatactgggattttaggcgtttacatgattggcttaccgttggtagtctatatatgtcgacaaatcaagccatggatcgacctgaactttttaacgttactgatgatctatattattaatttgaccattttggaagcatttacgtatatttggtacacgatgagccatgtgatctctagtgggttagcagactttgcggtgtacacgctaggaccgacgattgcggtcaacctagccatctttgtcatattatattatccaatgcgtcggttatatctgagtgttaattagtcggcagaaaggaattctaacatgcaacagagtgtagttttaaaggccagtaatgacggctatgaactgattttacggcaagaagcaagtttcgatgatattatggtcgacttgaaggtcttgttggatcggttgcaggctgataatacgactgataaacaaatctcgtttgacctggatacggctagtcgactactgactgcggaacaaaatcaaaaagtgacacagttgattcaacgatatccgttattcagtattcataagctaacggcagatgttattttgacggcggatgctttagcgatgattgaacgtgatacggtgcatctggttaatcagattattcgcaacggtcaggtcgttgagattacgggggacgtgttgttcttcggtaagatccatgaaggtggggtgctccgggcgacgggtagtatctttgtgatgggtgaggtaaacggtgcgcttgaggccggttatcccgatcacaatgatgcggtgatcgttagccccttagcgaccgtcccgcgggttcgagtcggtgaattgttagaattagtggaccttgaaaaagttgttgatgggacgaacgtcgtctatattaatgacattcaagcgttggactaccagccgctccagcaattaaaacgggtacgaccgaagctatttactcgaaatggaggacgtgtttgatgggaaaagcaattgtcatcacctctggtaagggtggggtcggcaaaacgaccactacggccaatttagggacggcccttgctttgatgggcaagaaagtttgcttagttgatttagatattggattgcggaatttagacgttattttgggtctcgataaccggatcctttatgatattgtggatgtagttgcaggtcgtgctcaaatacggcaggcgttggtcaaagacaagcggtttgatgacttattgtttttattgccagctgcacaaaatgcggacaaggatgcattgaatcctgaccaagttcgggcaatcgtagacgagttgaaaccagattttgattacgttttgctcgactgtcccgccggaattgaacaaggtttcatgaatgcgattgctggtgcggatgcggctattatcgtctcgacacccgagatttcagcaattcgtgatgcggatcgggtcgttggtttattggaacaatatccgttagccgaagcacctaagttagtgattaatcgaatccggacgcgcatgatgcaagatggtgagacgatggatattgatgaaattacgcatcacttatcgatcgacttgctaggaatcgttttcgatgacgatgccgtcattcggacttcaaataacggtgaaccgatcgttcttgatcctaagaatccagcctcacaaggctaccgcaacattgcccgccgaatcgaaggtgaaacggtgccattaatgaatttggatacacctaaaccgggtgtttggtcacgaatcgccggaatttttcatcgtggcaagtaaaaaaggcttgacggttgattaattttcgattagtatgaactcaacattaaaaaacagggaacagaagagtagttgtaaggaccttgccgagcgagttatcgatgatgggaagatgaccaaggattacaacgaaccacatctgtgagttggacagctgaagttagtaagctgtttcggttggcctcgttagcggcggagtttagtgataaactcgttgagattagttgtgtgagcaactagtgaatatgaggtggaaccgcgattaaatcgtcctcttaggcatgctggcctaaggacgatttttttattatcacaaaactccctgaggtaataactgtgaagttattacgaagtgaggtggcaccacggataaccgtcctcttgagtattcgactcaaggggacttttttgtgtacttgagtcgtgaccgattagtggacgcaggacaatgtgacctgtaaatttgggagggaaagtacatgcagtatattttagaaattttgccatcattattatccggtgccgttatgacactgaaaattttcatttggaccctgattgggtcgctaccattggggttagttgttggtctgggattaatgtctaacttcaagccgctgcaatggttattgcatttctacgtttggttaatgcgtggtaccccgttgttactgcaattaatctttgtcttttacggcttaccgttgattgggattgtttttccacggtactacgccgcgttattcgcatttattctgaactacgcggcctacttcgcggaaatcttccgtggtgggttacagtcgattgacaatggtcaatatgaaagtgcacgggtcttgcggctgagctactggcagacgattcgtaaaatcgttattccccaagtgatcaaaattgttttaccgtcagttggcaatgaagtcatcaacttggtcaaggattcatcgttagtttatgtcattggtctcggcgacttgttacgtgccggtaacgttgcgacagcgcgcgatgttactttggtacccttagtattagtcggaatcatttacttagcactgacagccgtaacgacttttgtgcttggacgaatcgaaaaacactacagttactggaaatagggaggccatcatatgttagaactaaaaaatattacaaaaagctttggttcacggacaattattaagaatttgaatttaaccgttaaggatggcgagattctaagtattgtgggcccttcaggtgctggtaaaacaacgttattacgctgtattacggggcttgaaaaggtgaatgccggtgagttcttagtcgacggccaaccatttgacccctatactaatcggagtaacgatagtgtgattggtgttgtattccaaaattttgaattgtttcccaatttaacagtcatgcagaatattactttagcaccgaccacggtcttaaagcagtctagcgcagaagcagaacagcaggcgcagactttattagatcgtttgaatctcggtgatcacgctgaccagtatcctttcgaattatcaggtggtcaaaagcaacgagtggcgattgcccgggcattagccatgaaaccgaatgtcttatgctatgatgaaccaacttcagcacttgacccgaacttacgacaggaagttgaaaagttgattttaggcttaaaggctgatggcatgactcaaattgtggtgacccatgatttaacctttgctgaaaatatcgcggatgaaatgttccacgttgaaccaaccaagaagcaatagggggcgtcagaatgaagaaaagattatttgcactcagtttgatcgttgtgatgctcctgggtatggcaacgacgttaagtggctgtggtcaaaatgtgactaaacgcgctgacacccaagatacttggtctaaaatcaagaaacgcggttacgttgtcgttggtttggacgacagttttgtcccgatgggctttcgcgaaaagtctgggaaactagttggttatgatatcgacctcgcccgggccgtctttaagttgtacggtattaagatcagctttcaaacgattgactggtccatgaatgcgaccgaattgcgcaatggcacaattgatttgatttggaacggctacacgaaaaatccccaacgtgaaaaagtggtggctttcagtaatacttatttgaagaacaagcaagtcctcgtttctttaaagaaaaatcatattaactcatttgacgatatgattggtaagacgttgggtgttcagtcaggttcttcgggctatgagtcattggaaaacaatccgaaactgctgaaggataagattgctaagaaaacgccagttcaatacgataccttcacgaatgccttcctcgacttgaatgctgggcgaattaaagggctcttgattgatagcgtctacgcgagctattatattaagcacgaagcgaactctgcggattaccaagaaacgcaaggcacctttaagtcggaagacttcgcagttgggatgcgtaagggtgacaaaacgatgaaacgcaaaattaatgccggcctaaagacgttgaaggctaacggaacgttagataagatcaacaagaaatggtttggtaatcaaaaagttgaaaactagcgtgacgtggcaggacttgtcattcagtgaccccagttatcggtgagcaactaatcataaataggctttccaagacggacgatgtcttggaaagcctatttatattggcacgcagacaaaatgggattgaaggcttaaacttatacacgaaaaattgttgaaaggtgccgctataaggccaaaaacaaccagctaaggcccgctggaaaaagttcgagttttgcataaacttgcttggctagcgtcgtcctaagccgacttccaggcatttcggccaattgctggaacgcggtggacacagatttaagccgaagaccacgtcttaaatactggtcttccactaaccaagcaaagaacgcttgctaagtggaatttcaccgctgagcattggccgaaatgccttccagtcgggacagtattcgaatggcggacgaagatgtacctaacttgtgatggacttgtcattactttttataaacgataactttgtcaagcaacggtcagacagaaaatgatattgttatggttcactatttctgaaccaatgtagcaataattgaacttctcgataaacatagagatttacacctgacgctttatttgaagctccggtattaaaagaccaattacaccaagttaagtggccgttaatcagccattcgagcggcttaacgaaacgcgcgcggtgacgctgaatcctgtgcttgctacgccaacggactgatgcccaaaccgcattaatccgttgactaggcaatgcttaaattcaacccgtgatccctcgcacactttagtctggaggggttgggtgacaatgctcagtagccaaattattcttagctgaaagtgggttgctttcggcttagaataagactcgtatttgagatgatgcgggttgggcattagctcaaatcgacgtcggctgcgttccagcaattgtcacccagccccggaggtcggaataggacacgtacatgctgacgaacgagtatccggggtcaattgccggcacctttcaacaacaattgatgaaaaacacggccataaaaaatgcccgactagttgactagtcggacgtatgggttaatcgaaaaattctttatataacgcaataacggcttgatcggcatcattgtcgtgtacaccgaacataatagaaatttcggaggcgccttgattgaccatgattaatttaatattgtcgttggctaatgcggtggcggcacgtgacatgatgccgacgcggttgcgcatgttttcgccaacgagcattaagattgagtagtcgtgcgtaaagtaaatttcatcgggattgatggccgctgagatttctgcaactaacgttttctctaattcgggcgtcaactgatgttcatcaaagatgatggtcaaatcatcgatcccagatggcatgtgttcataactaatatgatgattttctaaaatcgttagaattttacggcccagcccaacttctttgttgagcagatacttacgtaagtatagtgaacaaaaactagaagaactggcaatcccagtcaccgggtagtggggattgggttcgcgagttgactgaatcaaagttcccggggcctcgggatggttcgtattcttgacgttgacggtaatgttgccttcgattgctggaatcaacgcttcgtcgtgaaagacagaaaagccagcgtaagaaagttcgcgcatctcagtaaacgtcatttcactaatggccgctggttttgcgaccaaactaggattgaccgcgtaaattgcatcgacatcggtaaagttttcataacgttcagcatggacaccccgagcgatgattgcgccagtaatgtcggagccaccgcgtgaaaaggtacaaatttggccgttacgattgtaggcgaaaaatccggggataactaggatttgttcgctgttggcccacttagcgagctggtcataactactcttgataatctgagcatcatcaggaacgtccgtaacgaccattcccgcatctttagggtcaaggtagcgagcgttgaggccgctttgttgaaaaacagcggcgaccagttgcgcattgagacgttcgccgtgcgctttgaaagctgccatcaagtaggtgttgtcggcgtatgattgttttggtaagttgcgaattgtttcaaaaatcggagtcaattgtgcttcgggaacgttaaacccgtgaccgatttctgcataacggtcaatgatagctgcggtaacggcttgcgtatcttgatgatggatcgtttgacgggcatattgaataagtaaatcagtgactttggtgtcgccatcgaaccgtttaccaggtgccgatacaatcacatatttacgtttttgatcagcctcaacgatcgcgaggactttttgcagttgctgactactagcaagggaactgccaccaaatttaattactttcacattaaccgctccttaattttatcaataatgaaaagaatagcagacaaatcgcgacttggcaatgttaattgccactcacgagaatttaatttaatcgtgaaaataatcattttggcgaccataatctgaaaataaaaaaaacaataggacggaaagttgcgtcaatccggcctttcgcttattatttattacatatgcaaggaggaaacatgttgcaaactcagttagcaaaaggggtccaattgacgacggttcagagtcatcaatttaaaaccaaccagattattatcaattttcgggcaccgcttgcacgtgaaacaattactcagcggtcgctactatcgaatttattagaaacaagttctcgtgattatccagatcagcgagcgttagccaacgcattggctgccatgtatggtgctgcgtttggtgcgggtgttagtcgtaagggaccaacgcataacttgcaattagccatcaccgttgcgaatgaacggtatttggcaacggatcagccactgacaaatcaggccatccagtttttacaacaagtcgttttacagccgctagtggcggacggtcagtttgatcaagcgacgtttgaccgccaaaaaaagaatttggaagcggcgattatgtcggtcgctgatgataagcaatattatgctgcacagcagttaaatacggcgttgtttgcggacgaacctgcgcaacaagtgccaagttacggtacggcgagtgatttggcagccctcactgcggaaggtttgtacgactattatcaaatgatgatccaaaatgatcaaatcgatattatcgtgacgggtgacgttgatgaggcggccgttttagctcagtggcaacaagctggttttgaggatcgactgacggggcgcccacggccattttatcaacatcataatacaaaccagtacgtcgaagtgagtgaacaacaggcactcagccaagcaaagctaaatttaggttatgatttgccagtcttttatcgtggcaatcattattacgcggccttggttttcaacgaactatttggtgggtcaccgctgtctaaattgtttatgaatgtacgtgaaaaggcgagtctggcttactatgccagcagctcattggatactttccgtggggtgcttaaggtgcaagctgggattgatggcaaaaatcatgaccaagtgttagcaattattgcggcccaattaacggcgattcaagccggtgattttacggatgatttagttgaacagctgaagctgggcttgatcaacgattttgagtccagtttggatagtcaacggacattcgctgtgcaagccttgatcgatgatttaacgcaacaacgcgttacggatactgaatggctatggcagattcaaagtgtgacgcgtgaacagatcattgcagtcgcgaagatggtgacccttaataatgggttcttcttgagtggggtaaccgcatgaaagtaaaaaaatatgatcaatttaatgaaagttgttatcaagctcagttggataatgggctgacggtgacgttgttacccaaggccggttatcacaaaacgtacgcaacgtttacaacgaactatggctcgatcgacaatacctttgttccagccggaagtactgaaatgcaacgcttcccagatggaattgcccactttctggaacataaaatgtttgagaaggctaaccatgatgcgtttcaaatttttggtcagtacggggcgagcgcgaacgccttcactagcttcacgaagacgagctatttgttctcagctacccggcacctgcaggacaacctcatgaccctcttagattttgttcaagatccgtattttacgccagcgacagttgacaaggagaagggcattattgggcaagagattgagatgtacgatgatgatccaagttggcgcctgtatttcggaatgattggtaatctatatccgaaccacccactacaatatgatattgcggggacgactgagtcgattgctaagataacggctgatgacttgtacgccgcttatcggacgttctatcatcctgagaacatgacgttatttgtggttggtaattttgatccagacgaagtgttagggtggattacgactaatcaagcaactaaaaaatttgctgcctttcaaccgattggacgtaagattcctgaaaccgcaacggatggacatgacattattccttatcggacgattgatatgccagtcaatcgggccaaatcaatcgttggtgtcaaaggcttgctgccgattgaagcgggggctgctgctttgaagtaccgtgcagcggttaacgttttattagaattattgtttggcgatacgtcagcagattatttgcgattatatgatcagggtatcatcgatgatacgtttggttatgatttcgaattacagtctggatttaattttgtcacttttagtggtgaaacggatgatccagcccagtttgatgcagccatcattgatgtgctagaaaactggcggacggctgtagttggtcaggaagcagcactcgcattagtcaagaaggaaatgattgggcgggtcgtcttcatggcgaactccttggaggcaatcgcgaaccggtatgatcaacggctattcgggacggcgacaatctttgatgaaccgggtataattgatcagttgacccttgcagacttgcagacggttgctgaacaattattgacttctcaggcaatcagtgaataccagattcgaccacaagcaaagagttaaggaaatctgaaatttaatggtcatggggctgctaaatttagttgctgtgatatactattaaccgtaagattttgaaaatagacttagggtggagaaaaagtcaatgagtgaaaataacgaagaaacaacaacgattggggcgcgcttaaaggctgcccggacagcgaaaggcctcacaattgatgatttgcaacaaatcaccaagattcagaaacgctatttgattgcaatcgaagatgaacagttcgataaacttcccggtgatttttacgttcgggcgtttgttaagcaatatgcggaaacagtcgctttagatggtaacgcgttgttagaagaatatcgagaccaattaccgagtgttcatactgaaaccatcgttgaaaatgttgatgaagttcaacctacccgagttgctagtcgcgaacaacctgcttcaccagcgagccgcgtgcgtaactatttaccaacgatcatcgtcactgccattgtggttttgattttgttatttatttggtttatggcggttcgcacgcacgctggttcaagctctagcacgagtgcggacagttcttctgtacaagtttcgagttctaagaagcaatcgagttcgtcgaaagctagttcatcagcaaagtctagttctaaagcgtcttctgccaaggaacaaacaatcaaggctaacggcagtagcgatacggcttatactttgacgaatggtgcggataagaacaaagtggtcatcaagtctactaaggctgcttggacttccgttacgactaacggtactcagacttggcaaggaacgctaaaggcggatggctcacatacattaacgttaccaagtaatgctacgacggttaagttccagtttgggaacgcaactgccacgaccgtaacaatcaatggtaaggcgttcaattttaatccgaagaacagtacgtcacaagttcggacgattaccttgaccatcaaataacgttgcggaggaggcgggtactttgaatttacctaataaattaacggtgtttcggattattctgattccagttttcattcttattatggtgttaccccttagttggggacaggttgtgtgggctggaacaacaattccagtcacccaagtggttgcaactgtcatttttgcggttgcgtcattaactgacttagcggacggcaagattgcccggggtcaacacttggttacgaattttgggaagtttgcggatccactggcagataagatgttagtaatgaccgcgttcatcatcttagttcggttaaatgcggcccctgattgggtcgttgccattatcatgtgtcgtgaactcgcggtaacggggttacgattattgattgttgaaaataatggtaaagtgatggctgctgctatgcccgggaagattaagacaacgacacaaatgattgccatcatcttcctgctgctgaacaatgtcttatttgcggcaatccacattccatttgcggcaattatgttatatatctgcttattcttcgttatttattctggcattgattattttgttcagaatcgtgacgtgtttgcagatggcttcaaataaaattaatcatgagcgtctcaccgagtcttgcattcggtgagacgtttttgtataccattaacgtgttgcccttattaattaatcatgactcctgtcagtcgataattttaacgatgagtcgcgttggcaggttatgtcaaatgaaggtatttgaaaatgctaatctttttaatggggtcgatcgtcattttcgtatatacttaatgtaggacgataatcatcgcgcccacactgagtgtaatcgataggattacggggaggcatatatggcatgcaagcagaaataatcgcggttggtaccgagattttactgggtcagattacgaacacgaacagtacgtacatcgcacgtggattggccgaattaggaattgatagctattatcaaacggtggttggtgataatcggcaacgtttgtcgaccgtcattgaaattgcggcccagcggaatgacttagttattttaacgggtggtttggggccgaccaaggatgacttgacgaagcagacgctcgcgcattatttgaatgttgccttggttgaagatcaggcagcaatgcaaaaaattacggcctggtttgccactaatgacaaagtaatgacggccaacaaccgattacaggcattgtatccggcaggcgcgcaaccgttgactaatcataacggaatggctgttggtgcgttttatcagtcagaaaatagtgctgatttcttgttattgccaggtccaccccgtgagttagccgtaatgtttgattctgaggcaaaaccgaagttggcagctgcatatggggaacaagcccaaatctattcgcgagtgatgcgtttttatggcatcagtgagtctgaattggcgacccgggtgcaacccttgattgatgaacagcaggcggttacgattgcaccctatgccaagactaacgaggttaccctcagattaagtgcccaagctatgacggaaacggctgcaaggggaatgatcgacaaagttgaccaccagatcaaggctaccattgggccgtacttttacggttatggagacgataactcgttagttactactgttattaatcaaatgattgcggctaagctgagtattacagccgctgaaagcttaacagctgggctgtttcagagtaccatcggcagtgtgtccggggtctccgcaatctttccgggcggctttgtaacgtatgcgaatgaggccaaacatcagctagtgaacgttccacaagcaattattgacgctgagggcgtggtttcagaagcgaccgctaaggccatggcgagtggtgctaagcagcagctaaatactgatgttggtatcagttttacaggcgttgccggtccaggaaccttggaaggtcaaccggctggaacggtatggattggtcttgcttaccgtgatcgacccgtgaaggccaagcagtaccattttgctggtaatcgacaacaaattcgggaacgcagtgtgatggccgggttagacctattgagacatgcattgaatgaagatacggacttaaaaaaataatacgaacttttgttcgctttttgcttgcaattctaactttgaacagctatgatattaagagttagaaacgagcaccaaaggaggaaataatttggctgatgcacggaaagcagcactagatactgccctgaaaaagatcgaaaagaatttcggtaaaggggcgattatgcggatgggtgacgctgcccagacgactatttcaacgatttcaagtggatcgttggccttagatgacgcgttgggtgtcggcggctacccacgtggtcggatcgtggaaatctacggtcctgaaagttcaggtaaaacgaccgtggcactacatgcggttgctgaagttcaaaagcagggtggtacggcggcctatatcgatgctgaaaacgcactagaccccgtttatgcggaacacctaggggtcaacattgatgacctgttactttcgcaaccagatactggtgaacaagggcttgaaattgcagatgccttagtttccagtggtgcggtcgatattttagttgttgactcggtggcggccttagtgccacgtgccgaaattgaaggtgaaatgggtgacgcacacgttgggttacaagcgcggctgatgtcacaagcgctccggaagttatcagggacattgaacaaaaccaagacaatcgcgttatttatcaatcaaattcgtgaaaaagttggtgtgatgtttggtaatcctgaaacgactcctggtggtcgggccttgaaattttacgccacgattcgtttggaagtacggcgggcagaacagatcaaggaaggaaccaatattattggtaaccgtgtccggatcaaagtcgttaagaacaaggttgcaccgccatttaagcgtgccgaagtggatatcatgtatggtcaaggtatctcacaaactggtgaaattgttgatatggctgctgaaaaggatattgttaagaagagtggttcttggtattcatatggtgacgatcgcattggtcaaggccgtgaaaatgccaagaagtatttggacgagcatcctgatgtcatgacggagattcgccaaaaggttcgtgatgcatatggtatggatgcaactggtgaagaaacgtctgaaactgatgatcaggccaaagaagctaaggataagggaactgctaagaatggcagtaagggtcaaagtaagtccactaaagcgacaccagcggaaactgctctcgatctcggcgaccaaccaaccgaaaaatagacagtttgttatgcaacgcccaaaatatttattttgggcgttttttgtacatacttagcttgtttgcacgacaaaagtagcctgcagagagcggttgccataagactttaagttgacactattcgtttctaacattagaataacaagtgtgtaaataatcaaaatataacatctgaaaatttgtagttgattttatgttaactggattttggtggtgcggaggtggaaacatgaatgttttcggtataatcctcgcagtcatcgcaattgttgtcggttatgggattggttactatgtacgcaagaacgtccatgaaaaagaattggacgttgccaggaacacagccgaaggtattatttctgaggccaaacgggcagcggagactcataagaaagaaaaagtccttgaagctaaggaagagagtcatcgctaccgggctgaagttgaaacggagttaaagcaacgtcggaatgaagttcaaaagcaagaagaccggttgcttcaacgtgaagaaactttagatcacaaagagaatacttttgaaaagcgcgaggatgctttaggtaaaaaagaagataagattgccaatgagcaaaaacgcgttgaacaacagcaacaaagtgcagcttcactaatcacgcaacgtcaagctgagttagaacgggtcgccgccttgtcgcaagaacaagctcgcgatcagattttgacccaaacgcgcgaacaattaacgcatgaacgggccgtgttaattaaagaaaatacggacgaagtgaaagcgcagtctgaaaaagaagccaaaaacttaattgtccaagcgattcagcaaagtgctgccgatatggtttctgaaaccacggtttcggtcgtttctttgccgaatgacgacatgaaaggccggattattggtcgggaaggtcgtaacatccgaacgttggaaacgctgacgggaattgatttaattattgatgacacgccagaagccgtcgttttaagtggttacgatccgattcgtcgtgaaatcgcaaagatcgcgcttgaaaagctgattcaagatgggcggattcatccagctcgaattgaagaaatggttgaaaaagcgcgtaaggaaatggacgaaaagatccgtgaaactggtgaacaagctgtctttgatttaggattgcacgggatgcatcctgacttgatcaagcttgttggtcggctgaattatcggaccagttatggtcaaaatgttttgaatcactcaattgaagttgcgaagttagcgggcgttttagccgctgaacttggtgaagatgttacactcgcgaaacgcgcaggattattacacgatattggtaaggccgtcgatcatgaggtcgaaggttcccacgttgaaattggcgtggaattaacaacgaagtacaaagagagccccgtcgtgattaacacgattgcctcccatcatggtgatgtggaagctaagtcgattatcgcggtgttggttgcgacgtctgattcaatttcagccgcccggccaggtgctcggagtgagtcgctggagaattatattcatcggctcgagaagctggaagcaatcgctaataatgaggatggcgtcaagaagagctatgcgattcaagctggtcgtgaaattcgagtcatcgttaagccaaacgagatttctgatttacaggcaacggttttggcgcacgatgtcaaaaagcagattgaaaatgaacttgaatatcccggtcatattaaggttacggttattcgggaagttcgagcagtggattacgctaaataaccgggaaatgagtttaggtcttgacctaagctcatttttttagttgccagcagaattcaatcacgttttcaaggctaaataatgctaaaataattggtataacgttaaaacaagggagcaatctatgcgaattctatttgttggggatgtcatgggcaatgtcggccaaacggcggtcaccacgtacctacctaagttaaaacggcgctacaagccacaagttactattgttaatggggaaaatgccacccgcggccgcggcattaatcaggaagtgtataaggacatcttgactgcgggggctgatgtcattacgatgggcaaccacacctgggataataatgaaatttttgattttattaatggtgctaagaagttgattcgaccgttgaattttccgccagcgacgactccgggggttggttatacgatcgtgaaggtcaatacggtgaagttggccgtgattaatcttcaaggaaacgtctttatggggcaaaatttagcggatccttttacgactgtccaaccattggtcgagcaattgcgggaagagacacctaacatcttcatcgactttcacgctgaaacgacaagtgaaaaagaagccatggcgtggtatttggatggtcaggtgagtgcggtagttggcacccatacccatgtgcagacgagtgatgaacgcgtattgccaaatgggacggcctttttaagtgacgttggttttacgggtccgtataatggtattttaggaatgacccgtgagaatgttattcagcgtttcttggaacaaatgccgacccgtttcaacgtgcaagaggatagttcggcagtgttgtcgggttgtgtgatcgacgttgatggtcagagtggtcgggcgaaaaagattgcccggattttgattaatccggaccacccatattttgatgactaagatttacgatagaaagtaggattaagcgtgccacagaaaacaaaagatacaccgatgatgcgtcaatattttgcagttaaaaatcaatatcccgatgcgtttttattttaccgacttggtgatttttatgaaatgttttttgatgacgcgattaaaggtgctcagttattagagttgaccttaacgacgcggaatcattcggcggaaaaccccataccgatgtgtggggttccccatcgagccgtgcaaaattatattgatattttagtagataaaggttacaaagtcgctatttgtgaacagatggaagatcccaaattagccaagggcatggtcaaacgcgaagtgattcagctcgtgacacctggtacgacgttggaacggggcgcggaacaagctaagacgaacaattacttgactgcgctgattcagcgtgatcaacaatatggttttgcgtacgccgacttgtcgactggggaactaaaaacgagtgtcttaacgactaacgataccctaattaacgagttgaccagcttgcaaactaaagaaattgtggtcgacgactctgttgctagcgatttgcgcgatcaaattaagacgctaggaattctaatttcagaacagaataacgtcaccccccaggctgaattgagctacttgactcaggacttgacggtcgatttggaacaacaggtcgtggaacggttattgatgtatattacggtgactcaaaagcggagcctcgcgcacttacaaaaggcgatcgcttatgagccgtcatacttcctgaaactcgatcataattccaagtataatctggaattaatgaagtccatccgaactggtaaaaagcaaggaactctcctgtggctattagatgaaactaagacggcgatgggcggacgactattaaagcagtggatcgaccggccattgattgtgaaggccgatattgaaacgcgtcaaaataaggttgcgacgttattagatcattattttgaacgtagtaacttacaagaagagttgactaaagtttatgacttggagcgtttagctggccgggtggcttttggtagcgtgaatgggcgtgacttagtgcaactcaagacatccttgcgtcagattccaaagattcggtatatcttatcggaattagatacgcaggtatttaatgatgaagttaatcagctggatccagtcgaagacgttgcggatttgattgacgcggcaatcgttgaagacgcgcctttgtcagtaacggacggtggtgtgatcaaggatggttataacgagcaactcgatcaatatcgggatgctatgaataatgggaaaaaatggattgctgagttggaagcccaggaacgggcgacaaccggtatcaagaatcttaagatagggtttaaccgggttttcggctattatattgaagtcacgaaggccaacttggcccaattaccgaaggaccgctatgaacgtaagcaaacgttaacgaatgctgaacgctttagtactcctgaactgaaatcgcatgaaagcctgattttagaagctgagagccattctacggatcttgagtatcaactcttcacaaaggttcgtgaaacggttaaaaaggcaattcagcggctacaaacattggcgaaggcggtcgcagcaattgatgtcttgcaaagtttcgccgtcgttagtgaagattaccactttgttcgaccgaaattaactaaatcacatgatttgaagatcgttgatggtcgtcatccggtcgttgaaaaagtgatgggtaaccagagttacgtcccaaataacgtgacaatgtcacctgatgagacggtccttttgattactggtcctaacatgtccggtaaaagtacgtacatgcgtcaattagcattgacggtcatcatggcgcaaattggttgttttgtaccggctaaatcagcgcaacttccaatttttgaccaaatttttacacgtatcggtgccacggatgacttaatttccggtcaaagtacgtttatggtggagatgcaggaagccaataatgccttgcaacatgcgacagccaatagtctagtgttgtttgacgagattggccgggggacggcgacttacgatggcatggcgcttgcccaagcaattattgagtttgtgcataaccatattcatgccaagacactgttctcgacgcattatcatgagttgaccgcgttagatcaagaattatccgggttacgaaacgtgcatgtgggtgcgactgaacaggatggcgagctcgtcttcttgcataaagttgagcccggggccgccgataagtcctacggggtgcacgttgccaagttggctgggatgccaacgagtttattggaacgggccaataagattttaacgagtttggaaaatcaaacgagtacggtatcgacgacagcggcttcgattgctgctagtgatgctgctaatagcgtggcacctaacacagcggcttcaatgccggttgaggccgccgatgagtcacagccagtagaatcggagaccccggttgccgaagctccggtcgctgaagccggtgatgaacagctgtcgttatttgctgagccggcggtgacggatgcgaagggtgaaaaggttttacaacagctgaagacgttgaacttgatggcgatgactccgatggatgtaatgaaccagctgtataaatggcaacaaaaattaggcaagtaggcgcattttaactcatcataaatgagcgcaataagctgttatgatgggctattggtgcgtctgacggacaggtaggtcgacactagtcagttattgctagttgtggtaatcgaaaatgttcgtgcaggacacgagcttaattattttatgtgaaaggaccgatggaaatgggaaaaattcatgagttatcttctgtgctggccgaccagattgctgccggcgaagttgtggagcggcccgcctcggtcgttaaagaactggttgaaaatgctgttgatgcgcacgcgacgcaggttgatattttggtgcaagagtcgggtgttcagtcaattcgggttatcgatgacggtgacggtattgatgacgctgaagtcctgaccgcttttaaacggcatgcgacgagtaagatcacatcacgtgaagatttgtttcgcgtccattctttaggttttcgcggtgaggcgttgccaagtattgcgtcagtagcggacgtggtgatgaatacgagtaccggcgccactgggacgagtattcattatcgcggcggtaagctattacaacaatcgcccgctccgttgcggcaagggacggacattaccgtcaccgatttgttttttaatacacctgcgcgactaaaatatttgaagtccccccaaacggaattagcgaatattttagacgtggttaaccgcatcgcacttagctatccagcggtggcatttcggttagttcataatgcgaaagagctattaaaaacggctggtcgcggtgacttacaacaagtcattgctggtatttacggtgtccaaaatgcgcgcaagatggttgccattcaaggatcgaccactgattttaaattgagtggctttgtggctttacctgagctgacgcgggccagtcgccagtatattactgttctgattaatggtcgtgctatcaagaaccagcaattgaccaaagccgtcatcaaaggttacggctctaagttgatggtcggccgttatccaatcgcggtgatcgctttaacaatggatcctttattggtggacgtcaatgttcatcccacgaaacaagaagtccgtttgagtaaggaaccagaattagccaaactggtcagcaccacgattacggaccggttagtggatgtgaacttgattccgtcagcattgaccaatcttggcagccatcggcgtgaacatctaaatacagaccagctggcgatggatttgaacgccgtttcgtcacagtatcaagtagcggataagacaacgccggcatcgactgagcagtttgcagcctcgctggcagcggcaaccatgcagcccagctcggcaacgaccatggtaagtactacttcagcacagccatcagcggtaaaccgtgcagcagttagtgcggttgttccgtcagaatcagcggcaagttctgccaacccgccgattatgattagccatcgcgacgaactgacagctactccagttcaagcatttgaccagcgttaccagtcagaatcaggcgctttaccctttggtgaaactgctgaaccgttagaaaccagcacggctgcaagcgcgccgactagtgaagcgccggatacggaacgttttccacagttacgctatcttggtcagatgcacgggacttatctgttagctgaggcggatgatggtatgtacattttggatcagcatgcggcccaggagcgaatcaactatgaatattatcgccaagcgataggtgaggttagtgcggatcaacaaaatttattggttccgattattttagattacccgacgagcgatgttttaaagatcaaggaaaaattgccgttactagcagaattagggattcatctggaatcattcggcggcaacagcttcattgttcatgcccatccgacctggttcaaagctgggcaagaagaagatacgattcgtgaaatgattgattggctcttacaggatgataagttgacggtcgcccaatttcgggaaaagtcagctatcatgatgtcctgtaaacgggcaatcaaggccaatcaccatttggatgatcagcaggcccgcgcgttattagccaagttaccgacctgcgagaatccgttcaattgcccacatggccgcccggtgacggtacacttcacgaattcagacatggaacggatgttcaaacgaattcaggatagtcatgaagcacgtgattaaagtgattattggcggcgtactcgttactttagtatgattcgtaatcgatccgcattgtgcaagtaaatatttcatgaattatgattaaaacgtgccatttcttaagttcaaaagcagccagcttaagaccgctggaaaaagttcggactagcgtagacttgcttggtgtgtgcgccttacaccgacttccaggcatttctgccaattgccggaacgtggtgggcacagatttgagccgaaaaatcacgtctcaaatactggcctttcactaaccaagcacaagacgcttgctaagtgaaatttcaccactgggcattggccgaaacgccttccagtcgggacagtattcgaatggctgacatggatgcaccaacttttgatgaatttgtcgttgctttttataaacgataattttgttaatcaactgtcagactgaaaataatattgagatggctcactaatcctgaatcggtgtagtaggatttaatctcttgacagagtgcttaatgtacctagcgctttgtttaaacttccagcatcaaaatagtcagcgactaattgtaccaaattaggtggtcgttcatcagccattcgagcggtttcccgaaacgtgttcggtgccactaaagccttgtgcttgctacgccaacggactaatgccaaaaccgcattaatccgttggctaggcaatgctcggcttcaacccgtgacccctcacaggcttgagactggaggggctgggtgacaatgctcagtagccaaattattcttagctggaagtggtctgcttccggcttagaataagactcgtatttgagatgacgcgggttatgcgttagctcaaatcgacgtcggctgcgttccagcaattggcacccagccccggaggtcggcataggacgcacaccggctgacgaacaataatctaaacttggcacgttttaatcatgactgatactgaataatcacgaaccgaatgtgttatcgaataaaaatagcaatgttgagtagaggctgtgacataactagcctctgtataagcgaatgggacgagaaaccgaattttggtttctcgtcccattcgcttacgcctttgatttttaaagttggtccctaccgtgaccagtttcataatatttaacgccagtattacgattccggcttccttggtgaccttgtcgaaacctcgcaccgagaatcgattgaaatgtaaagaagccttcatcttgccaaaaactggctcaacatcgatcttacgttgagcgtaaatctgaccagtttctggagatgaaagtaattctcgttgtttcgatttgaaatattcccaattttcgttcacggaaatccttttaagatatccttttggtgttagtgccgcggaaattagttgatgattttcatcatacttttcggcaatgtattctttaaagtcacgggtaaaaccatacttatcagtccgttgacgataagcattaaaattaaaccggacgttttgcggattgataaaataatcatctttttcatgatagtcccagttcataaccttacggtcatcactttgccattttcgactattctctttaagcattgtgccgtagggaatcaaaacggtatgctgaccgaattcatcttccaagtaccgataattactttcggaaccgtatccggcatcggcaacgatggtgtgacctaacacattgttggcctttaaatgttcaataaacgattgtaaggttcgtgtgtcggttggatttgggaaaagccgatatcccgtaatgaactgattactcgtggcgatttgaacgttgtaggcaggttttaattgaccgttttgcatcggatcttccttgacccgcatgaaggtagcatcatcatagtccgtcttagagtaactgttacgctgaccatagattgcttgttgtgcttggtgttcacgcattttatcacgtcgtttgtccaacttacgtttttgtgatttaacagtccggcgttgctgtttggctgggttcggggaaacctgcttagttgcttccacggtttcattaaggaccactaagtgatcctcaaccttgctaatcatgatatccaatagttcgggagtcagctctgatcctgccggaatttcaccgacaattttagcttcatgaagctcgcctaacaggtcaacgagtttctcgcgattcatcttgtcaaatcgtatcgtattcttcttccaaacaaaactatacttgttggcgtcggctaggatcttagttccatcaataaatgaaacatcatcaatcatgccattttgacgaagatattgagttagttgtgataagctatcggttgtcaaagtggccagttcatcagaaattctaaagcgacaaatcgtccggtaggacggaatttggtcggcaattaaccacccagctggcttgttttcacgggcaaaccgttcaattttacgactgctgaaaatgccatagctgtacgctaaaaggaccagttttaacatggcaccgaggttatattcccgcggacggccaaactggtaatcatattttagttttaaactctcaacaagctggttgatgtaacgagcagaatgatgctcttctggttggtaatccaaggcgatactcaaagtggtttgattcatgttataataatcttgcatattaggaatgtcctttcgaggataatttcgtagagtatcgggtgcgaccgatgctcttttttggttttctattatatcaaaagcaggtctggaaaaattcgaagatttttccagacctgctttgtttctagagacttatgtcacagcctcacttttattgtcgccagtattgcggtctaaaaaacaactttaagattggggaagtggcgtttgtgacactaatttgagttgtaaaatttcagattgaattggtttaaatagttagctatcattgattaaaatgagtggtgagcgcgtatcgggtgcttggaccactcaacatgattgggagttgattgttttggatatgaccaaactttattatcgccaggtttattcggcatattgttttttggcagatttaccagaggccacgcccacgttcgtggccgggcgcaagacgctgtggaaattaaatgcgcatccaagtgcgcgggacgccaaattgattacgctaaatttatatgagcaagttgctgtttttgagctcgatcctaaccgtcatgatcaagcggcaatcgctgcgatcaacttacaacgtgataatgctgtgagtggcttacaacctttagtacagttgtttgggagttatccggcgactactaagattgaaactttagataactgggattggcgttagttgttgatgggacagctgtgaatcacgaatttattaagattcaaactgaacatcacgagacgaaattgttcatggtaaaatagaaacattgtttgagatggcaaaatatggggattgcgttgtcgacgtaattacaagataggggcacctgatttgaagacagtacggaagataccactagtcgtctggtatacggcgatgtttgtggttattgcgacgattacttacagtgggcttttcttagccggccggacattgatttgggaagtggatggcatcgcccaacacttcccgattttattggaatttcagcggatcttacagcaccacccacaacaattattcagttggtcatggaatctcggcttgggggccgatcaactgacgactttttcctactacgtggtcggtgatccgtttaattatttagtggcgtttgtttcgcgcgctcatttggaatgggcctaccaagcgttgatcttgctgcgattgtacttcgttggacttgcttttctaggtttcagtcggcagttcaagttcaaacgtatcagtcaattgattggagctttgacgtatacgtttaccgcgtatacgttctatgttgggatgcaccacccgtttttcttgttaccaatgatttggtttccgctactgtgttgggcgattgaacgggtcttacgaggccgacattggttaccactcagtctgattaccgccgttgtaattttgagtaacttctattttgcttacttactcgcattgggcggtttagtctatgctttggtgcgtttctggtcacgtcgtcgtgaccatttaacgatgcggtcgtttggacagttattttggcggttactagtggcagttggtcttggtgtcacgatggcaggcatcttactagtgcccacgctgctcgcgatgttgacggcaacgcgtgcgagttttaactttgcgaatggcttgacgagttatcccatcaattattacgttaatttacccaatcgactgttgaccaatggtggcagtgtccaatactgggtgaccctcgggctgagtagcattagctttattgcaattatttatacactacgtcatttcagacgctattgggtgcttaattgggtactggtcgtgatgatgttgggtattttgttgcctcaatttgcggccgtattcaacgttttttcaacaccttctaatcgatggttgttgatggcaaccctcgtgtttgcttatgcgacgatggcatttatggaccaagtcactgctctgacagcggctgatttaaaatggttggctggtattagtggcggtctgcttgtcattatttggctgatcaatggattctatctcaatatccgcaaacatgatattgcgacatatcttatcttgttagcgttaattggggtcctgctggccaaacaatccttaaaattgaccaatcggcaattttatgtgttattactgggaattgtcacgctgaacctggcgaataacggactgggctggtttagtatcaatactaattctaatagtactgagcagttgcggcagggcgcggcaatgaaatgggtcaaaaattattttgatggcgcgcaaaaaagtttaaccacgactagccaattttatcgaacggctttggcacccaactactatacgatgcgttcggctgagagtgatgtgccgatggtgttaggaactcacacggttggatcgtatttttcagttcaaaatggttacgtgggggcatttagtcaggccttaggcaactcagagtatgcgatgaactcgccactcggttcgttggacggtcggacgacgatgtataacttattaggtgttaaatatttatttgcacgtgaggaccagttgaagaaacaagccttaccagccggatatgaggttgttaagatgaaaactggcgaaccgaagatttttgcggacaagtttatttatggcatgagtaatcataccggcacgatcttgttaaaatccaagaatgcgttgccgttagtttatacacagcagcatcagattagtcaacgccaatttaatcgcttgaacgcagttgaccgcgagcaagccttgttacaaggtgcggtcactacgcagcaggttagtggtgttaagactgtcaagccaaccgttaccggaaaaaacgtcgcttatacggttcaagcggatacgacgaatgttttggatacgttggacaaggtgattatttaccgcaatcaacatgcaacgggagcgtcgaacaacgcgttgactaagttaccggcagatacgatcacattaacgccggaacaacgagaaagtttgacgccggcaactggcctgacgacaccgtcaaaccgcgtgttgaacttgattgcagctaatcaaaagttagtccagaaaaatcaggaaaacaatgccgacgagttaacgagcatggtcagtgatgtgcaggggcaccagataccgtaccaattgaccattcaacaccctaagaagtatcgaaatacggaactctatcttgtgctagatggcatcagttatcggcgttcctcaatcaagcacgccttgacaacgagtcaaaataccaacgtgttcacggcccgtccgtataccaaagtcgattatctagatgatgttcgcgatggtctgaagggcaatttgagcgctagtgggtattctttaactgctcagacaacggataacttgacgagctttagtcagttgggtaccacgaatatgtcagattatgagccccggacatcagcagtaatcaacttagggtatagcaagtacgcgcgtaagctgattacgttgaactttacgagcattcgtagtttgcattttaagtccgctaaactgatcgctgtaccgcttgggaagacttatcgtcaacggacgcggcaactacagacgagtgggttgaagcatcaacaagtgacgaacaaccagattacgggaaccacgctgactaagacagcaaccgtgttaacaacgtcaattccgtattcgactggttggcagctacgagttgacggtcaaaccgttaggacccaagtcgtcaacaaagggtttgtgggggccaagttgacagccggccggcaccagattcggttgacgtatcacacaccaggactaaaaatcggcatatggtcgagtattattggtggtgtgattagcatactgattgcctgctggtgggggcttcacaaacgtgtcagacaatcttaattgagtaaatcggtattaaaataggcttcttaggaattaactttgattcctaagaagcctatttaacgttagatggaacacaaacgaatgtatgccatagcgaaattcacaattaacagccacgactggttaattatgagatgtcgctaacgcaattaattgttcgggaatgaccggtgcagtgactaatttttgccattcactggttgagactaacatgacgagtggcgtgctgaccgttgtcaaccacgttttctgcgggataacgggtgccatggccgttgtgatgtcggtattgacctcagactcagtaatctgccagagtcgatgtgtgacgtgcgcggtatccgtcacctcgacgaccggggcaaaatgaccgacccagtcgtcaatcaacatctcgataacgggctgctgtgggtaaaggactgtgttgatcgtgccgggaaccatggtcgtcacggtttgatccaccggccagctgccaattaagcgccactggtgaacaccgttgagtgtgagttcgtaccagtaatagctggcttcggttgtcgtcattgtatcctggctgtcccaattggtcgcagctgtttgaattttagtttgaccagttgtggttggtaacaccgctttaaacggtttgagttgcatagcgagacctccctaggactttgagcatagcatgacgttaacgtggcggcaagcatttcttgcaacgaaatccgtcaatcgaggtgaaattgatttaacattaaaatttggtttttatcggtgcaccagtgttaagccactgtgaaaatgtggtacaatttagcaagcaaacatacgttttatttaaaggagttttttcggtgtacgaatattttctcggtcaagtgaccgatgtaacccccggttatgtggtgattgaggtcagcggcattggttataaagtgctaacggctaatccataccgttaccaggtgggcccaacagcagttaagatgtatatccatcaagccgtcagcgaaaatggcatgagcctatttggcttttttgatgctgacgagaaggcgttgttcgaaaagttgctcggggtttcgggaattggtccgaagtcggccctcgcgattttggccaacaacgaccatgcaggtctgatccaagccatcaatcaagagaatgcgacttatctgacgagttttcctggcgtgggcaagaagacagctcagcaaatcgtgctggacttgaaaggtaaattaaacgatctaaacgttgatgtgactggtcaaactgcgctcgatgtggatgctcctgctgttgatggcgcgttagcggacgcgttggcggctctggaagctcttggctattcgaaagcggatgtcaagaaggtcactaagaagttggagacgtttagtcagacacaaggggccgatacgaacaccttgttgagtgaaggactacgactattgatgaagaagtagatgggaggggtaactaaatggacgatgacaagttattatccggtgacaaagccgatgacgaagaggcgtcattagaaaaatcgctccgtccgcaaacgttagcccagtatattggtcaggcccgggtcaagcacgaattaggagtgtatattgaagcggcccgcaagcgtgaggaatccttggatcacgttttgctgtatggtccaccgggattagggaagaccacgctagcgatggtaatcgccaacgagatgcaggtcaatatccgcacgaccagtggccctgcaatcgaaaagccaggtgatttggttgcgctcttgaatgaactggagccgggtgatatcttatttattgacgaaattcaccggttaccgaaaatcgttgaagaaatgttgtattcggccatggaagatttttttgtcgatatcgtggtcggacaggggccaaccgcccatcccgtacactttccactgccgccgtttacgctgattggcgcgaccacccgagctggtatgctgtcagctccgttacgtgaccgatttggaatcgtcgaacatatggcgtactatgaagttgctgatttggaagatatcgttaagcggactgcagatatttttcaaacgagtatcaaaccatcgggtgcccacgaaattgcgcgtcgctcacggggaacgccccgcattgctaatcgcttgttcaagcgaattcgtgattttgcagaagtggcggatcaagatgccattgatgaggccatcgtggcgcgatcactgacatatttacgcgtagatgatgccggcttggatgagactgacaataagctcttacgaacgatgctagagtattatgacgggggtccggtcgggcttgctacgattgcggccaatattggtgaagaaacggatacaatcgcggaagtggtcgaaccgtacttactccagattgggttcttgaagcgaacacaacgtggacgcgttgttacaattaaaggttatcagcatttgggattcccatacccagaaaataaataaagataagaggtcacaacatgagtttaacacttgaagattttgattatgatttaccacatgaactgattgcccagacaccaatcaaaaaacgggatagttcacggttgttggaattggatcgccaaacgggcgaaatgcaagataagcatttctacgatattattgatcaactcaatccaggcgatgcggtcgttatgaataattcccgcgttatgccagctcgtttgtatggtgttaaacctgaaactggtggtcacgctgaagtcctattattgcataatacggaaggtgatgaatgggagacactcatgaaacctgccaagcgtgccaaggtcggtaccgtgatttcatttggcgatggtaagttgacggcgaccgtaacggccgaaaaggaagatggcattcgaatgatcgagttccattacgatgggatcttcatggaaattttggagagcctgggtgaaacgccattgccaccatatattaaagaaaaactcgatgatccagaccgttatcagactgtttatgccaaggaaaatggctcggcagctgcgccaacagctggtttacactggacgaaggaactcttacaaaaagttcaagacaagggtattaagttggtttacttgacgctgcatgtcggactagggacgttccggccagttgaagaagataatatcgatgatcataagatgcacagtgaattttatcgattggacgaagatgctgctaagacgttgaatgaagtacggcaaaatggtgggcgcatcattgcaaccgggacaacgtcaatccggacgttagagaccattggtagtaagtttgatggtgaaatcaagccggattcgggttggacggatatctttatcaaacctggttatcaatggaaagtcgttgatgcgttcatcacgaactttcatttaccgaagtcgaccttggtcatgttagtggctgcctttacgggccgtgatatgattttgaaggcttatcaacatgcgattgatgaaaagtatcgcttcttcagttttggcgatgcgatgtttattcactagtataactggctttaaacgagatcgcttattttgaaacggatgacggttgaatattaaaatgccgtattatacgaggcgtatcgctaatttcaagctgacgttttagctctggagataataaagattgtcaatagtcgcttcaagaagttaaaatgcattcttgaggcgactatttgacgtttgaacgctttgttaacagactgactaaagccacgtgggtgcccacgccaattgccgcgactggttcacggctggatttcgtgctatcattatttgagtttagcaacattttaatacggaggaacagatatggaaccggcaattaaataccgattaattaagaaagaaaaacacacaggagcccgccttggcgaattgattacgccacacgggacctttccaacaccgatgtttatgcccgttgggacgcaagccagtgttaagtcactggcacccgaagaattagacgcgatgggtgcgggtgttatcttatcgaatacgtaccatctgtggttacggccaggcgagcaaatcgtgaaagaagctggcgggttacatcagtttatgaattggaaaaagggaatcttgacggattcaggtgggtttcaagtcttttccctggctaaaaaccgtgatattacggaagaaggggtccactttaagaatcatctgaatggctcaaagatgttcttatctcctgaaaaggctattcaaatcgaaaatgatcttggcccagatatcatgatgagtttggatgaatgcccaccattctttgaaagttacgactatgttagcaagtcagttgcccggacaagtcgctgggcagagcgggggttgaaggttcatcaacaccctgattaccaaggcttatttgggattgttcaaggtgcgggctttaaagacttgcgtgaacagagtgccaaagatcttgttagcttggactttccaggctactcgattgggggcttatcagtgggtgaatcgaaggctgagatgaatcatgttttagacttcacgacgccactattgccagaaaataaaccccgttacttgatgggagttggctctgcggatgccttgatcgacggtgcaattcgtggggtcgatatgtttgactgtgtcttaccgactcggattgcccgtaatggcacttgcatgacgtcccatgggcgtttagttgtcaaaaatgcggcctacgctcacgatttcaccccgttagatgataattgtgattgttatacctgtcgtaatttcacgcgtgcttatattcgtcatttgattaaggcggacgagacgtttggtttgcgtttgacgagttatcataacttatatttcttgttacacttaatgaagcaagttcgtcaagccattatggatgataatttactggagtttcgccagaacttctttgaaatgtacggttttaacgataaaaacccgaaaaacttttagtgctactggtatttcagactgtaatttgttaaagttaaagatagtcaaacttttaattagagtaggagcgatattaaatgggtcaaatggcatcaattctgtttatcgtggtcatgttcgcattcttatacttcttcatgatccgtccacaacggaaacaacaacaacaacatcaacaaatgttaagcaaaatcaaacgtggtgacaaggttacgacaattggtcgcttgcacggggtcgttgatgaagttaacgaaaccgaaaaaacagttactttagactgtgatggcatctacttggtttttgatttgaacgctgttgctaagatttctccagccgaagatgcacaagctaagacagttgcaccagaatctggggcagcggctgaatcagctgctacttctgaagttgaatcggcaagctcagccgccgacgataatgctgattctgaagcaaaataggtttacaccataagtggtcgatcattactgatgaccgcttattttttttgcttattttttggtcttgaaacgcgcttttgaacgtatgttcgtgtataatgaaagtactaaggattggaggggcggcggatggcacagtcaattgttgaagcgcctattcgggtggatacgagtcggaaaattattcatgtggacatggacgcgttttatgcgtcgatcgaagagcgggagcatccagcctacaagacgcagccgttagtgatcgcgcatgatcctcggcagacaggtgggcgaggcgttgtgacgacggctaactatgttgcccgccaatttggtgttcactcggcgatgccagctgctaaagcattagaactctgcccaacagcagtatttaagacgcccaactttccgttgtaccgcgaagtttcggcgcagattcatcgtattttccatgagtatacagagatgattgagccaattgcctttgatgaggcttacttggatgtgactacgaataagaaacacatccatagtgcggtcgaactggcgcaccgattacaacaagaaatttggcatcaaacacatttaacttgttcaacgggaatctcctacaacaaattcattgccaaactagcatcagattatcgaaaaccagcgggtgtgacgatcgtattaccacaggatgcagaaccatttttattacgtgaacccatcgagaaatttcggggtgtcggtaaaaagacggtacctaaaatgcacgatttaggaatcaagactggacaggatttatacgcacagtctgaattagacctaatcaaacaatttggcaagttgggctatattttataccggcgagtgcgcggcagtgatgatcggccagtcgagtatttacgtgaacggaaatcaatcggcaaagagcggacgtttggaccgtttctccaatcgacgacggaagttaatacgcacttgaaggccatcgctaagttggtagcagctagcatgcaatcgcatcagcgccacggtaaaacactcgttctcaagttgcgttacggtgactttgtcacaattaccaagcggcgaacgttcggtgaattcatacctaatgacgcggccttgtttgagcagtacgccgaagagatttttgaagaggtggtcgatgatcattttaactctggcatccgcctgttagggatcacgctaactggcttggcaccactggcgtttgagaacttaacgttaccactttatccaaatgataattaatttatttggcgcgacgcggattcttcggtatactggagtactgtgacagtttaatcgccaccagtaaattatgagagtaagaaggttcatttatgaccgtccaaacagcaatttttgacttaattaaacaagcaaaaacaatcatcattcatcgtcatcagcgacctgacccagacgccatcggaagccagttagggttagcagctatcattaaagctagctttcctgcgaagcgggtattgacacctggaaaacagtaccatggttttgactggttaggacaaatggatgaggttaccgaagcggactatcaagacgcactagtattaattcttgataccgctaatcagccccgaattgatggtgaactttggaatcaaggtaagacaattgttaaaatcgatcatcacccaaacgatgacgctttcggtgacccacagtgggtcgacgctgatgcttccagtacgagtgagatgatttataattggtacgcaccccttgcggcggagttaacgctaacggctaacgccgctcggttgttgtatgccggcatcgttggggacaccggtcgctttctatactctgcgaccaagcctagtaccatgcgagcagcagcggccttaatggaagccggtgcggatgctgaagctgttaatcgtattgaagataccatcacgttaccagtcgcacggttgtcggcctacgtttatgaacatctgacacagttggattcgggtgcagcttacgttattttaacgaatgcgattctcgattcatttgcaatcggtgatgctagtactgctggggttgtcccattacctgggcgtattgatacggttaagtgctgggcgatttttgttcaacaaaaggaaggtgacttccgtattcggttacgttcaaagggaccgtcaatcaacggtgtggccaagaaccatgatggtgggggccacgcattagcgagcggtgccaaggctaaagaccaacaagaaattgaaacggtagtgcgagaactcgaccaagtcgctagccattatgagaaagaggtttaaatatgaccgcaagttttgaagattttaaattgcagccgttcttgatgcaggcactgactgacatcaatttccgcaaaccgactgcggtacaggaaaagttgattccagtgattgctgctggccgcagcgtcatcggtcagtcagcaactgggagtggtaagacgcatacgtttttactgccaatgatcaatcaactgaatgctgatgaacgttacgtgcaggcagttatcacaacgcccagccgtgaattagcttatcagattcagactgctgctaaacagttgatccaacacagcccgaaagccattcacattggactctatgtcggtgggactgataagcaggaacagattgaaaagctaaatcggcaccaaccacagttgattattgggaccccaggacggattctggacttaatgcgctcccaggcactcgatgtgcatcgtgcgactcagctagtagttgatgaagccgatatgacgctagacttgggctttttgaacgtggttgaccagattgctggccgaatgcctgctgatttacaaatgttggtgttctcagccacgatgccacaaaaattaacgccatttttgcgcaagtacatgaacaatccagttatggaagaaattccagtagaatctgtgattagtccgactattgataactggctgatttccaccaagagtcacgataaaaacagtattatttatcgcttgctgacgattggtgaaccgtatctcgtgttgatttttgctaacacgaaggaacgagttcaagagttgacccattatttgcgccaacaaggtttaacggtcgcaatgatccatggagatatccaaccacgtgaacgaaagcgggttatgcgcgacgtccaacaattgaagtatcaatttgttgttgccactgatctagctgcccgtgggattgatattgaaggtgtttcacacgtcatcaatgatgatattccgaatgacttagaattcttcattcaccgtgttggccggaccggccggaatggaatggcggggactgcgattacgttatatagcccaggcgaagaagccaaggtcagtgcagttgaagcaatggggatcaagttcaaaccgaaggcgattcgtgatggtgagattgtggattcatatgaccgtaatcgtcgggctaaacgggggccaaaacaggaaaaactggacccaaccttgattggttacgtcaaaaagtccaagaaaaagatcaagccgggttacaaacgccgcattcgtaaaaagatcagcgataaggcgcggatggaccgccgcatcgaacaacgagcggctgcccgcaaggaacgcaaggatcgtaagtcttaattgacgtgcatccggatagattaatgcaaaataactgagtggtgtattgacaagtcgccgcaagttttctatactttgcaaagtaaggacatatctatctcacatatcggtcaagaaacactttggttgctggaaaaagtgcggtgtggggtagatgctacctagaagtaatgactagcaaactagtccgtgtctcagcgttaatgagcttaagaggtaaacgaacacatcgttgcaagcagagtggtaccgcgttaacagcgtctttgctagcaacggtgtttttttgccttaaattaagaatgatagagaggatgccagaattaaatgaaaaaattaagtagtagtgaaattcggcaaatgtacttggacttttttcatgaaaaaggtcatacgattgtccctagtgcatcactagttcccgtggatgacccaacgttattatggatcaactccggtgttgcaacgatgaagaagtactttgatggctccgttgtgccggataacccccgcatgacgagttcacagaagagtattcggacgaatgatattgagaatgttgggcggacggcgcggcaccacacgttgtttgaaatgcttggtaatttctcagttggtgactacttcaaaaaagaagcaatcagttgggcctgggaactcttgacctcaccaaaatggtttggctgggatcctgacaagttatacatgactgtttatcccaaggacacggatgccgtgaaattctgggaagcaactggcgtgaaaccagaccacatcattaaagtcgaagataacttctgggacattggtcaaggcccatctggccccgattcagaaattttttatgatcgtggcgaagctttcaataatttagctgatgatgacccggaaaactatcctggtggcgaaaatgaacgttacttggaagtttggaacattgtcttttcgcaatttaaccacactcctgaaggtacttacgaaccactcccgcgtaagaatattgatacggggatggggctagaacgggtcgtttcggtctttcaaaatgcgaaaaccaattttgaaactgacctattcctcccaattattcataagacggaagaattaagtgatggcaagcactacggtgataacgcccaggacgatgtgtccttcaaagtgattgccgatcacgctcgggccattacgtttgctattagtgacggggccttaccttccaacgaaggtcgtggctatgtcattcggcggttgattcggcgggcaatcctacatggtcaaaaattaggtttgaaagaagctttcttggaccaattagtaccgattgttggcaagatcatggcttcacactatcccgacgtgctcaaaaatagtgcgtatatcgaaaagatcgtggcttcagaagaaagtcgcttcaatgagaccttgaatgatgggttgaatctgttaaataacttgatcgcggaaaccaagcaggctggtcacgatacactagctggtaaggatgcatttaagttatatgacacttatggcttcccgttcgaactaactaaggaatacgctggcgacgaagatttagatgtcgacgaagctggttttgaagttgaaatgaaggctcaacgtgaccgcgcacgcaatgcacgtagcagtgccaagtccatgggcgtccaacggagtctcttgatcgacatcaaaacgccaagtgaatacgtgggatatgacgaattaacgaatgtgcaggggactttgaacgacattattgttgacgagaccctggttgatcacgtcgacagtggtcaagctgagatgattttcagcaagacaccgttttatgctgaaatgggtggtcaggttgccgaccgtggtgtgatcttagatgatgccggtgaaatggtggctaaagtgactgacgtacaaaatgcacccaacaagcagcatttacacaccgttgaagtgttgaaaccaatgcgaaaagacgcgacttatacgctgaacgttgacttggcattccacaacaaagtcgaaaagaatcataccgccacccacttgttagaccaggcgcttcgtgacgttctcggtgaacatacgaaacaagctggttcacttgtagaacctgattatttacggtttgactttactcactttggtcaagtgactgacgaagagttagctaaagttgaacaaatcgtcaatgataagatctgggcagcgttaccagtcagtgctattcaaacggaccaagaaactggtcacaagatgggcgcaattgcggttttcactgaaaagtatggcaaaattgtgcgggttgtttcaattggtgattattctatcgaattcgatggtgggacccacgttaagaacagtagtgaattggggctatttaagattgtttccgaaacagggattggcgctggaacgcggcggattgaagccgttacttcgaaggaagctttcgaactgcttgccggcgaagaacaaaccttgaagcaagttgctgctcaagtcaaggcaccgaagttagctgatacgccagccaaggttagtcagttacaagccgatctcaaagcggaacaacagaaccgggccagcctcgaaagtcgcttagccaaacagcaggctggggcagtctttgatcaagttgacgatgtgaacggtacgacgttgatcgcccaacaaattgaagtctctggcatggatcaactccgtcaattggccgatacttggaagaccaagcagtattctgacgtactggtacttggaacagtcattggcgaaaaggtcaacttattagttgctgttagtgatgacaaggtcaaggcaggtatcaaagctggtgacttgatcaaagccattgcaccaaaagttggtggtggcggcggtggccgcccaaccttagcccaagctggcgggaagaagcctgctggactaccagcggcgctgaaagctgcgcatgagtggcttgccgaacaataagactgattgctttggttgcacatcctgttttttatgttggttagctatgttaaagctatcaaaataacaattaaatcagtgctgttaggacgagaccgttctaacggtactgattttttaatgttatggcaccttgtgaccggcttaactcgtagaagattgggttacaaagggtgtgcctgttttgaatttcaactattcgaacattcgaaacaggggtatgtcagtatatgaaaaaacagtgtaaatcgggatgaatttgcagaaaacgtctgcattctccgggttattattacgaatgtgttacatcaaagtggattgattgtacttcatatgggcatttagtaaaatagattagaaccggaaactagcgggaggtgcttgatatgagttcattagacaaaacaatgtactttgacttcgataatgacagcgttaaggatgtccacgacacgttaacgacagtttatgaagcgttacaagaaaagggctacaatccgattaatcaaatcgtgggttacttactatccggtgatccggcgtatatcccgcgcttaaaggatgctcggaacttaattcggaagcatcagcgcgatgagattatcgaggaacttgtcaagtcttacttaaaggcagataaggatgttgatgcatgaagttgatggggttagatgtaggttccagaactgttggcgttgccattagtgatgcttttggatggacggcgcagggcgttgaaattattcgaatcaatgaggatgctgaggaattcggaatcgaccgggttgctgaactcgttgaagaattggatgctgggggctttgtcctagggctaccaaagaatatgaataataccttgggaccacgggctgaggcggcgcaacattacggcgagttactgacagcccggtttcatttgccggtagactttgaagatgaacgtctgacgaccgttgaagctgaacggatgttggttgaagaagctaacacctcacgtaagaaacgcaaaaaggtgatcgacaagctagctgcaagtttaatcttgcaaaactacttggatcgccacggcaaactcacacaagaatagcgaggaactaacatgagccaaaaccaagatcgtaaagacaatgatgtgatcacattagttgatgacgaaggtaacgaaaccttatttaatattttgttcacgtttgattcagaagatttcggtcactcctatattttattatatccagctgatgctgcggccgatgatgaagttgatattcaagcctacatctttaatcctgaagatggcgacaatggcgaattacaactgatcgagtcggacgacgaatgggatatggttgagcgagttttgaataccttcttagccgatgacggtggcatgcaatagtcgaaagtagattaagctcgtgggcgtatgtccgcgggcttttttagaaattatgagacggttctaactgtcgcataattgtgataaccatgctagaatattaattgttattgaaaggaagcgggatgttgatgactgctaacaagcgccgctttaaagcggaaattgatggtcgtacttacacgatcattggcacggcatctgaccgtcacatgcaaacggtgacgcggatgatgaatgagcaagtggcacaattaaaaaaattagcccccgatttgtctgatacggagattgcgacgttgctcgcattcaatgcgatttcagatcaggttgacaaacaagctgaattattgaaaatgcaaacggatgatgccgacaagtaattgcattgtccgtttttttgcggcttttcgtaattcattggaacttcggagggatatcagtgaattccaaagtattgaatacgttagagtaccaacaagtaaaacaacaattagcaccatacttagtctcggcaacgggccaacaagcactcaatgaactacacccaatgaccagcgttgcggatattcaacgggccttagatgaaaccaacgatggggcagaagtgtatcgtttaaagggtggcattccggtcgctcgtttagcggatataaaaccgcatatgaaacggttagctatcggtgcgaccctgaatgggagtgaactcgggcaagttgggcgggtgttacggacaacgcgcgcaatcacgcgcttttttgccgagttgctagaagatgcccctgagaatgatattcgacacctgtttgatgaagttgcagaattagttactttaccagatgtgacgaagcgcctcgctactgccattgaaggtgacggtcatatcacggatgaggcgtcaccagaactgagccggattcggagcaatatccgtcgtactgaaacggagattcgtaaccaaatgggtcattatacccgtgaccatgatgccaagtatttaagcgacccaatcatcacgattagaaacgaccgttacgttatcccggtcaaggccgagaatcgtagtcggtttggtggcatcgtgcatgatcaatcagcgagtgggcagacgctctttatcgaaccccaggctgtcatggcgatgaatgaccggttacggcaaaatcaagttgcggaaaagcaagaagaacagcgtatcttggaggcactctccaacttgattgcgccttaccaggacgaaatcattaataatgcggcgattcttggacatttcgactttatcaatgccaaggcgcgttatgcgcatgatatgaaggcgactgaaccggccgtttcacccaaaaatgaagtctatctacggcaagcacgccaccccctgattgatcctcgcaaagtcgttgccaatgatattagtttaggtactgattatcaggcgatggtcattacggggcctaacactggtgggaagacgattacgttgaagacgctgggattactacaattgatggcccagtcaggattatttattcctgttgaagccggaagtcgcgttggcgtttataatgagatctttgcggatattggtgatgaacagtcgatcgaacagaatttaagtacgttctcatcccatatggaaaatattgaaagtttcttagcgcagatcgacgctcacagtttagtactcgttgatgaattgggtgccgggactgatccgcaagaaggtgcggcactggcaatcgcaattctggatgccattggggccaagggaacccaagtcgttgcgacgactcactacccagaacttaaggcgtatgggtttaaccgacctgatacgatcaatgctagtatggagtttgacgaagaaacactcaagccgacataccggctattggtcgggattcctggtcgaagtaatgcgctcgatatcgcacagcggttgggcatcccgcaagcgattgttgatcaagctcggtcgttgacggatacggatagtcaagacctcaacgcaatgattgcggatttggtgacgaagcgcaaacaggttgaagatgaacaactgcatctgaaaacccaagtggcagattctgaaaaattgcaccggcagttgaagagcgaattcaatgcgtatcaacagcgtaaagatcagttgatcgaagatgccaaagtgcaggcgaacaccattgttgagcaaagtaagactaaggccgatgctatcattagtgatttgcgtaagaaacaattagcgagtggtacggcgactgtcaaagaaaacgagttgattgatgcgaagggcgcgttgaatgcattggagcaacagcctaagctcaagaaaaaccgtgtattacggcgtgccaaagcccaacatgattttcatgaaggtgatgacgtgctggtcaaatcgtatggtcaacgtggtgtgttgatgcgtcagatgggtaaacacgagtgggaagtccaactcggcatcttgaagatgaagattagtgacgttgacttggaacgcgttaagccagaagagccaaaacgcgcgcgtgctactgttcagagtgcccacgcgagtcacgtttcgccgaacttggacctgcggggtgtgcgttatgaagacgcgatgactcaagttgatcgctatattgatgctgcgttgttggccgggtatccttccgtcacaatcgtacacgggaagggaactggtgctctacgagaaggcattaccaactatctcaagtctaatcggcaagtcaagtcgtttcactttgctgcgccaaatcatggcggcaatggtgcgactgaggtgcagttcaaataaccagtgacgagtgccaggtgcagatcagtgatgacgcgaattcatggctgtgcacgatatcggcgctttgattgcaggcaaattgtttgtgttccacccggttactggtatacttactattagtaacagataaagcttaaaggaggccgattataatggtcgcagcaactactgataaaacttttacaacggatacggcttcaggagtaacgttaactgacttctgggcgacatggtgtggtccttgccggatgcagtcaccagtggtcgaacaattagctgacgagatgggtgacaaggtgacgttcaataagatggatgtcgacgccaaccctgaaacggccagcaactttggtatcatgagcattccaaccttattagttaagaaggatggcgaagtggttgataccttagttggctaccattccaaggaacagatccaacaaactttagctcaatatctataataagctgggccattatttcattaatggttcgctagcgaacgcgccttcttaagtgaacggcgcgtttttttgcgctcttttttaagaccggggacaaccgttaataatgactatataaggaaaactatttaacgttgcaaaaaagggcgaccacgtggccgtcctttttactgtgcttcttcaggttgttcgtcatcaagttcaacttgaggccgcacgatttcgattggtgttgcgggatcgtgattgacgattggttgattgtgatcaatcgtaactgagatgcgcagtcgcatgcgattttggaacgtaattttagcttcactcacacagttggtgcggagcgctgactgctcagctagaaagccagtttcaagcataaagtctggtgatttgatcgtggcgctacgccgagcgaccggctcaccagtcaattcatacgtgattagatcatccgtcgttgtaatcacgacaaggtgaccccagccggtttgctcgaaaaaggtaacaagatcatcatcactagcgacaggaaactggcgtgccaagtctttacccgcccagtaaaggatgccactactgtcatcacccaataactttggtattaaggcatctcgcaagatttccacactgaggatggaagctttgatcgagttgcccgcaaattgagaataaaagtcgttcgtcatgataattcctttccatgcaaaaaatcgtggtactctagccactgtataatcattattataccccgtttccactaatgtgtcggtttttttcaatttatcaacggaaactttacaatttcgtcgcaattggtctggcttgaaatcaatttcaaaaaagaccataataaagtttcagaattcagtgaacggagattttaaaatggcaaatgaacatgcaattggcttcatggattcgggggttggcgggttgactgtcgtcaagcaagctttgaaacaactcccgcgcgaaacagtttattttattggtgatcaggcacgtttgccatacggtccgcgaccagctgaacaagtgcgaactttttcttttcagatggcggatttcttaatagcaaagcagatcaaaatgctcgtgatagcttgtaatactgcgaccgcagcggcattgccggcgttgcggcagcagttgtcaattcccgttattggggtgattgcgcctggttcgcgggctgcgttaaaagcttctcatcgtaatcgaatcggtgtgattgcgactgaggggacgattcgtagtaatgcttatcgagatgctatcttaaccaaagatcctactgcgacggtcgtttcgcaggcgtgcccaaagtttgtgccgttggttgaatcgaatgagtatcaatcaacggttgccaagcgggtggttgcggaaacgttgaaacaactaaaaaaacaagacgttgatacgcttgttttgggctgcacacactatccattattgcggccacttattcaaaatgtgatggggcctggggtgaccttgattgattctggtgccgaaacggtgaacgatgtctcggcggtactcgattacttggatattgctaacgatcgttctactaagcgttatccggatgagtactacacgacgggggcggctgatcaattcgaagcaatcgcgcggaactggttgggccaaccggactttcacgcacaacatattgatttagggagtgaagcgaatgactaaaccacaaacattgatcattgcgactaacaatgccaataaggcgcgcgagtttagcgcgatgttggcaccgtatgatattactatcaaaacgttggctgattttccaaatattcctgaaattaaggagaacggtatcacgtttgaagaaaatgccactaaaaaggcgacggttgtggtcgaagcaaccggattaccggcaattgcggatgattccggcttgatggtcaaggcgttgcacggcgatccgggagtgttctcggcacggtatgctggtgatcatgatgatgctgcgaataatgccaagttgttagccaaccttggtggcgttcctgaagcggagcggaccgcgacttttcatacgaccctggttgcccttaaacccagtggtgagaaacttgtcgttaacggtgagttagccggccgtattctgattgccccccgtggtgacaatgggtttggttatgatccgttattttggtcaagtaagtttcaaaaatccttggcggaattgacgccagcacaaaaaaatcaaatcagtcatcggggtgcagccttgcgacaactgatgactaaattcgatgaatggtgggcgaaagcatgaaatgtttagtagtgagtgatagccatggcgatcgtgacgtgttagttcgattgcttgataagtaccgcggtcaggtcgacgccttttttcactgtggtgattctgaattaccgcatgatgacgcggtttttcaagagatgttcacggttcaaggaaatatggatttcgatgccgtgattccaaatgaagtgaatccaactattgatgaggtgacagtctacatgacgcacggtcacttagtcggtgtgaacatgggattggaccatctattagctaatgctgaggtgcacaatgcgaagctggctttctttggtcacacgcatcaactgggtgttgaacgacgaggcggcgtggtcgtgcttaatcctggtagtattacttatccgcgtggtgaatttgcacgtatcggtggcacctacgccatcgtgacaacgtcagccgcaggtatcgacgtccaatattatgatcggcaactacaagcggtgccagaactaaaatttcattttgctgattaaaatgtggtaaaaaaactgatttttagggctgtgcaaagtgcttttgcggttaaaataaagggatgggcttagtgaaggaggcgctgtatgttaattcaaccagttgaggacttattgtcacgtaacgccgaccattatttgattccggcggacgtggttgccaacgttcaaactgataataatttgtatcacgcgtttttagtactaacgaaggtcaagtattccaaaattccagtacttgatcatggtggtcactttgaaggtttagtatcgttgccactgattactgaacaaatgttaggttttgatcaactgaatactgaaatattactgcaaaaacgtgtctgtgacgtaatggagacacaagttaagacggttcatgatgtggatgacgttgaagagacgttacacttgatgattgataatccgtttgttccagtcgttgatgaacagcaaatttttcaaggaattgtcactcgtcgtgaattcatgaagagttttaactttctgacccatgaaatcggcaaacaatatgatatgattgagaaggatttttccactagtgaaaaagctaaataaatttttggagggtctccgatggcaaaattagatgcacaatcaattattaactacattggcagtgcgaaaaagaaaacacccgtaaaagtatacgtgaagggtgctttagaccaattaaacgttccagcaggcatcaaaactttcttcagtggcaacgctggggtattattcggtgactgggcggatgttgaaccgttcttaaaggctaacgctgcaaatatcgaagattatgaattagaaaatgacgcgcgcaattcagccgtaccaatggcagatttgaagcaatacaatgcgcggatcgaacccggtgcgattattcgtgaccaagtattgattggtgataatgccgttatcatgatgggtgcggtgatcaacattggtgccgaaatcggtgaaggctcgatgattgacatgggtgccattcttggtggtcgcgcaattgttggtaagaactgtcatattggcgctggtactgtgttagctggcgtggtagagccaccttcggctaaaccagttcaaatcgatgacgacgtgctgatcggtgccaatgcggccgtacttgaaggcgtgcatgttggtaagggtgccgttgtggctgcgggtgcgatcgtcattgaagacgtcgctcctaacaccgtagtcggtggggttcctgctcgtaagttgaaagatattgatgataagactaagagcaagactgaattaatggcagaattacggaatctttaatggtggagggataaacaatggtcttacgggaaaccgatctaattccaatttatcaacacttacaccaaattccggaaatcggcttacaagaacatgaaacacaggcttatttattgtcgattattggtaagatgcctcaagagtggctgacaatcaaaaccattcctactttggatacggcgattttagtgaaagtcagtggtttaaagcatgattatcgaatcggttatcgaactgacatcgatgcgttaccagttactgaaaatacgggcttaccatttgcatcgacccatccaggtgtcatgcacgcgtgtggccatgatattcatatgtcagtcgcgctaggaatcctaagctactttgcagagaaccgacctgcgaccgacatggttttcatgttccagccggctgaggaaaatgcctcgggtgggcaacgcttgtacgaaagtggtgcgctagatggtgattggatgccagatgagatttttgcattccatgacaatcctaatttaccaactggagcgatcggttgccggatgggcacgttatttgcgggaacttgtgagatccacgcacacttaagtggtaaaagtggacacgcggcttacccacatcaagcaaacgacatggtcgtcgctggtgcggcgttagtctcccagctgcagacgattgtagcgcgcaacgtggacccgattcaaagtggtgtggtgacattaggtcactttactgctggcacgattggcaatgtgattgccggtgaggcccagattgacgggacgatccgagcgttgacgcaggagatgaacatgcatattcagcggcgggttcggacgattactgaggggattgcgctcgcctatgactgcaatatcgatttgaagctcaatcaaggtggttattatcccgttgagaacaatgacgcaatcactgctgattttatcaagtacatgcaggaggatgatgatgtcaactttattgaaacggaaccagcaatgactggggaagactttggttatttgattcatcagattccagggacaatgttctggttaggggtcgacagtccatattcgttgcactcggaaaacatggtgccgcacacggctgccattatgagtggggtcaatgcgatgaccagctttttgactcatcggaatgcgttacacaaataaattacaaaacgtactgcgctaacacgtgtcagtacgtttttgagtttcaagaatgccgagcgttgttgcaattaatggttggttgtgaccgcacaatagttttcgcctggtcacgttaggttgcgaatgggaataactaaaactattcctgacaataacaacgtgcgtcatggttcccacctgaagaaatttgtcagatgaaagatcaagcccgcaccgtggcgctcatttctgagcaaccgctgtgcgggcttgtgttggttgagcttacttgtgcgttggggcgatatttaaacgtggcgaggggagttgaattcccgctgctcgggccgcgttcaagtaggcggccaaaaagtcgcgctgaattgcgaactgcatgccatttttgacgtaaaattgtactcggaagaccaacgtcccatcggcttgtgtcgtgacgccttgaatgtcgggctcaccgatgatatcaggatactgaggcacgaggtcggcattagtttcgcggaccacgttagtcagatcttgaacgggagtcgttgtgagaatgtagaggtcaatcagcacgcgcatatcgttacgcgactggttgctaatgattaaaatcttgcgattgggaataaagttcaacgtgccatcgggactcgtaacttgagttgtccgtaaaccgattgcggagacggtcccctcaatggtttcgattttgacgtaatccccaacatcaatctgatcttcaagtagaatgaagaacccggtgacaatgtcactgacgaagccttgggcgcctaaacctaacgccacactgaaaatcccagcactagcaatcaacgtccccacgggaacacctaacactgaaagtaccgcatagatgccaaaaaacatgatgacgtaatggtagatatttaatgataatgtaaaaatcgttgaaatccgattattggcagtatcactggtattagcattcgttaaaaataagtggtggatcaggcgttttcctagccgatcaatcacccaaaatagtaaaataaataaaatgatttcgagtagcttgccgccaatattaataataatttgttgccagtcaattttcttagccaacttcatccacaccgaaacttgtttagtcggtgtgtcaaccgctgctaggttaattgaattaaacatatcttcaccctcgttattgttgtctgttcactagtttatcagatttgacgcgggcaaccaagccgtgatcaagttattgcgaccaaatgtgactgggtgaatgttgtaagcacttttttaattgcggtatactaaagacaatgctatgctagttttaatatcatggctgttgaaggaggaattttaggatgattacacacattgcgggcatcattgccgccattgcgttcttattattagtatgctttatcgggatttttttaatgcggattactaaaacgatgggggaagtcaaccgtagtttaaataatattacggatgatgttgacgccttgtcacatgagactgaaaaaatcatggcaaatgccaatgaactcttaaaggatgttaacggcaaagttgcaacaattgatccagcgtttcaagcgatgggcgacttaggtcagagcgtctctgacttaaatgctgcgactcgagacttaacagccaagattggcaagaacaatgagaagcggagcaagttctccagcgcaagcaaggtcggcaaagccgcttttgatgtctatcgtaatcgacgttcaaaaaataatagtgaggagtcttaattatgtcgaaaaagggattcttattaggtgttgttttaggtggtgcagcgattgctaccgccgttatgaagatggatgatgataaaaaggctgaattgaaagctaaagcacagcaaggaattgccgattttaaggatcgggcaatcgactatgcgttctatgccaacgatgctgctgaagacttcaaggctgaagctgggcaacaatttgaagatacaaagcgaaaagtggccgattttgctgaccagtatcaagccgctaagcaggaaacgggtgaaagctttggctcaagtcttgaccaagctacggatagtttacggtctgaattagctaaggtcgaagatgatgaaggtgatgatgaagatatcgtcattgatggtggagctgcttatcaaaaagctggcgaggacgagaagacttcagcgcccgtaccagaatcagcacctgctaaggacgcaacacctgcgaagtctgatgatgaatcgacaacggatgaatcgtcaccagccaagtaagctgacagcgataagataggacactgagcaagtgctcggtgtcctatctgcttttgaggaggaatcacattgtattcaatcggagcggtcgccaaaaagaccggtatttcaagttatacactgcgctattatgataaggcgggcttaacgccctttgtgaagcgtgataagcagggccgccgggtcttcaatgatgaagacttggattcactggcattgattcgttgtcttaagcagaccgggatgccgttagaggatattcgacaatttattagttggtgtgccgatggggatggaacgattgatcaacggctagcaatgtttgaagagcaacgccaggctgttgaagcgcaaatccatcaatccttgttgaatttgcaaaaagtcaatcataagattgatgtttatcggcgtgcgagtcaggcggggagtgaagccgcggttgactgtgacgtgctgccattgaaaacgacggcggcactgttagccgaagtggctgattatgaaaccgaacatccgctaccggaataacactaaaagcaagtaccagtcaacgctaggtaaaaaaagagggccgtcacggattatgtcgtgacggccctcttgacgtttttaattaaagatctaatacttttaattcttttggcgtatgggtaaatggcttaaagccttccttagtaacgaccccacagtcttcgattcgaacaccagctacgccgggaatgtagatcccaggttctactgagaagcacatgccttcaacgagtggcatgtggttaccagccataatcgaaggaaattcgtggtcagtttggccgattccgtgacctaaccggtgaatgaagtattcgccatagcccgctttggtgatgatatcgcgtgcgattttatcgacatcttcggctgccatgcctggtttaatggccgcttgagcagtcaagttggcttccagacagacgtcaaagatttccttttgcttggcactcggttggccataagcaattgtccgggaagcatcagaagcatagccttcatacatgacgccgaggtcgaatagcactaattcatttggcttgacttgggcttcgttagttgcaccatgggggttggcggcatgttcaccagcttggactaaagtgtcgaaactcatttccataattccctttttcattaaggcatactgtaattcggcagcaatctgttgttcggtgcgacccgccttgacagcagcaaatccttgttcaaaagcaaagtcggcccatttaccggcaatgtttagtttttcaagttcatcagctgttttgaccagccgtaattgctgaatataaggtgatagatccttatcgaagtgggcagctggaaattgctgtttgagcgcggtaaagcggtctaacgtcaagttcccagtttcaagggcccaaactttaggatcagtcaattgtgcgtgaatgtgatcagcaattagcgcgtatggatcttcatggtcgaggtagccgaaaactttgtaaggccagcccatctccttgattgcttcaacttcgagagcgggtgcaaagagaaatggttccgcatccgcgaaaacaaacagtgctagcgtccgttcgtaggggttgctctcaaaaccagtcaaatatgaaattgtgtgaaagttactgatgtaggtcacgtcaacgtgattgtcttgggtccattgacggacttgttgcagtttcgtataatctgtcaattcaaacactccttagataaaataatagataataatactagtatagcgctgttgatgataaaaagctgagaataatgagcccaaaataacaatcttcgtgtggtaaatcttgcattttgaaaacaagtacggtattattttcatgaaagcgatttcaataacaatcttaagttgcattggaagcgtaattttgctatattggttgatgttgcatgaaaacggatgaaaacatatgataccaagcaagaaagggctatttttatatggaaaaacaaacagtaacaatttatgatgtggcacgcgaagcggcggtttcaatggccacagtttcacgagtcgtcaatggtaatcccaacgttaaacccgcaacgcgtaaaaaggtactagctgtcattgaacggttagattaccggcctaacgcagttgcacgagggttagcaagtaagcgttcaactacggtcggggtaatcatcccggacgtgaccaacatttattttgcggcgttagcacgcgggattgatgatattgcgatgatgtacaagtacaatatcattttaacgaactccgatgatgcgggtgaacaagaagtcaacgtgttgaatacgttgatggctaagcaagttgacggggtcatctttatgggtaaccatattgatgacaagctccgggctgaattcaaacgggccaaggcaccagttgttttagctgggacggttgatccgaacaatgaaacgccaagcgttaatatcgactacgctgcagctgttgaagaagtggtcactaacttaattgcacgtggtcacaagaagatcgcgttggctttaggctcattgtcacaatcaatcaacgctgaataccgactgacgggttacaaacgggccttaaccaaggctaagattccgtttgacgacgccctcgtttatgaagcgggctactcatatgatgctgggcggaagttacaaccagtcattgcggatagtggcgctactgcggtattcgttggggacgacgaaatggcggctggtcttatcaacgcaagtatggaatccgggatcaacgttccagatgacttggaagttgtgacgagtaatgatacgattattacccaaatcacgcgtccagccattacctcgattacccaaccattatatgatattggtgcggttgccatgcggatgttaactaagttgatgaacgataaagaacttgacgagaagacggtcaccttgccatacggcattgttcggcggggctcaaccaagtctgctgattaagttcggttgtctgccagctagtgacgttggcataatttagaacgatagcgttatactaggtttggaatatttattccaagccttttttggttttggaatgcgtgaaaggatgagttaaacggatgacacaactaataatgcggccacggcccggaaaaattaagttaggcttgaaggcgtcccaagcacccgcacaattaatggatcgtttgtaataccggcccgaagtatttgaattttttacgagtgccacggactttgaaccggaagcatttcagacacttaaaacagctgtccaatttgtaaagacaactgtcaccgagcaaattgtgattcatcaccctatgagttatcaaggcgttcatcttgatcaattgcttgatccacatcgtgaagctgcggcgtaccaattcctacaaacgagtacggcccagttacttgcgttggcgacggaattggatgtcaaggtgctcgtacacggtggctatggtagcgacagtgggcgcttgatcgatgagtatgagtccttgcaggttgcacgtgacgtggtctttgagcggttggataatttggtttgtcaggcgagtggacatgtcgtgattgaaaatggggtaacggcaagttttatgtatggtgatccccagttagatgagcgtatcattcagcatcattatccgctggtttgtgatttgagccacgtcttcattgcgctgcacggtgatatggaattgaccatgttggctttgaagcggctggctccactcattcaacattatcatttggttgattcgatggggacgcggcacgatagtttacctttagggcagggactgattgactggcagcgggtgttaccagtcctcaacccgcacgctaccatgatttatgaagtgccggatgaaacggatgcgacctgcgctaacatgttgagtagctatcactatctacgcgcactcgaactgcggtcgatcgagggaggacaagcgaatgactaacttagtagtccatgtcgacgagccggctaaggtcgcaacggccataagcaatgtgcagaattttttggcagcccggccaactagtacggtggtggttgtggtcaacgggcccgctatcacgacgctggtaactggtgcctggaagccattacaacagacgttaccgcaagttgagattgatgcttgccataatgccatggtgagtcatcaaatgactgcggcccaacttcctgccagtgtgacggtcgttcccgctggtgtggtgcgaatcgtggacttgcaagctgtgggttacgcatatttacggccataacaccagtttgtcgtggttgtggttgtcattagcaaactgaaatttcaaatctgaaagagagtccaataacgaaactggttcattagatttgcaataaaaatcgcagaacttggacgcccttggttctagtgcttgaaatcgctcgctttttttgctatcatactttacgtatgtttatctactaaactgaaaataaatatgaaagaaggagtcacacatgtcaggacattcaaaatggcataacattcaaggacgtaagaacgcccaagatgctaaacgtgggaaagtctttcaaaagatttcccgtgaactttatatggctgtaaaagccgggggtcctgatccagattctaacgcgcaattgcggttagttatggataaggccaaagctgccaacatgcctaaagacaatattaaacgggcggttgataaaggtagtggctccggtgcggagaactacgaagaagttacttacgaaggctacggccctggtggtatcgccgttctggttcacgcattaactgataacaaaaaccggactgctgcggcggttcgttcagcgttcacgcatcatggtggggctttagccgcaactggtgcggttagttacatgtttgatcgtaagggttacatcgtgatcagtcgcgaagatttagataccgacgaagatacgatgttgatggacgttttagatgctggtggcgacgatttacaatcaagcgacgaagcgtttgaaatttacactgatcctaaacaattagctgccgttcgtgatgccctcgaagctaatggttacaagttggaaacagctgaattaaccatgattcctgaaaacctaacggacgttcctgctgataaagtggaaaagttacaacacatgattgatgaattggaagataacgacgacgtatcagaagtatacgaagctgctaactacccagattaatgatgaaaagacgtggttctttgatgataaatcaagaaccacgttttttattgcttaaaatattagtaaaacaagtgcgtcgaacaggccagtttgctaaaattagagcagttgaatactgaagggacgaataatcatgaataaagtaaccgtactaggtagtttgaatgttgattcgattttgcgtttcaagcgttttcctaagcctggtgaaacgctaccgctgactggtaagagtgtcgctggtgggggtaaaggggctaaccaagccatcgcagccgcgcgcgctggtgcccaaacgacttttatcggtaaagttggtactgatcaggaaggggcctttatggtgcagcagttgacgaatagtggtgttaatgaccaatatgttcaacatagcaatgtggctagtaccggctcagctttcatcttgttagatagtagtagtgagaaccgtatcttaatcgatggtggaactaatcagcaggttacggccgaagatgtcgaacgggcccaacccgcaattagcgctagtacttttttgattgcacagtttgaaacgccgattgcagcaacgattcgagggtttgaattggctcaggccgctgggcaaaaaacgattttaaacccggcaccagctacgacgacggtgcccgcagaattactagcgacgaccgacttaattgttcctaacgaaactgagacggaaaccttgactggcgtgcacattactgatgagcaatcgatgattcagggtgcacagaagttgcaggcgctgggcgttgctaacgtgatcattaccgttgggagtaaaggcgctttctggatgcgcggtgctgagcacggcttcgtcccagcttataaggttgaggccgttgacacgactgcagctggggacacctttattggtgcactcagttcggtcttaatgccagactttagtaatttggccgctgcggtacggtttgccaaccgggcatcttcgatagctgttcaaaaattgggtgcgcaaccatcgattccaactaaggaagccattgaagcggctgagcgggcctaacgccttaattggtttatatcggggcgcttataacgccgtatgttaggattgcaaatgaaaatatgcgatgacgagctgttctggaaataatttgttatttctggaacagcttttttgatgccaaaataaatgtcatttttttcgtggaaagtggtcgttgttacgaaactaatgattgaaaggagcgtgaccatgataaatggtgattgaagcagagttgaacgaaatcattcaggcagccgtgaatcagcgggccagtgatatttattggttacccacggcagaagggtatcaggtgttagtgcaagcagcaggcagtttgcgggcacttactcagattacaactgagttggcccagcaattgatgaatcacatcaaataccgtagtaacatggcgattagtgatcatcggcggccccaattaggggcgatgacgttaacattggcagagcaaactttaaatttgcgaatctcggcagttggcgactttttggaccgtgagtcgttggttgtccggttattgtatgaaggtccggcccgaaaattgagctatttggtcccacagcaacggcaacaattgagtcaattaatgcgacgaacgggattgatcttattttccgggccgatgggttctggcaaaacttccacgatgtatgatcttgtgcggcagcttcgtggccaacggctagtcatgacgatcgaagatccggttgaaatttatgaaccacaatttttacaactacaagtaaacacgccggcccagatggcgtatggcgacttactgaaggttgggttacgccaccatcccgacgtctttattattggtgagattcgtgatgccgaaacggctcggattgcggtacaggcagcgctaagtggtcacttagttttaagtactattcatgcgcgcggtgtctacgggattattccccggttgacgcaattgggagtggaagccgctgttttggagcaggctttaactgcaatgtcctatcagcgcctcgtaccagtgacggatggcagcgtggcgacgattttcgatacggtcgtgttaccgcatgcaaggcccaaaacgtcgcaaatgatgactgaaaggtgggcggagttaattgatgaacaattggcagcgggccgtctcgatcatgcgacggccaatcaacttaaggaagcgtaaacggcttccgattgctatgcaggcgaagctgtttgaaacgctagccgacttgctaggcaacggcttctcgtttcagcaagcctttcaatttacattggatgtagaaggaccggcctttcaatccttgcagcccgcgctggggcgtttagctgcgggtgatgatttgtctatggcgctgcgtccatacattgcggtggacttgtattaccagttcttaattgctgagactcatggtgaattacgccggaccttgatgcaggcaggtcaattaatgcgagcgcgtgctgaacagggacgccaaattcggcggttgttacagtacccttgtctgctgttaattctactgctgggaactttaggcacggtcaaagctgcgattttaccgagtcttgctcatggtggtaatggtagtgggacaatcgcgaattggcaatggtttagcggtatcacggtcattaccttggtgatttgcttattgctggttggccttcaagttagccgattacccattcggcggcgctatcagtggttggctcaagtccccttgattggtcccctgatcagaaactactgtggttactatttaagccttaatgcgggtatgctgctgactggtggtttagggattcgtggcatttgtgaagtcagtcagcactttcaaactaaggcgctgatttatcagcaagggcaggttatcgaacaggcgttactgactgggacttcgttagtcacaattatccaggaggaccgattattacctgatgagttagcactactggtcggcaaagagagtccggcagaacagttaagtcaggaattactatactttgcaactttgcagtacgaacgcttgattcgacagttgaaccggatgattggttggattcaacccatcatgtttggcattattgcactcgtcgttgtcggcacatacttgagtttgttattaccgatgtatcaatcaatgggggagattttaaaatgacattattaatgaaacgcttgatgaaaaaaacggcagcaccacagcgcggttttaccttaattgaaatggtgatcgtattggcgatcatcagtctcttgatgttgatcgtggtgcccaatttgaatcaacaacgtaaacaggcggctggtcgccaacaagaagccctgactgaagttgttcaaaatcaggctgaaatgtatgcgaatgatacgggtaagaccgtcacggatgacgacgcaatgttagaagaacttcggaacaagggatatattaacgatggtcaatataagcaggctaagtcacagggcattagtccggtacggccgcaaccacaaaaagtagttggtggttaagcgacagggatttaccttaatcgaaacggtagcggtcttggcgatcgtggctagtgtggcggtgattgctgtgcaccgttttcccacacggcaacgccaacagaatgcggaacaggctttctggcgggagttacaaacgatgtggcagcaacagaccttaaccgctagtgtgacgggtcagccccaggtcgtgagctttcgtggcacggaagtcgtgacttggggtggcaagcgggggcggcctatcagtggcccacagtggcatctcccactgcctgcaacattaaaaacagagcgcggtcgtgatattcaaatccagaaaaatgggcatccacagctagcagtggttattttcaagtcgcaattacagccgaagcagaaaatcaaactgaatgctttgatggggtggggggcctataaagtcacacatgttaaagacgcgaatgggttttttgatgattgaaacgattactgctctggggctattgatgggtggtttgattgggtttgaaagtttagagattatgatgcagtcacatgaacgccagaccttgcaggcgattcagacagccagaaaacaatatgaagaccggcaacgtcagcagctattatccaggataccggagcaagcacatgattaggcggcgcggttttacgttaattgaagccgttgtgtcgttagcaatcgtggccgtagtgctgacgacactttttcaggggcagcgcaatttggcccggcgcacccaagtggatttgccaacagtggattggtatttgatgcttcacgagcttgaaaatccggatcaccattttgtggtggaccatatttccgatgagggtggtctgacgccgggaaaagccgttcatttggttaatacggtcaccggcaaacagtatttattgacttattatcatatcctacatcgaatcggattgcgccactatggtggtggtgaaatcaatctgatgcagggcgttcggcaatttcacgtggccgatgatttgaccctgacgatgacgactgataaggggattcattttcaagcccaattactgttaccagatcggaggacaatggtagatgaggaagcgacgcggaacgatcctgctttcggtgattagcttattgttaattggtggggcgtttgaaacccaacgatacgttaattttcagtctcgccagacgttatatcgcttgattttacaatcctatgagcacccttatcagcataattcgctcccttgattggtgagtgaaccccgtgacttgaacttaacgcgtaaaatcagtaatatggttaaggattacagattttgcgggagggtgagtattctggcacaagcagaaaccgagacgctttttcaggtcttagatcaatcagttcaagttttgatgcaacaactatccgtttcttacgtggatgcgctcattgagactggcgataatttattaagccaatctgtacatgttgaggatggcaagccaaatccggaacagacggcagctttaacaaagctctatcaaacgatcgacttaaaacaattggacgccgaaacaattcggcgtgcgcttcagttggccttactaaaggcgattcataatgatcacgttgatccaaaccatcaaatgacaccagattcgattggactgttaacggcatacttgattgctaagttagttggatcgacgactgatttgtcaattttggatattgctgtcgggactggtaacttattaactacggtcataaatcagttgcagacggaccggccacgtccgattcagggttacggagtcgataatgatgataatcagttggcaatcgccgcgatgagcatggatctccaacgatcagcagtggagttgtttcatcaagacgcaattgattccctggtcatgccgaaaacgaccgttgtaattggtgatttgccagtggggtactacccattggatgaccgtgtccaaggttttcaaacgaaagcgacgaatggtcattcttacattcatcatttgatgatggagcaagcgatggctcatttgttaccgggcggctggggtgttttccttgttccaacgacgatttttcagtcgcaagagtctcaaggactgttaaaatggatgagcactgcggcttacctccaaggtctgttgaacttgccgactaacctttttcttgatgaaaaatcacgaaaatcaattgttgttttacagaaacatggacaacgggcccaccaagcaggtaaagtattactaggcgactttccatcatttgaggatcaacgtgcctttcaagcgtttaccgctcaaattgatgcgtgggtcgaccagaatattattcgctaggagtgtgtcgtttggggaagaccattgccatcaacgctggtagttcgacgttgaaatttaagttatttgaaatgccacaggaacgggtgattgcacagggcgctgttgaacgaattggattcaaaacttcaccggtcaatattcgctatggcgttgatcatcattaccaagagaaagccgtagtcgcggaccatttggctgccgtgaatatcgttttggatgagttaattaaattgcgaattattgactcatatgatgaaattactggggtcggtcaccgggtcgttgccggtggcgagcaattccatgattcagttttaatcactgaccaagtgcttaagcagattacggatctggccgaatatgcgccattgcataatccggctaatgcggtcggtattcgtgctttcaagcgggtactaccacatgtgcccgcggtcgctgtctttgatacggcgtttcatgcaagtatgccggcggttaactatctatactcgttaccgtatgattactatcaacgatatggtgctcgcaagtttggcgctcatggaacgagccatcgctacgtcgcggtgcgagcagctaaattattgggccgaccgctcgaaacgttgaagctgattacgttgcatttaggtgcgggaagttcgattacggcgattgatcatggacagtcactagatacctcgatgggatttacgccgttagctggtattacaatggcaacgcgctcgggcgatgtggatccgtcgctggttgcttatctcatgaaaaagcttaatattagcgatcctgatgaaatgttaacgattttgaatacgcagtcaggcttactggggctagctggttctgcagatatgcaggagctcgaggcacgttatgatgaggactcacaggctcagttagctattgatatttttgtcaatcggatcgttaagtatgtcggtgcttatttggctgagctacaaggtgcggatgcattagtgataacggctggtatcggtgaacgggatgcacggatgcgacaacgaatcgcggatcggttgacctactttggcgtcgcgattgacccgactaagaatcaagtcagtggtgtcgaacgggacctgagtacgaccgatgcgaagattcggacgttactcattcctactgatgaagaacttatgattgcccgcgatgttgagcgcgtggctcagaatcagtgatcagcatcgtttcaatatgattaaggttgtaaagaggcacgcggatgaaaatccgggtgcttttttagatgctgaagtgaaagttattcatgttagtatgcgttgccttcactttattcacgtagcgggagcgttcactggtttagtcaactaacaaagctgaatcccagccatgcaagttagcaaacgcttacgcgtacataagatgaatttcgttagcgaacaatggtatagtccaatcgtgtgattttcttaagcgtggccttttgaatgctaggaatttggccgctataataatttcaaggggagtgcaaagataatgacgaaagaaaattcacagcctgcgacggaacaactctcgcgaggcttaaaaagccgccatgttcaattaattgccatcggcggcacgattgggactggactgttcttaggggccggtcaatctatccacttggcggggccagcgatcctgatcgcatacttagtgaccggtttagtgtgctttttattaatgcgggcgttaggtgaactactgttatctgaccttcatacgcattcttatattgattttattaagcaatacttaggtgataagaccggctttgtggctggatggacgtattgggtttgctggatcacgattgcgatggccgaaattactgctgctggtgagtatatgcagttttggtggcctaagttaccgcaatggcttccggggctgattatcttgattttattgctgggcttgaattctattaatgtctcagcgttcggtgaaactgaattttggtttgcgattattaagatcgctgctatcttggcattaattgctgttgggattggtatggtcttgtttagcgttaagacccctgtgggccacgccagcttaaccaatttggttagttatggcggttttatgccacacggaatcaaaggcttagtgctttccttccagatggtcctgttcagttttattgggatcgagatggtcggcatgacagcttctgagacggctgatccgaagacggtgattcccaaagcaatcaatgatattcccgtgcggatcattctgttttatgttgggtcactattctttctaatgtgtatgtacccgtggcaatacttttcatcggcacacagcccgttcgtacaagtattcaccaatttgggaattcgttcagcggctgcgattatcaacttcgtagtgctcacggcggccgcttctagttgtaatagtgcgttattcagtaccgggcggatgttattctcactaacgtatgatggcaaaagcaagtttgccaaacgaatggggacactatcgacccgccaagttccccgcaatgcgttatggttctcgacgctggtgattgggttgtcagtaattctaaacttactgatgcctgggaaagtcttctcgctgattgcgagtgtatcgactacttgttttatctttatttggggcgcaatcgtcgtcgcacatatcaagtatcgacgtcaagcgggcagtcaggctaaagtgaaattccagatgccactgtttccgttatctgattacttcattctagtgttcttagcttttatcgctgttgttctctgtctgaagtttgaaacgttaatcgcgttactcgtgtcagcggtctgggtggttggcttatacattgtcaagatcgttagtgaccgaattcgtcaacggacacacgactagtcagcaataaccaggagtgctgattggctatcaagtaggttaactaatgggatttatgaagtgcacttaactctgccgattgcagttaagtgcactttttgacgatattagctagatttgtgaatatgggttggtcataaaacatggttccagtgctgacaaagcaataaacttaaaactgttctagtgtcttttagaacggtgcgcggtacaatgataaatgactaacgcgttgtgtcaggtgttctttaaaatggttcatgattaatacgtgctgttcagtaagtgccaaaactgtcagctttgactcggtggaaacggtttgtttagtataaacttgccgagttagtgtgccatatgatgactgacagtcgtaataggattcgaatgactgacatgggtatatgctgacgaacggataagtcagcttttcaagcaaaagtcatgaaattcgctagacatgacacatccgattgatgttacaaatgtaaatatacgaataagaggtttgaacgatgcaatattttacgtccgacacacatttttatcatgctgatttgttgggggacaacgactttgcgccccggctatttccagatgtagagacaatgaaccaagcgattgttgaccattggaatgcccgtgtgacggatcaggatacagtctatcatttaggcgatgttgcgctgtattttacgcgaccagcgaaattgtcttatgagcgggtttttgcactcttagcacagttaaatggcaaaatcatttttataaagggaaaccatgattcacgggccttctttaagtatttggctgctcatgatccacagttgaatggtcaaccgaagtttgagtttcacgacgtgggggtactgattaagtacgaccaccgccaatactatataacgcactacccaatgatgatggggatcgtcaaacaaattatcaatttgcacgggcatattcatcattatgccgtcaacgtcaaggagaacatcaacgtgggtgtcgatacaccagaagtcgattacttagaccatccggtgccctttggaacgccattttcactggccgagatcgagcagatggttgacggtaaagccattgattttgccaagcgccagtaagcgagtgcttgaccgactttggtgaatgctttaggattaacaaagacaacgattgaggggcgattgaccgtggacgagcaagtcacgattctgcataccaatgatattcattcgcattttgaaaactggccacgtattcaacggtatttattaaccgaacgtgagcagcgccggcaatctggaagccatgtgatcacggttgacctcggcgacgcggttgatcgtgcccatccactctcagaagccactcaagggcaggccaacgtggcgttattgaacgcgattggctatgatgcggtcacgattggcaataatgaaggactgggtttaacgcacgcggccttaaaccggttgtatgaccgcgccaactttgatgttgttctcgataatttgacagatactgcaacgcaacgaccgccgcagtgggcattaccagctaaaatcattacaactgcacgggggacacgagtcttgttgctggcatttacggcaccgtttacgttgacttacccgttgaacggttggacgccggccagtgttaagacgcgattcccagagttgttacgacaatatgcagggcaatatgatgtcttaatcgtgatgtcccaccttggtatcaatgtcgatcggtggttagcaaaacagtttccggtgatcgatgttgttattggcagtcatacgcatcatttactggtgaacggtgaactgaaaaatggggtcctgatagcggcagctggaaaatacggtgagtatattgggcgaattgaactgacgattgatcatcaacatcacgttaaagcggccgcggcgcatactgttgccacggccagcttaccaattgtggccggtgatgaaacgttgattactggctgggagcaacagggtgaaacgttactcacgcggcaagttgttgcgaaggtgccgacgcagctgcggccacattggcaccatgcaagtgatttgacggccctcgggctagcggccattacggactatgccaaaactgatctaggtatgttgaacggtggcctgttcatgcgggatcttcccgcaggcatggtcaaccgaaatgatttacataccatgctacctcacgcgatgcatgttattcgagtgacgttaagtggtgaagcattgtggcgcttagtctatgagatggagttagttcgcccgtttttgaacaaatttccgattaaaggaatgggatttcgtggtcaagtctttggttatatccagtaccagggcctcacgtggaaaacgggacagcatacattactagtgaatggtcagccggtcaatcggcaacaaacgtaccagattgcgttattagatcatgatttattcattccgtttttcccgaccattaatatcagtggtcgaactgagatattatttgaagccatgttaagaacggtcgttggcgattacttaatgcgtcgatggccggttaaataagagaaaggtggtgtcaatgtgaatcgcgaacatattgatgaactagctgaacaacaagcggaacggcggcgcaatttgtatcatggattacgaactgataagacccactttgaagttagcaagcacccgtttgaaatcgtgtacgattatcgccaagggtttgacctcgacaagttcgttgagcgctacagctcaattttaaataaatatgattatattgtcggtgattggggttttgaacagttacggttaaaaggttttttccgtgatgatatgaaagatgtccagcgctcacagacgattggggcggtccaagactatctgtacgaatattgtaattttggttgcgcctattttatcattaaaaacgaacgggtcattaaacctaagcgtaccagtcgctcacgtaaggatgatcggcggggaaagaaaaacactaatagtcggcaatcccgagcgcggagtaaccgtaacagtagtcgcagcaaacaacggcggaagtctcatagcttcaccactaagcagaaggccgcaccgtttactgaaaagcggcggcaaccggcgaaagttacggccggtaatggtaagcaagcgcaaacaacgaagcagagtagtggtaaacgccactttacgattcgacaaaagtaggaacagagagaggtattttgattgggtaagtacaagggttatttaattgatttagatggaacagtttatcgtggtcgggaacgtattcctgctgctaaacggtttattgaacgactacaggctagtcagactgattttttattggtcacgaataacacgactaaatcaccagaagatgtggctgcaaacttagcgaacaatcatgatattcatgtgagtcctgcgaatgtttatacggcagcgttagcgactgcagactatgttaatgaccttgcaggtgatggtgataaaacgatgtacgtcatcggggaacttggcttgaagggtgcaatgttggaaaagggcttcaagttcgatgagcgcacacctagattcgtaatcgttggtttagactatgatgcgacctaccataaatttgaacttgctacgctggcaattaagcggggggctaagttcattggcaccaacgcggatactaatcttccaaatgagcgggggctagtgccaggtgctggttcagtaattgcgatggtcgaacgggccacccaacaacgtgcaacttacatcggtaagccggagacaattattatgcagaaagcggtcgaccggattggtctcgataagcacgattgtgtgatggttggtgacaattatatgacggatatctcagcggcaattaactttgggattgactccttattggtgtataccggtgtctctacccctgaactagtggcacaacaggccgtcaaaccaactaatgagatcaattctttggacgaatgggacctagacgatggtgtggctaaataaatttaaaaatgcggctcagtggctgagtttatacttatggttagtgagtggcacgataattgtaacaatcaacgcgagctggttgtattttgccaatgcggttggtcaaaagttaggcgcaactgtgaatttgacattgggacggctgatgacgaactactatcagctgttagcatatcttaactttccgtgggtacccaaattaactatgaacgattttacggattcgacgagtgcgttggttcactttgcggatgtgaagaatctatttatgcttgattacggtgtgtttatcgtcacgagtgttgtggtctattttttttggcagcgactacgacgtgatcgacaattgtggcggttagtattaccgatgcagacagccctctgggtaccaccagtagtgaccgttataatggctatcaattttgatcagttctttatcatgttccataagatcttatttcgcaattcggactggttgttcgatccactattggaccgaatcattttggtcttgccggatacgttcttcggtcagtgctttgttctagcgtttatcctgattgagtggtcttttttttacttactcagtatcggcagacaagcgttacgtgaagcggattaatgaagagtatttacagtggacactgcattttaagttagattataaaaggccggtcagctattattagctgatcggccttttataattggattaatcttcgttttcagttggatggctaaagcgtgcgcggatagcagagaagacagctggaatcagtgaaaccaggatgattccaatgacaaccatcgaaaagtgttccttaacgaacgggatattaccgaagtagtagccaccaccacaacagagaatgacccacaggacacagccgataacgttgtagcgaatgaattgttgatacttcattcgcgaactggcagctacaaatgggacaaaggttcggatgattggcatgaagcgtgcgatggtcacggtgatgccaccatgtttttcgaagaatttttcggactttgccagctgtttttgattgatcagtctaccaaaccaggatgtttcagttaggcgttctcctaggaaatgaccaatatagaagttaagtgagtcgcccgccaaagctgccaccaagaagagaatgacaaaagtccagatatgtaagccataggttggattagcggcgagtgcgcaagctgcaaataaaagggagtcaccgggaagaaatggtaaaatgaccgcgccagtctcaatgaagatgatggcaaagagaattaggtaggtccagattccaaaactattcacgatggtgactaagtgttggtcaatgtgcaacacaaaatcgattaaaaaactcatggttacctccaagtaatgtgaaattaatcctatctaggttaccagaaaatcagtcgaaatactatgcttagtcgctaatcgcaagaaatccttacaaatggctagcatttaatcgagttctcttgtattatcaagataatcttaatagaaaacgggtgattttgtggcatttccgcaattagatttaagtcaggtcgatggaccaaaagcaacaatcaaaactaactttggtgatattaaggttcaactatttccaaagcaggcccccaagagtgttgaaaactttgttggtttagctcagaagggttactacgatggcattatcttccaccgggtcattcctgattttatgattcagggtggcgatccaaccggtaccgggatgggtggcgaaagtttgtggggtaaaccatttgaagatgaattctcacaagaggttttcaacttgcgaggggcattatcaatggccaacgctggtcctaatacgaacggtagccaattctttatcgttcaaaagccacaattagatgctgggatgagtgatcagatgaagcaagctggttatccggaagaaatcgtgactgcgtatggcaatggtggcacgccctggctagatttccggcacactgtttttggtgcagttagtgatgggatggatatcgttgataagattgcggccactgagactggtatgcaggataaaccagtgaaggatgttgtgatcgaaacaattacaattgaggattagttagtttgaaagaaatctgcggctgcgggtttctttttttgcaattacgattttgcaatccgctgtattcaggttataatattggggattagaattatcgacaatatagaatgaatgagaaaggatggtatgatcgtgagcaattatcgaattggtatgcgggtacacggacgagtcactggtattcaaccatatggtgcttttgtcaccttagatggtgagcatcagggattgattcacatttcagagtgtcatgaaggatacgttaaaagtattactgagtatctaaaggttggtcaagccgtagatgttattattttagatattgacgaatatactggaaaaatcagcttgtcattacgttgtatcgagcatcaaccgcatccgacggtcaatgatttggaaatctacaagacttttcggcataagcatttttggacgaatcggcatgttcatgctggctttgaaccaattgccaatcatttagcgagttggacttcggattcactaaatcgattgaaagcgggtgagtattagtgcagaaaaaagttgccgggacaattatttataatgaccagcaagggtcgcactttttagttaagcattctactaatggatacaatttttatcagttgccagtacgagcagggcattcgcccttagcgtcagtattgtgggatttgcgatatacgattggtattgatgttgaccaattgcgcttgtatgattcgattatggctgagttggatgatgaaaaagttgcggtctttgtctttgaccacctagctgttgacgggcaggtacgtgcaaagtttgatcgtcaagggctcgagtttgttctagccagtgaattgcacgagttatttacgagtgttcgtgtgagtgaaacaatgccgtttacgaatttatcaaaataaattcgaataaagggttgacctgcatactaatacttgataatatatatcttgtcgctgcgagcactgctgttaaacagctagccgctagcacttacattgtttcatttcaaattgttgtaagtgaataaatattcaaaacagcaaaaaagttattgacatgagtaatcgctaatgataagatatttcttgtcgcgttaacaattcaactgattgaggtgttaacgattatgttatggtaataacgtttcaaattcatttgcatagttattcaacttcttaaataaagttgttgacaaggaaatgatgaaatgatattatgtaatagttgtgttaagcgattaacgcacggaattagatctttgaaaactgaacaaagtttcgacgaatcaaatgtgtagggtctcttgattttgaatcaagagcaaaacatttgcgaagtcaattcgctagcaaataaattttagtacaacattaaatgagctttttagaactcatcattaatttgagagtttgatcctg

SEQ ID NO: 8 - DNA, 164473 bp, synthetic construct
  source 1..164473: mol_type = other DNA; note = Lactobacillus plantarum PDA6 - Contig 8
tcccactgagcatcttccagttcgtatcgtttaggtgttgtcatcggaatgcctcgattcgtttttcctcagattatacctgaatttttagttttcagacagtccctagtataacaacaaattaataacaaagcgtgcacgatttgtgaaataactgtgtcatcccatcattgagggacacttaataatcttggcacatcagtcacacatcataccagagtcatgctcactgacataaaaagcacgattttctgccgttcataccgaccaggaaatcgtgcatcattcagttacatttcacgagttgcgagcgtgaagtcaccatttaagttcaggatgactgccggttcgccccttcacaacgtccactgtgcctaattcttaaaggagtggattggtgccggaatatgacccccacgcttaatgaacgtcgttggttgattggtgttgaccggcataactggtgcttgaccgaacaagcccccaaattcaaccgcatcaccaacacctttgccggtagctggtatgacgcgcaccgccgttgttttgttgttgatcatcccaatcgcagcttcatcggcaatcatcccactgatagtcgcggcactagtatcaccaggtactgcaatcatatccagaccaactgaacacactgctgtcatcgcttcaagtttttcaatattcaaacgaccagcactgaccgcccgaatcatctcagcatcttcagaaaccggaataaaggcacccgacagtccaccgacatgttcgcaggccatcacgccacccttcttcacggcatcattcagtaaggccaacgccgccgttgttcccggcgcaccgacactttccaacccgatttcttccaggatctcagcaaccgaatcgccttcgttaggcgttggtgccagtgatagatcaacaatcccaaatgggacgtgcaaccgttctgacgcgatggacccaacaaattgccccatccgtgtcactttaaacgccgtcttcttaatttgttccgacacaatgtcgatcgactgaccgcgaacttcttctaaggctcgttttacgacaccagggccactgatcccaacgttaataactcgatcagcttcaccaacaccgtgaaaagcgcccgccatgaacggattatcgtcgaccgcattggcaaataccactaaactcatgcaattgaccggatcgtcagccgcaatctgctttataatacgacccatttcaccgaccgcgtccaagttgattccagcccgtgtcgacccgacatttaccgaactgcaaacacggctagttgcagctaacgcggcgggaatcgatgcaatcagtttgcggtccccactctgataccccttctgaaccagggcggagaaaccaccaatgagatcgacacctagcgcttgagctgcccgttccatggttactgcgtacgcgacatagtcttgatcctgactcgcagccgcaatcaatgcaatcggcgttaccgcaattcgcttattgatgataggaataccgtactcttcttgaatttgagcggccactttgaccaggtccttcgcgctagtcgtgatcttatcatagattttttgccgggcccgctcaccatcactatcaacacaatcaaagagcgaaatgcccattgtgattgtacgaatatcaagattttcctcggccaccatctgaattgtttctaaaattgaacgactttccatggccgcctcctataacttctgaattgcgtcaaaaaccgcttgccgttgaattcgaatcgttaactctgatgcctcaccgagcgattctaacgcctctttggccgccgcaaaacttaattgctggtcatcccattccgccgatagcatcatggtaaaattatgatccatcaaggtttgcgaaatatcgacaatattgatttttaaacgtgctaactcgttcgctacttttgcgacaattcccacttggtcctgtcccacaacggtaataattgctttcatctttatagcctccgttagacgcatcattattcgcgtttgattgttcatatcatagcatgagctcttctgaaacgcacccgttacttttgatgaagtaacccatgagaataataagagattcctcataaacataggttcccagacgcacctttgctataatgaaaattgcttattattttcagaaaggagtcgtaatttgacacaacaaaatcatttacggggcgtcttactcgctagtagtgcctgtattctgtggggtatctcaggggtggctgcgagtaccctcttcatcaataatccgcatctaaccgcaatgtggctaacgcaggtccgcatgatcagtgcaggcttgattttactcgtctgggggatggtggctggtaaacatccctttaaaatctggcatcaccgccatgccgcttggacagcggtgagttacggtttgctggggctgattccggttcaactttgctatttcgaagcggttcgcgttggtaatgccccgattgccacgattatccaatttcttggcccattcattatcagcatctattacttcttatttaagcacgtgacacccagtcgtatcgaactgattggtatgatcatggcctttatcgggacactattgatcgtgacacacggtcacttaaacagtctagcaatttcacccgtcatcttgttctggggcggcttatccgccatcggggtcgccacgaacaccttgattccgcgaaccattttaccaaagtatggcgcattaaccgtcactggctgggggttactgattgcgggtctgtttctaaccttgttacaacccatgtggcgtgtccacctgacgattacctggccccaattaggcttgttaatcgtcattattctcttaggaacggtggcccccttcctgatgtttgcgcgtagtttaagcgatattctaccgacaacggccagtttgatggacgccttcgagcccttagccgcgacggttttctcgattacttttctaaacgttcaactcactagcttcgattttatcggcggcttactgattatcttggcagtcatggcactttcactgaacacacataaaatgttgcactttttgcggcgccgccgagcacactcttcatcttaaactgctgtaatgattgtcatgaccagtagacagattagttggcagaacagttgagctgtgctaaactaggattgttgaatttggggatgttctggattcgacaggtatagtttgagttcggattgcgcttcgtaggttgcgtctacgtaaaaacgctcagtttaaattataactgcaaaaaataataacaattcttacgctttagctgcctaataagcgcttaacgtagatcctcccaggatcgtccatgttctggatctgggtcctaaatttagtggacttacgctcaaagcttccacctggagttgcgagaagagactaatcaggttagtcattgctgggtgccctgtcatacggcgtttgcaatgatgaaatttaaatagtatgaatatgagcgtagatatccgaggggcaatatgcttggacgcgagttcgactctcgccatctccattattgagtttcaaagtgatgtaataagctccagaacacttgttatatcaatattcattaaagctatcctaacgggatagctttttttgtcctattttgattagcgtgctacttcagtaaaaagcccttttccaaattggaaagggctttttttaccgataatacaaccatggttaacctgatcaaccaaaatctgtccaataattataaacgccacagccaacggtgttaaagtggattgcaaccagtctgttaaaataataagtgctcacggcactaatccagctgcgttagcatgcggccatttagaccgtaccgacccgctggcggttaaacccaacctgtactaagatccgatacaataacggcacaatgatgacacatgccaccgcattaatggtcgctgctaataaactcgtgaaggacccaatcatggcgaccttgagcgttgtccccaccattaaggcttcaatcacgcctgtacaccacgaagtgacgatttttgtgagccctgcgactaacgatacccagtaaagccggccaatacgatcttcgcgatagccgattgacttgaaactcaggttgaccatcgcggccagaataattgcttcaataattgttaaccacgaagttgcggcatacccattcagaatatcaaacaagccaagccccactgcaccagccgtagcaccatagccaaaaccaagcaacatcactgcgagcactgtcaaaatattaccaaaatgaataaatggccgcccaacaatcgcgggcaacggaattcgtaatacactgataccaataaaaataatggcggcaaataaccctgccaagacgagcttttttaattgttcagaccttcccattcaattccctccaattttgcacatctatttatcattatattctaatataagtgtgaatcaattgatagtcctagtctatttttttcgtgacggtaactgaataatagtcgctcgtgtgggcgtctcaacacttacttcatacgcaactgctaacaaatcataagcagctcggggcattttgtattgatgacacactaaataataacctagatcaacagcgatttggtgcgcgatagcaatactgtcaccactacgattaagccggcgacgagcccgcgcaactaacctggtcaacacaacatcgcttcgaatctcaattgccatgctggcaagtgctagttgggcacttaatcgttcattcggttgggtcgtacgtgcttttgcctttgccatttttttcaactcctcagtgtaatcataggagtttcgctttggcttcgcaacgaatgacaccctcaaagccgcgtcatcactgagctcgtttaactttcacaaaaaatattattgaatcatttcaattcaaattcagcaacagcgcccacatcactagtccattccatataagtaattttaacttacgatttaatttatatctgccaccgatacttaatcatccgtctcttgattcggtaacccgaatagcaataccccaacaccgagtaagagtacggccacgaacaccataaaaattgccggaatgccaaatccaattgccatcagcgcaccaactaaaaatgggccgatggttgcgccaatgcgaccaattgactgggcaacgcccataccaattccccgtaccgcgggcgcaaattgccccggtgtgaaagcaatcataattccccacgcccctagcgtaaagaacgacaaccatgcaccactaatcagaatcatcgttggattattggccgtcccaaaagctgcggcactgacgaccgtcccaatcagataagttgccaataccgccttacgcttgacgacgccgatcaaccacgcagctagataatagccgggaagttgcgccaagctcatcaacatcgtatagccaaacccatgtactaatgaaaatccgcgcaacaccaaaacgcttggaagccataaaaacataccgtaataggcaaacataatcacaaaccatagaatgctgaggcaaatcgtagctcgtcgatatttagcggaccacacttgccgcaatgcctgtctaaaatcaactttttgtggccgattagcctcctgttctgcaggtaagtgtcggcgtaacagcaacgtatacaaccccattaaggcggtgattaagaccgtcatccgccaaccaatgtgtggcatcactaaaaaggccaataacgatgctgcaatccagccaaacgcccaaaaactatctaccaggactagcatgcgtgagcgctgtgttcccgtataatgatcagcaatcattgtcgcagcaaccggtagttcaccccccagaccaatgccagtcaacaaccgaacgactaagaaccactcgacgttcggggtaatcgtcaataacaaattaccaagcgaaaaaagcagtagcgtcccaataaggaccggcttacgccccaatttatctgctaaatagccgcataccaaggccccaatcatcatgccaagcgtggtgatcgcactgactgctcccaactgtcctgcagttagctgccaactttctttaataaccggcatcacaaatgatagcagggccacgtctaacgcatcaaaaagccaggccgtcccgatgacccataatagcttagcactatttcttttactttcgaccattccaatactctcccaaatttcctaattagccttccactaatttaggtattttttacctttatggtgctataaaagtagcataccgacttggacgtgtcaaatgaactactttagccggtataccttagcggggcgtccagaagagccaggtcgggctgtccccacctctgtaaataaatgaacgtgggttttacgaaagtttgaattgtcgatggttgccactggctgccgccacaaaatcgcatacagctggcgcgcctgtttgagtgtgaactgctcacctaacactaataagatcgtaggagcatagtccaggcgattgcgcacacgttgtagggcgtttcttaagatcaggccatgatcggcggttaacaactgcttggcgattcgttgataaaactcccgctccgtctgcgaatcgggaacaccagcaaatgccaaaccatcagcgaccagatcatcacgatccacccgcggcgtaatggcaaaccacttgacatcgcgcgcaccataccccggaactagttccggcttgactggcaaataaaccatatacgtcaacgccagtgagcgttcacccggcacgcgatcgaccgcggtaaacgtccctaactgttctgtatggaattgggcaagctggacgcccaacttctcacgaactaatcgcaatgcggcttcatccgcactctcatccgttctcaaatacgtcgtcggtaatccccaggtattctcaaaaggagcgtgatcacgctgaataagcaggaccagcagttgcttggtcactgcatcgaaactccagattacgttcgtaatactgattaatggccgataactgacttcatgcgccattcaaatcgtcctcctacaaaaacggccactggcaaatgccgtggccgttgtttattttttaattcattgcttgtagcgcttgaaccgtccacccgttaatggctgacttttcaataattgctttttttatttcccagacatccgctttgatatagcgatgtcgggcggtcattaagggaatatcagtgtagacctcttgaccgcgattaatggtaacgcgcattgaattacatcctttcctaatgctcaggaaatctgtaaataattctaatactcaatactggggcaagtacatgatactaaaaattaatttatccaaaatctgaggtaaatttaatccggcagcgtgaagtccaccgaactaacaactaactttatcatatttttgaagttatcgctaacagaatgctctttctttgacttaatttaaatttagccctaataatgaaggcgtttgcattgtgtaaaaacagattccgatttacactaaaggtaatattataagggaggtttttacatgcgcaattataaatatgccgtatatggcggtatctcagttgtttatttaattaccctatatgcgttgtaccaccttattcgaacggcttatattctattctttctctagcccagaccaacccgctgacttcaggatgacgatcatcaaacaagctcatctgacctgactaaggccggatgagcttgtttgattttgattctaattgcgtaacgtgactgactcacaatcccaaaccaactactgattagcagagccccagtcatatcatcgatgccataaaaagcggtcaactgccagtgctaccttagtattttcatgtaactggctgtgctgcgcatgggccccataaaagtctttttcggtgtaatcgacatcccgcccacgcaataaatacttgatggaacgggccgacacgttggtgaccaagctgtccgaatgactaccatcgttcaaggttcccacgatattcaatagttgtacatttttaggaaaattgttccgcttggctgccaataattcataggctgcatgcaaatatttcggttgcccagaagtcagaaacgagttctgattagcaacatcatcttccccgaccaccccatcaaacgggccagcgatcgttactaacttactgatcttcggaaaagtcgtcgtttgttgcgtcatcagcatattaacgctagcgacacagcccgcagaatgggcgacgatattataatgtttaaacgcgtgctgttgttgaaccgtggtaatcaccttagccagccaagcactctgttggtcatactgggccagattgttcttgaacacgacttgaattatcgggttacgcacccgaccacgccatttacccgtcaacgtcacttgaccactggtactgaccgttgccaccaaaactttgtgagcatgagcagtcttttcagcatgcgcaatcagggtattcgttgacttcgcactcccctgaaacccgtggacgtaaaatgtgggggtctgttgattcacatacggcgatatttttttagtacttgccgcctgttgcgttgcttgtttcttagtggtttgagaaccacaaccggttaagccaacgactaataagactgccaacagccaccatttaatttgtttcactttatccgccccattaatattttgaaatattctactttaattaaatctaagtcaattgaactcacattaccaatttcgtttgacagcgaccaactcatcttgtaaataagtgcttgctaactgcaagtatgtcacgtatttgccaggcgtgggtgcatgtaatagccagccatcaccggcatatagggcaacgtggtgtaccgcaccgttcccatgattatgagcaaagaaacacagatccccaagctgggcatttgctatgtcgaccgccactccttgcttgatctgatcctgagcatcgcgcggtaagcgaatacctagactgcgatgcaaggtatagacgaatccagaacaatcgaaaccataagcactgatgccaccccataggtagcgtaaatccaagaattcttcaccgaggcgaacgagtgtcgctcccggtgtcaagcgcgcggttctaaatgcaaactgcgtcgcacgttttgcaattttgcccgttccgagtggggtctggaccgtataataacgatgatctttgctactaataacgggtagttccgttccaaggctaagatttaagaacgtacggccatctaagcatagtaacggcgtaaaaccacgccgtatcgtaatcatcggcccagtttgaaccggcaatgggacggtcgacaattgcgccgcccatacccatcctggatacccctgtggatgccgggagtcggcctgattaacaacgtaaccataggcccagccattgacaaactgttcgactaaaaagacgtcgttaaataacgcctgcgtcacgatgcgattgtcgcgttccaaagccacagtatcttcatctgataactgcgccaaccatggttgtaagccgacatttgctagtgccggagtatcgatggacgtattgtttggctgccgccacacgttcgcaacggccgcaatgatccgtgttgattgcattctagtcacctcattttttcagtttaccatatctccggaaccacttctggcttcctggtcaaaccttgaagtgattttaactttaatcgatcgccccacaccgccgtggcacctcggcacgttaagaagctatcctttcagtagaaactttacactaaatattaaaaatcactgtgaaagtatgctatgatactaataattacttaggaggcgttttaacgatggataaaaccgatttgaagattttgaacgccttgcaggccgacgcgcgaatctccttaaaagcgctcgccgatcaatgcttcatttcttcgcccgcaatttccgctcgcatcactcgtctgaaaaagagtggcatcattcgtgactatcaagcaaatcttaactttgaaaagctcaattaccacataaaagcctatattcaactccaacttgaaccaacgcaaaaggagcgcttttacccatttgttgccggcattcctaatattctggaatgtgactgtgtcacgggtgaatactctcaaattttgaaagtgattttcgaatcaacgcaggcattagacgagtttgtcaaccaattacaaacatttggaaaaacgagtactcagatcgtcttttcaacaagtgtccctaaccgtggcctcacgttgcccgatgatcacgacatgtctaaaattaatcattaatccgcatgcacagggaaactgtagcttaataggcgcaccgagaaaccatgttagtttctcggtgcgcctatttaatgaattccaattgcaatgtcagagatcggtagcccgcttcaaatcaaacccaactatcagttatgggcacctcaggaccaattcaataacctaaaaatcgcttgtggtgtcgtcacttgataatgacgcttgagaacttctaagccaatattacagcctaccaatagactcccacctaaagccacgcccacccataattgtggtcccaaccaatgaatggcaactaaactacacaaaaataacaccgcaccaacaatcattcctagcgtgtaactcacaaaccatcgtctcattgggcacctccacgacacaaactaattacgcgaatcggttcatcacataaattgcaccaagtccaattccccataaaactaacagcggtagtaaaacgagcatgccgaactggtaccaacctaataccatcataaataaaatctcaacactatggccgaacactaataattgaaagtattcacgaaaataccactgcacgccgataccaatcaagaaactaatcaagatcacaccatagaacgttccatgcagcattttacaaactcctttttattgcgtttgctatctaaccttacatggtaagtatgccgtattgaggcctaaatcatcatcatatttatgtaaagactaggttatttttcagtaaagactgtttgatgatttttaaattattgcaaactgctgttaacagttacctgcgtaacgtgttatgattaaaggacaaattaattaaacgcaacaattatgggggcgcactgtgttacatctacttacgctatcgagcttaggccgagatctttttaatatcaaaatgctaattgtcgttctcattacaattggcctgatcaccctaatgaccattctgacctacctcctagagcaacaggtccatcgtcgtcaaaatcgatattggactattgtggcccatggtgccgaggctttaagtgtcctcattagtatgatcctattacgacaaatattcattacgctgaattcaggtagcattatcagttggacctacgcaacggttcaattaacgattcttctgttcagccttaacaccatgcgcaacctggccgttgaaattattaacctgttaatgccattgttcatttatggtcaggccatctggttgggccacagcacgcagtacctgccagtttttctggccatggccattatcttgattagtacagtcgtctatattactcataactatcaagaattacacgctattcaatggaagtatctcctgttccaaatactatatagtggcacttggtggggcgttatttggtcagttcatccgttcaaattgagccatacactcgtcatcattctagcctttgtcctttacatgtggttgattcgtttagcagtcaatcgcgtccaaaagtttttcaatgaagtgctcacctttgatcaacaagtcaattacgatgaattaaccggtattcgtaaccgcgccagctttgacacgcatgcgcgtgaagtgtttgccgcgtatcagcaccatcaaatggggcccgtcaccatggtcatgttcgatattgaccactttaaagcctttaacgatcagtacggccatctggctggcgacgccgtactccgacacgtggcgcattttgttgaacttgaacttaatcagcgcagcactcacggtcagatcttccgctatggcggtgaagaattcgtcatcatttttcgtggcatctcagcgcttgaaactggtcaaataatgcgtacgattcagcgtaaactgaaaacagtgccaatcaaatttaacgctcaaacgttgaacgtgaccgtttcaattggtatttcagaattgcaaccaaccgaccagactttcactgattggttcgtccgcgttgacgactacctctatcagtccaagcaggccggtcgcgaccagaccacggttgaaagtcaattactaacggattaataattgttcccaaaaggccgttaatttgtaaattcgttcccgatttacaaattaacggcctttttgggtttagcgattaccgatggggacaatggcgcgctgacggtccaataattactgaatcgccagcagtccattttcaaattaactagtcagctaaaaataattttctcctaatcaggacatccaaaaacagtccatgcttgaatgtctgtccacagacaagcccaagcatggactgctattaaaaaggataagaattagccttgtcgttctttcaaactgagtttctcgacgttcaattccttgtcgacccagccattcacaaaactgctctcatgactaaccaagattagattaccttggaaagcctgcaatgcacgcttgaggccttctttagtttcatcgtccaaatggttcgttggttcgtccataattaagaagttacttggaaccaattcaagcaaggctaatttgaccttagtctgttcgcccccactgagtaagtgcatgggcttcatcgcattcgccgcattaatcccacacttagccaacttagtccgaattgtcttcggtaacatcgtagggtattcattttgaatcgtctgtaacggtgtcaactgtgggttatcccattccaaatcttgattgaaataattgattttagcagatggcgaaaaatctgacttaccacttaacgctggaattacacctaaaattgacttgatcaaagttgatttaccaaccccattaaagcccttaaacgctaatttttcaccgttggtcatcgtaaaagtcacgggttccaacaacggctttccgtacccaacagacagcttcgtcacactcaatgcattttgagaacccgtatcaaggtatggaaaggcaaacttggcgtgttcattttcactcggtggatcaacccgatccaaatgcgatagcatcttttcccgtgacttcgccatcgttgactttgaaccggccttgttcttgcgaatgaacttttcggctttttcaatcacaacttgttgcttttcaaacgccttcagttgggcttccttacgtgcttctttttgccgcatagccgctttaaaatcgccccggtacttaataattttaccgaatgccacgtcacaaatacagtttgtgacctgttgcaagaaatcatagtcatgagagatcaccataacggccccttcaaagccgttcaaataatcttccaaccaactgatatgcgccgtatcgaggtagttcgtcggttcatcaagaataatcacatccgggttttccagcaatagtttagccaagatgatcttcgaccgttgaccaccagacatctcactgatgacgtgatcccgaccaatttcatctaatcctagtccggtaattacccgttccatttctgtctcaatatcataaaaattattggcttccaaggtctcctgaatccgacctgcacgttccaataactggtcatccaccttttcagcataatccgcataaagttgttgcatctgcgcatctaaatcatacaagcgttgaaaagctgttttcaaaaaggcgtatagcgtcatgccggctggaatatcggcatattgatccagatagccagttcgaacgttgcgctgccacttgatctgaccagataatggtaagatctggccagttaaaatcttaattagggtactcttacccgccccattttgaccaacgatacccatatgatccgctcgttccaacgtaaaattcgcatcgtcatataatttacggtccgcaaagctttgcgataaatccgttacttctagtaaagccatgttgttttcaacctacactttcattttgacccgtattaaaacgggccccgtcatatcacgaggcccgttgcgatagccctgatactaagctagcaccaagtctttatctagttcatattgcatatggaagtacatccgatcaccgataggcttaattcctaccgattcgtaatgataacggtcatagagcttcttagctcctaaattagccatgtcaacgttcaaaccaatccgcttttgaccagcttgtcgcgcgtatcttggcagggcggcgagtaacttcccgccaatcccatgaccctgataattcgggtcgaccgcaatcgaatccaggtaccattcgtgctcataactttcagcttcagcttcaaatgctgaaccaaacgcatcattattcgcagtaactcgtgctaacacgtcgtccaccgcgtcctcatttttgtcaggataaccaaacgctaccccgaccacttgaccatcggcctcggccactactgtcgttgccttaccagacaaataatcaggtgtccggtaagcggcagtaatggcctgctctaagtcaggttcaggaatgtcgtctagttcctcaagttgcatttcatcaaaaatcatattaattagcggtgctatctggcccgcgtcgtcttgatcggctggtcgaattgttatcacgaatagccctccttcttatagtaacacctacattactatgaaaagcaagcattgtcaaaagtcgcgtccggtgtgaacggttacagttgttattttttgagttgcttcccaaatacggtcacatccgtcccattatcaatcgtggtatactgaataacaccgtcttatactcattattattggcatgaatcatgattaaaacataccagttgggtaagttcaaaagcagccagcttaggcccgctggaaaaagatctatttagcgtaaacttgcttagttagcgacgtcctacaccgacttccaggcatttctgccaattgctggaacgcggtggacacagatttaagccgcagaccacgtcttaaatactggtcttccactaaccaagccaaggacgcttgctaagtggaatttcaccgctgagcattggccgaaacgccttccagtcgggacagtattcgaatggctgacgaagatgtacccaacctttgatggacttatcattgttcctcataaacggtaattttgttaattacctgtcagtctgaaagtgatattgtgggagctcactattcctcaagtggcatagtaataatcgaacgtctcgacaaagtggttaatggaaccctgacgtttcgtttaaggttccggtgtcaaaatagtcagcgacaaattttaccaagttaagtggccgttaatctgccattcgagcgggttccaaaaacgtgttcggtgccactaaagcctgtgcttgctacgccaacggactaatacccaaaccgcattaatccgttggctagacaatgctcggcttcaacccgtggccccgcacaggcttgagactggaggggctgggtgacaatgctcagtagccaaattattcttagtcggaagtgtctttcttccggcttagaataagactcgtatttgagatgacgcgggttatgcgttagctcaaatcgacgtcggctgcgttccagcaattgtcacccagccccggaggtcggcataggacgcgcaacggctgacgaacagcaatctaactggtacattttaatcatggttcaagccaaatctgatgagtacgacacgtttaataatgaattatttttgaagggatttgagcttgtgaatattcgcgatatcgatcatttgaccctaaccgttactgacattgcacggtcattacggttttaccatgaagtatttgaccttcccattgtgaccttcgatggtgaccgccaagctgtcttagtgggtaaacaaaaaattaactttcagaccactgaccagccacaccaacccattgcggctaagccgacacccggcagtgcagatctttgcttgattgcgaaagataatattgatgatatccagcatcacttaaagagttatttcgtggatgtgattgccgggccggttgaaagaactggtgcccacggaaagttgacgtcactgtatgttcgtgatcctgataacaacttgattgaaattagtaactatcattaaaaaacaccacaaagactaatcattaaaaacgcccagggcaactgttcagtaacttgcgaacaactgccctgggcgttttttgatcgttatctggatattttagtcaatcgttgatcaatctgcactgctagctgtgtcattccagcggctgtcagtcccgttgcttctggataaatcagaactcgcgcactagcttgtaagtccaacacggctgccactggtcgactgacgaccagcaattggtggtcggtcaccggtaagtcgtccgcggttgcaaccctgaccttaagcatcgattgagttagcgcctgcattagtcgcttgactagtcgtgcatcaagtgccgcgtcaatcaccatgcttcctgaaactgaattctgtaaaatccccgttggcgttgagttcaatactaatacttcgtcaatcatgttaccgcccccctataatgccaatagtatatcgtgggagtcagcgggaagcaatcaaacgcactgtccccgcatcaagctgttcatttgctgtcatccgttgcctcgataaccaatgcgacaaaaaaagttccgcctaaatcgaaaagatttagacgaaactttttcaataaacccaacgtcgacagcgcgtaacttattcagctgcgccaatcaaatcaccgctagtcacatgaccagttggattaagggttagtttgttaacgtaatccatattggtgataacgaccatcatggttgtcgctttaccggctgacttgatagcagccaagtcaaccgtcgctaccgcagtaccggccgcaatttcgtcacccgttgccacgtgtaacttgaacggcgtaccattcatttccacggtattgatccccatgtgtaataagacttctaaaccactcgtcgtcttcaaaccgatagcgtgtttggtcggaaagacacttgtcactgtcccactaaccggagcaacgacttcaccatcttcgggttcaacagcgtaaccatcacctaagagtttaccagcaaacgtctcatccgcaaccgcactaatcggcattaattgtcccgttgccggtgcccgcaaaatcgttgtcaccggcgcttccgttacagtagcagtttgcggttcaaccggggcctttgattcagcatcagatgccggggtcgtcgccacctgaccagaaaataatttttgtaaagcctccgcgacgaactggacttccgtgccaatcacaatgtgaatgttatgaatatccagtacgttcaaaccaggcacgccagcagccattacggccggctgatcgactttttccgtattcttaagttgtaaccgcagccgcgtcgtacaattgttgatcacactaatattgtcatgaccaccaatagccgcataaatttgctttgcttggcgcatatacttatcatccgttgctgcaacggccaccgctggactagcaggtgcacccaccccatcgacatctgcagacacaacttcacgaccaggcgtcttcaaattaaaccgtttgattgcaaagtcaaaaccaaagtaataaatgacggccatcaccagcccttgaaccagtaacatatagggttggttggctaacggcatccgaaaactcaataaataatcgactaacccgccactaaacgaaaagctggcggtccagtgcattaacgcggcgaatcctaatgatagtcccataaaaacggcatgtaataagtagagcggccatgccacgaacatgaatgaaaattcaagcggttcggtcacccccgtaaagaacgacgcaaacgcaccagctaacatcaatgaacccacttctttttttcgttccggtcgtgcattacgataaattgcatacgcaccagctggcaagccaaacatcataattgggaagaatccagcttcatacatccctgtgattcctttaacaccatggctggcccagaaattgccaatatcattgatacccgcaacgttataccagaatacggaatttaaggcgtggtgcaaaccagtcggaatcaataaacgattgaaaaagccatatagaccagcccccacgaaacctaattttgaaatccccgttgcaaagaggacgatggcatcgtagacaaacggccaaacaaggtacaataccgccgtcacaatcagcatcacaaaagcagccataattggcactaggcgtttaccactaaagaatgagagcgccattggtaattttacttcgtggaaccgattatagagcgcagccgcaatcagtccagcaccgattccaatcagcacattgttatctaacgcgctaaatgctggattgatctgactcactttaacattcagcatcgtcgctaatgtcgctggttttaaaaccatcaccggaacttcaaacgcgatcaaaccagcaatagctgccgcgccgtccttattgactgacatcccgatagctaagccgactgcaaacagcaaggctaagttattcaggacaacgttaccaccctgaatcaagtaatttgcaaacagccactgttttggcaggtaattcccaatcccaaccaaaatcgctgctgcgggcaacgttgcaatcggtagcatcaatgactgaccgattttctgaaaatatgtcttcataccaatttctcctcattctctttttaagcacgttataaatcctatcacaacatgttttcattgcaagtttacaaggtcatctaagtgtatagaccaatgttaaagaaaccgatttcaaccttactaaattaagtttttccgcccacaaaaaaagttctgaaaatactcagaactttttcattaataatcttatttttcagcaacggggatttccgggtgccggtattgccgcatcatttctgctaaatggacttcgtgagtcacaaactcatgcacgcgacaaacgtagtcatgttcccgcccaatcttagcaatatagccattaatataatcaacttcggttggccgtccctttgagaagtcttgatacattgatggataatggtacttataggctcgactgaccgtttcaaccgagtcgatttcttcttgccgcgtctcaatgagtttgatgcctgccctttcgcaagcatcataggcttcgttgaacatttgagtcgccatatccttgacgcccggatattcgatgaattggcccatctgaatctcgaacatcgtgcacaaactattggtgaccgcgttaaacacaactttggacatgcacatgcccataaaattatcagaccaaatcggatttaaatcagccgccttaaaatcggccatcacttgcttggtagtcgtatcaataggacctgcatacttactcatatgcatcgcctcactacccttaggccccataaaatcaaccgtacccggaccattcaagaccgttgcaatcatcgccgtaccaccaataatgtgattttctgggaaatattgtgcaatcttttcaaagtgccccatcccgttcattgcggcgaaaacatactggtcctcatgaaataacgacgcatcgcgcttgagctcatcggctaactgcatttgcttcttaaaaacaatccaaacatctggatgaccctgatattcttcaggataataaatattgattggaacgacatggtgattttgatgatcacgcgccacatcaacgccgccctgctcacggacctttgcgacgtttggttcccacgtgtcgataaaatcaacgtcaacaccggcgttttcttgtaacattacaccataccgatatcccattgcgcctgcgccaataatgccatatttcataagtaaaaccatcctttcgtcttgcccactatgtgtatatgttccccgctcgcttcagtgcttttccaataaacgggcccgtgcttacgatctactatgtgctgtcacgtgatgtcgaacaactatgtgtttacgatgattaaccgcgatgcgcgacctaaataatgactactatgtgttaactaaaaaataatgctatgtgtcacttgacgaaaaagcgccctttgaataatcgatcaaattatccaaagggcgcttacgcgcggtaccaccttattgctaaccgaactcacatccggctactcatcgcgttcacaacaactaaacgcgtgcacaataatgggtgctaccagtgaatctcgtaaaattcacgccaatcctttaacttttactcacttgtcatcacaccttcacagcaacggcgctttctgagcatcacaagtcagttactccttaaagcattatagcttttcatcaagttttaatgttataaccataatatcattttagtaaaatgtcaaccttcgatgcaaaacttttttaaaacccagctgtctgtatacgacagtatcatcagcaaaccgcacacgggcaaccccaacggcctattgtttttgctcctgattgagggtcgtcaacaatggcttccaatctaatgaccagatcattccgagcgcatggtctccagtcaagacgcctaaaactggaccgataaccccagtcttgacccggactgctggaaactgataacgtagttcgctcgcccaatcttcggcaatctgcgcgtcattagcgctgatgacgtccagccgaactggtaattgactgttcatcacaaactgactaaattcatcttgaacagcctgttgtgcatttttaagcgtccgttccttacctaaaagttgaatcttcccatgcccattgaacgtaataatcggcttattgcgcaacaccatcgttccggccagactactattgttataaatccggccatttttaactagatggcgcatcgagttaacgattaagaccgtcgtcgtagccgcccgcaagcgcgtcagttgcgcaataatttcatctaaggtatagtccgccaatgccatggccgcagccagcttcaccatgttcgccgtccccgcgcaagcagttcgtgaatcaaacacccgcacgtcaataccgtcaactgacggcgcataggtcttcaaattattgatccagccactgataccactactcaacccaataactagaatttggtcatagcccgccgcttgcagctgatcaaaaacgacttgcatctctggcattgaaatttgagaaatcgttggaatttctttttcaacttttagtaatcggtaaaattgatccgtcgtgatatctacgttctcgtggtaaacatgattaccgaacataatcgggtcgttcaccaccgtaatttggtagtctttcaccgcctgcgcttttaaattagcagaactttcggtcaccaccgcaattttcataatttcactcctcatcgtgtcagtcaaccaactgccacgtctcgctaactcatttcaattagctcatccacttagccatggatatcccatgggaacttagcatcaaaaaaagacgctcagatacagtatactgtacctgagcattctttttcaaattgcaacatttatgggagatgttattgaattttcggtcacttgcttccagtccgttgtaccggcaattggtatcaaagtcagtggcaagttcgcacgcagctttttgcgtttcaccgcacttaatccagtaatctgataacaatcatcggcaatcgtttttactgagaaatcagcttcattagcgtaatatttcacggcttctggtgcgaccggaccaatgcctaagtatgtttgtggtaactggtcaaatcgagtgaccgttaacgagacacttcttttctggttacgaatcattcgataaccattgataaggtgcttggccgctactaagacgtcatttagaacactattagccgtcgccgtacttcccgcacccggtccggtatacaagctggtaccaatggcttcactttgaacagctacagcgttttggaccccattgatctgactcaggggttgatcaaccggcacggccactggcgccacacgacaatacaaaccagatccgtgtcgctgaatctgcgcgagcaatttaatctgccagccattttcagctgctaatcgacaaaccgaagcgcttaaatgcgtgattcccgtgggtgcaatctgcggcaggctcaactcttgcccaaaagcaaagcgactgaggatcatcaatttgtatgccgcatcaatgcccgcaacatcattagtcggatcagcttcggcgtacccggctgcttgtgcagtagctaaagcttgttcgtacgattgcccggttgccattgcacttagcatataattagccgtcccgttgatgattccgctgaccgcctgcacattgtccgtcacgtaactatctgttaatgtccgcaagatcggaatcccccccgcaacactagcctcgtaaaataaatcacagccctgttttttggctaacgcagccaattcaggtcccgccgttgcaattaagtctttattagcggtcacgacagccttaccctgattaagtgctgccacaatggcctttttagcaattgcgaccgtccccatgacttcaatgactagttggatttttcggtcacaaacaacgttcgttaatgaatcggtcaagcgcgtcccaatcggtaactgaacagtccgaggcgcgttcaaatgattaacggcaactgctgctaggtgcaaccgaataccctgcgtttgttcaattttggcagccgagcgggtcaaccgttcaaccaccccactacccacagttcctaaccctaacatgcccacttcaattgtcgttgtcattgtcgcaccctccgtttcatatactttcaatcatcgaccattccgacctattaaacctgtgccaatgcttgatccaaatcagcaattaaatcatcggcgttctcgacccccactgaaattcgaatcaagtcaggcgttacaccagctgctaacaattcctgttcatttaattgcgcatgcgtggtggaagcgggatggataattaatgatttagcatcagcgacgtttgctaacaatgaaaagagttgtagatgttcaattaatgccttaccagcagcctcaccaccagtcaagcccagggtgaagatcgaaccaaccccattcgggaagtacttagttgctaagtcatggtacgggctatcttccagttctggataattgatccaggcaacttttggatgtgcttttaagaaggcaacaatcttgcgtgtattggtcacgtgtcgttctactcgcaatgacaaggattctagaccttgcaacaacaagaaggaattaaagggactgatagttgcaccggtatctcgcagcgtttccgcccggaccttagtcgtaaaggctgccccgcccaaatcggcaaaaacgaggccgttatattgcggatctggcgttgtgaaatctggatacttgccactcgcacgccagtcaaattggccgccttcaacaataacgccacccatggtcgtcccgtgaccaccgataaacttagttgctgaatgtacgaccacgtcggccccatgttcaagtggccgaactaggtatggtgtcccaaaggtattatcaacaataaaaataatgccatgatcatgagcgatttttccaatggcttcaaaatcaactaagttaatgccaggattaccgatactttcaacgtacaaggccttagtatgatcgttaattgccgtctcaaaatttgccggttcgtcaggatcaacaaagtgcgttgtgatgcccaacttctttaacgtcacgctaaacaggtcataggtcccaccatacaaggtgttggccgccacaatttcatccccctgttgcgcaatgtttaaaattgccgcggttatcgcagcagaacccgttgcgagcgttaccccagccgtcccgtgctccaaggcggccactcgtttgtcgaccacgtccgtcgttgggttcgtcagtcgtgtataaatattgccggcatcagtcagggcaaagcgacccgcggcttgcttggcatccttaaagacgtatgaagtcgtttgatagattggcacggcccgtgcgcccgtttcatcaaccgtctggcccgcatggacttgtaacgtctcaaagtgataattttcaggattcgttgttgtcataattaataacctactttcgttaaattcaaagttgctaaccagttttgatacagttgattgcttgaagtttgccaactgtaatcaactgttgttaattgttcagtagcaaagtaatgttcaggtaactgaatcggcaagtgcttacgtcggtcgcgcaaatattcatcggcaagcgtgcggcgctcgtattcaggatgaccggtcacatagaccgcgtgcagcttgggggcagataagacgagcggtcccaccttcggattgtcagcgacaacctgcaatccagcgggtaagcgttccggcatcactagtgctgtatgccgtgactgtggcatttttagcaaacctcctgcattcagtccactaatcagcggtgacttaacatcagtactagtcgcactataaataccgaatatcttgtgagcaacggcgcgctttgcgattccaaactgtgcgtatagccctgcttgtgctgcccagcattcaaataaagtctggctaacgtgctgtcgtgaccaatcaatgattgttaacaattcgttccagtaatcgactgcttcaaacggtaacgtctcaactggtgcgccggtgacgatcaagccatcaaaatactgatcttgaatatcagccaacgtcacgtaatgtgccgcgaccactgcttgtggcaggctcttgaaatggtgactcgcgggatacataaacgtcacagccacatctgtgttaccggctgcaaaacgctttaggaactgccgctccgtcgttaccttagtcggcatcaagtttaaaattaaaatctgttgtgcctgatgactttcttgacacgttgcgttcgcccattctccacgggccgctaataatccattatttgctgtgactgtcatctaaccgctccctctcacctgtattgaaacaaaaaaaagctcccatccattagtctctaatatgttagaaactaacggacgaaagctttcgcgttaccaccgttgttcgctgccatctcacgatcacaacctcgacgagtaccctgaaaaatctaggaaaccccgcaatatatcggttgccaccgcatgcgtagccactacgacccgcatcatgactccaagctcatcttcaccgcactcctgaatacttctctcaccattacgaagctctctgcaaatcagtgatgcgattactcttctcttcaacgtcttaatctgtttttaatttaaaactaatttaacaccgcctttattcattgtcaactcattttattgttttttcgttatgttttacttgaatgcttattcaaaacttgctgaataactaaaatcaaaagcagccagcttaggcccgctggaaaacgtgcgagttagcgtaaacatgctttgctggttcgtcctaagccaacttacaggcatttctgccaattgccggaacgtcttccagtcgggatagtattcgaatggcggacaaagatgtactcaacttttgatgaattcgtcgttgctttttataaacagttattttgtcaatcaactgtcagactgaaagtgatattgagatagctcactaatcctgaatcggtgtagtaagatttaatctctcaacagaatgctttaatgaacctaacgctttgtttaaagtgccagtatcaaaataggcaccgataagttgcgctaagctcggtggtcgttcatcagccattcgagcggtttcccgaaacgtgttcggtaccactaaattctgtgcttgctacgccaacagactaatgtcaaaaccgtattaatccgttactagacaatgttcggcttcaaccgtggcccctcacaggcttgagaccaggcgggttttgctcgggcttaaatcgacgtcggctgcgttccagccattggcaccccgccccggaggtcggactagaacgaacaaatgccgacgaccaagcatccgcatctcacaagattttcaccacaaattttaatatttggtgaaatttatccttgacacttttttcgactttgcctatactgaactcattcaataacgaaagcgaggaaccaagcatgtcaaagtcagttactaacttgaacagttcatggcaaagccggccgttcagattgtagtgccgtccacacggatacaatctggcaaacagtttgtatctgtgccggctcactttgatattcaaagaagtctgcatgggttttaacacagcaggcttcggttccgtaaagggcaaaccagagcttactggtttgcccttttttattggctttgaacttgcccgagcttaagaaattttttgaggtgattagattgaaacgtatgattgcattcattagtgccttgatcgtctttctgggagtggcctttgtcatgacaggcaaaaccaccgccacgaagacgaccagtacaaagaaagtgccgacggtcggcattcttcaactccagacccaccccgcactcgacgcgattcatcgtggcgtggtcgctggtctaaaggaatatggttatgtcgatggcaagacggtcaaaatcgactatcaaaatgcccagggcgatcaaagtaacttgaaaaccatgagccaaaaattcatgaacgaaaacgccgcgttaacagtcggaattgccacccccgccgcgcaggccctcgcttctgcggctaacaagcaaacccctgttatgttagcaggtattactgatccatcgggtagcggcctaattaaaagcgaccaacatcccggtgccaatattacggggacttctggtgaatctccattgaaatcccacttagacttgttgcggaagctcgttcccagcgctaaaacaatcggaattatttacaccacttcagatcatggtggtgaatataacgccaaaaagtttgcacggatttgtaaacaagaaggtgtgaaatacaagttatatactatctctaacaccaacgatatgcagcaagtggctgaaaccatggccgccaatgtcgacgccgtttatgcgccgcaagataatggcgtcgcaagtgccatgaaaacgctagtctccgttacaaataaggctaaggtaccagtcattccagccgttgatacgatggttaaagcgggcgggctcgcaaccttatccgttgaccagtatcaacttggtaaactaactggtgaaatggcagcccaagttttaaagggcaaagcaactagcgactacccaatcaaagtcatcactaagggtaagatgaccatcaatttaagtgaagctaaaaagctcggcatcaagttcccagcaagtgtccttaaagaagccaaagcgaaaggggttatttacaaatgagtatgatcgtatcgagtatcggccaaggcctcttgtgggcaaccttaggcgtcgcattatttttgacatttcgaattcttgattttcctgatatgaccgtcgaagggacgtttccactcggtgcggccactgttgtcatggcgattagccatggaatgggccccgttaccgcttccctgttagccttcgttgcgggcgcgattaccggcctggtcaccggcctactttataccaagggtaaagtgcccattctcttagccgggattctagtgatgaccgcgtgcttatcaatcaatttgcgcattatgggcggcagttccaacgtttcattgctaggcaaacaaactattttttctaatcactttttggaatcactgcctaaatattttgacagcgtctttgttggcctagtagtgatcagtatcattaccgtgcttctaattgtcttcttgcaaactaacctcggccaagccttcattgtcactggtgacaatcgtgaaatggcacgttcaattggtattaacaccgataacatgaccatcatgggattgatggtctctaacggtatcattggcctgggcggcgcattaattgcgcaaaataacggttatgccgatgtcagcatgggaatcggaatcatcgtaattgcgctagcctcgatcatcatcggtgaagttgtctttggtgaattaacgttgaatcaacgactcgttgcggttaccctcggcagtattttgtatcagttcgtgcgcctgttagtcctccaactgggcttcaacaccaacgacatgaacctgttatccgcattaattctggcaatctgcttaatgttaccgcaattcagtaaagttctacatcttaatcacgttttaaagaagggagtggcccgttatgacgaacagtagtgccccattattatcattaaaaaatatcgtgaccaaagttaattcgggaaccccgaatgaggtcaaaattttgcggggcctgaacttagacgtctatgatggtgattttattaccgtacttggttcaaatggtgctggtaagtcgaccctcttcaacacgatcagtggcgagttaccggttgatagtggcaccatccagttacgtgaccaggacatcacccgactatccgttgaaaagcggaccgctttcctggcgcgcgttttccaagaccccaagatgggcaccgcaccccggatgaccgttgccgaaaacttactgcttgccagccaacgtggtaagcgacgtacgttaaaattacgccaattgaaaaagcacctgccccactttcaagccttaacggaaacgatggatggcaacggtctttcagctcggctcaacacggcaacagaaaatttatctggggggcagcgccaggctctgagctttttaatggctaccgagcagcgccctgatctcttgttactagatgaacacacagccgcactcgatcctaagaccagcgctcaactaatgacacaaacgaatcaacgggtcacggaggaaaagttaacgtgtctgatgatcacccaccatttagacgatgcgcttcgctatggtaatcgcctgattgtccttgatcagggccagattaagtatgatgttcgtgatgaggaaaaagcccaattgaccaaagaaaagttgctaagtttcttcgatattattgaataatcattaagtccatccctattaatactgacacccagtcatcaattttttgatgattgggtgtttttttgcagctaattgtaaccgttttagttgtgaacaatttattttagtgctatattctaactagaatatttctaaactaaatggtgtcgacgggcacagctatttttcactgataatttagaataattacaaactgcccttgccgacaaacttagttcgtgttatattctatttagaacagttctaaactaaaatttggaggctttacaattatgaaagttattgtcgttggttcttctcatggtggttatgaaacggttcgcggtattttagccgctcaaccagatactgaaattcaatggtatgaaaaaggtgattttctgtcattcctctcatgtgggatgcaattatacctcgaaggtgccgttaaagacgttaactccgtcagctatgccactcctgctggcatgcaagcccaaggcgtccacgtttttgtaaatagtgaaattagtaaggtcgaccctgctagtcacagtgtgcacgtcattgaccacgccactggtgacgaacgtgatgaaacttatgacaaactagtcctaagtgtcggcgcggtaccatttgacctaccagtacccggccatgacttagccaacatctacgcaatgcgtggacgcgactgggccatcaaattaaaggccaagaccgttgaccctagcgttaagaatgtggttgtcattggctccggttatattgggattgaggcggctgaagtctttgccaaagctggcatgcacgtcacggttatcgacctattaccacgtttacttagtctttaccttgatcaagaattcacggatatcttgactaagacgatggccgatcacggcatctatgctgcagttggccaaggtattaaagcgtatgaaggtgttgacggccacgtcaccaaagtagtgaccgatcaaggcgaatatccagctgacctggtcgtaactgccgccgggattcggccagcaactggtttcttgaaaggcgttgtcgacttagatgatcacggtttgatcaagatcaacgaccacctccaaacgagtgacactgacatttacgccgtcggggacgcgaccttagtcccatttgccccaactggcaaggataaccgcattgcgttagccactaacgctcgtcggcaaggtcggattgccgctaagaacttacttggcgaaaacgtaccaatgcctgctgtttctggttcatccgcactttccgtctttgactaccactttgcttccactggtgttaaagaaggcacggctgacaagctgggcgttaagacggcatccgtgttagtcaccgataccattcggcctaaatttgtctctgaagatgctggcaacaccaaagtttggttcaaactaacctttgacccaactgatggtcgcgtgcttggtgcgcaaatcatgtcgaagtacgatgttactgctaacatcaacgccatctcagtggctattcaagctaaactgactgttgctgacttagcttacacggacttcttcttccaaccaggctttgaccgtccttggaacatcatcaacctcgctgcccaaaaagcagccgcaaccttaaactaaatcaattaagccttaatacatcaaacggatccctcagccacacatcgctgaagaatccgttttttaatgcatcaaaatgctagtcatcaagattgacagtataccaagtttattttcagatatcgtttcataaaataccatgctagacgttgtactagttattacttagcatgaatcgtgattaaaacgtgccagttatgtcagttcaaaagcagccagcttaggcctgctggaaaaagttcgagttagcgtaaaattacttagttggcgcgtcctacgccgacttccaggtatttcttccaattgctggaacgcggtggacacagatttaagccgcagaccagtcttaaatactggtcttccacgctttaatggcatattagtgaaacgtgctcgggtcagactgagacttccggttagctacgctatgacgtcaagcggaaattcaccgcttaacgccctagctaggctaatcctcagtctcacccgtctgaacctcacactcttggcagtgctgagcattggccgaaacgctttccagtcgggacagtgttcgaatggcggacatggatgtacccaatcattgatggacttgtcattgctttttataaacgataactttgtcaatcaactgtcagacagaaaatgatattgtgataatttactattcccaaatcaccatagtaataattaaacgtctcgacaaagtggttaacgccaccctaacgttatgtttaaatttccagtaaaaaatatagtcagcgactaattgtaccaagttaagtggctgttcatttgccatttgagcggcttcccgactggaggggctgggtgacaatgctcagtagccaaattattcttagctggaagtgtttttcttccggcttagaataagactcgtatttgagatgacgcgggttatgcgttagctcaaatcgacgtcggctgcgttccagcaattggcacccagccccggaggtcggcataggacgcgcaccggctgacgaacagtaatttaactggcacgttttaatcacgattcatgacaaattaactcgcataatgcgtatcatgttaataaaaggcggggattcagaaagattaaactcgctgaatccccgccttgataactattatttcaataaatatatgatgtttgagcgactttcatcaagtcagccacgcgctaataaatattaatcaatccctgagttccttgatcacccaagcctttgacatcgaccattacttcataaagtcgtttagcctgcgccgtcgcaaccagattaagtcccatcgcatccgcctcactcaaagcaatccgcaaatctttaagaaaatggcgggcaaaaaagccgggcgtgtaatcgtccttcagaatccggggcacgtaattatccatgctccagttgtcagcaccaccgctagataacgttgccaagactttttccggatcaagaccggctgccttggtatacaataacatttcagttaacccagtcatcgtccctgcaatcatgatctgattggccatcttggcatgttgaccagtaccagcatccccaaaatgattgaccttgtgaccaagcacattaaataatggtaacatcgcctcgtacgtatcggcatcgccaccgaccatcaccgtcaaagtggcgttttgggcgccaatatcaccgccggacacgggcgcatccaaagcgtgcatgtcatgttcacgcgcgtacgtcgcaattttaacggctaacttgggttggctcgtcgtcatgtcaattaccgtttttccagcggccaatccactgaaaatcccgtgatcaccaaaataaacttgttcgacgtcccgtgggaacccaaccatggtgaaaatcacgtcactcgtttctgccacggcagccggtgtatcagcccaagtggcccccgccgcaactagcgcatccgccttactttttgttcgattataaaccgttacgtcatagccggccgtcatcaggttacggacaatcgctgcccccatgacgccggtaccaatccaacctaatttcatcatttacgcacctttccttccacgcactgttcattgcggcgccgacgccaaaaatgaatcagcaacgtaataataaatgctactaatacgataccaccaaaagccgttgcgggaatatcccaaccaatggcaggaattgagataaataatttgatggcaatcaagacaatcaagcaatacgccatggtttccaactcgggaatcttgcgcattaagcgcataatgacctcggcaatgccccgcatgcaggcaatcccaatcatcccaccaatcaaaacaatcaccggattatccgaaattgccaatgacgccaatacagaatcaattgagaaaatgatatccatcatttcaatctgaatgacgaccgaccagaagttgcttagtccgaagaagcgtcgttgttgcttgggtttctgtgccaccttggccccatttttcggctgactaaagtatcgatacaccaagtacccaaggtaagccgcacctaacactttgatctcccaaaaactgatcaaatacgtgccaatcccaatgattaaaaaccgaaagatataggccccccacaagccatagaataacgatttttcccgctcttgtaaattatctaaactctgggtctgagcagctaagacaacggcattatcaactgatagtaaacactcaataattgctaacgataaaatgattaaccagtcattagcagatgtgatgacgttaccccagttagtcgcactgaagaagggtccatacaactgttcgattaaatgtaacaaacggcatcctctttctcttaatattagtttgttaatctaagtatacctgtaaaaataattggtgccgcttacgtggactaattttcaaaaataaaccttattttcgtcgtatttacgactcatcatgccaatgagtaaaataagtgcccaaaaagctagccaattgcgacctttcttattctaattgtcgaataactttggctggtaccccggccaccaacgtattatcaggcatgtcatgagtaacgactgctccagccgcaatcacaacattattaccaatcgtcacgccgggcgtaatcaccgctctccccccaatccaaacatcatgaccaatcgtgactggatgaccctgggccaagttagcacgtcgaccactagccgtcaacgggtgattgaccgtataaatatcaacattggggccaatcatcacgttatcccctatatgaactggcgcgatatccaaaatagttaagttataattactaagaaaattatcaccaacatgaatattacgaccattatcacaattaaagtctgcttgaacggaaagattgcgaccgtaactaccaagaatctcttgaatcttggcagtttgcgcatctggatttgttgcatcgatctgattgaactcttgacataacttggcagcccgcgctttttgagcggccacctcagcatctttaaattgataccattccccggctgctaatttatctaattctgacattgttgtccctcctgtattttatcaccctaattttactgcttagagtggcgtcgaagtcaacacttgagttaatggtttagcaggtgttattgacaactatccttgcggaccagctgcctcgaatttattcagcagttagggcaacaaaaaaagaaaccgattactcaggtttctttgcgccaattctaggccttaaactcacgaattaattgttggagttgctgattatcgctagccgttccgaccgttagtcgtaaccaccctggccgtaagccagtgcgaatcagatacccatggtgcactagatagtcagccagttgcgtggcactcggatacttaaagaaaatgaagttcgcgccagattgatcgtaagtgacaccctgatcatcaaagaatgccatccacttagcacgttccgtcgcatttttttggaccgtttgtttcacaaaattaggatcatcgattgccgccaggactgccacttgagccaaggaattcacattgtatggaagccgaatagtttgcatcgttgcggcatatttggtattaaaaacggcgtacccgattcgaaagttagctaacccatatgctttggagaatgtccgcatgaccactacattcgggtacttggctggtaactgcatggccgttacttgagccgcgcccggtgtaaaatcaatgtaggcttcatcaatcaggaccatcgtctccgggggtacttgctggacgaacgcttcaattgccgctaatgattccacggtgcccgtcggattgttcggattgcacagccaaaccatcttcacgtggggcgtaatggccttcattaagccttcgaagttcacatggtcattaggcaacgttggcacactgattaattgccccccctcgatctcagcatgtagtccatattctgaaaacgtcggtgcggacactagcacctggtcgttggtggctaagaacgtccgtgataacatcacgatcatctcatcaagacctacactaaaaacgatgctattcgggtcgattccctgttgctgggccactgcttgtcgtaactcctgtgcgtcggcatcgggataacgattactctgggtgaagtcccaattcttcacagcaatcgccacttttggcgaggtgccatacgggttctcgttagctgataaccggactaattctgtcaatcctaactcagcttggagggtcgccaacggcttttcgggcacatagggttctaactgttcaatactagctttcattcggctacctcctataggttcttaatttcgggccgatccttatagtcactcatcttaccttcacgtttagccaattcttgcttaatctggtcaaaactaacaccacgttcgaccaataacactaaaacgtgatacaacaagtcggctgtctcataggttaattcgtcgtcaccgggatttttggccgccacaataacttcggttgattcctcaccaaccttttttaaaatcttatccagtcccttagtaaataaataatctgtgtaggagcccttcttaggcgttgccttccgttgtttgatcagttcgtataattcttccatattttgcatattcgacaccactttcttctataatatattcatcaatttaatacgggttaaaaacaatcctgcttatcgaccgttgggaccgcattttccaaccaatcagccatctaactcccaactcattcggctatcgtcatcaatccttaggcgccctgttctagttcaaccgggttaaagaaacaactcgtatgtcccgtatgacaagcgggaccatgcggatgaactgcgaccaatagtgtatcttgatcgcaatccaacgtcatactaacgacatcttgtaaattgccgctcgtagcgcctttgtgccaaagttcttgccgagaccgtgaccaaaaccacgtctggcccgacgccaatgtccgttgataactttccgcgttcatccacgcgaccattaagacatccttcgtatccgcgtcggtgacgaccgttgtcagtaagccgtcacccttttcaaagtctggtttcatcttacgaccactccttgttttcttaatgtcgctttgacatctgcaatcgttaactcgccaaagtgaaagacggaagccgccaatgcaccatcaaccggggttgtgctaaaaacatccacaaagtcttgtaagttacccgcaccgccgctggcaatgattggcacattgaccgttgctcccagggcctgatataacttggtatcaaaccccgccttagtgccatcgcgatccatgctagtgaccaataactcgccagcccctaaggcgaccgcttgcttggcccacgccactgcatcgaggtcggtcgcttgctgacccccatgtgtatagacacgatattgaccagctgccgcatcccacgccgcgtcaatcgcaacaacaatgcactggttaccaaatttttcagcaccggcacgaatcagttcagggttggcaactgcagccgaattaatagccgtcttatcagcacccgcacgtaagattcgttgcatatcagcaacgcttgtaattccgccaccaatcgtcagtggcatgaagacctgagctgagacttgttcgaccatggcggccatcgtctcgcggtgctcattggtggctgcaatatctaaaaagacaagttcatccgcgccctgttgctgataggcagctgcaatcgccaccggatctccgacatccgtcaagttgacgaaattaacgcccttcttgacccgaccatccgccacatccaagcacggaataatccgctttgctaacattcagtcacccccgctaattcggccagtgtcacaccgccttcagctaacgccttgccaataataacatccttgaacccactggcttgtaacacttgaacatcggtcaaattccgaacgccaccgctggcaatcaggttggccgtgggcacctgtgcttgtagttcttggtataacgcaaggttagggccttgcatcgtgccatcacgggcgacatcggtcacgataaagtgcttggcaccactcgtagtcattgtcttcattaatgtactcatcttggtctgtgactgctccaaccagcctttaattgccacataaccattggttccgtctaacccaatcacaattcgctcaccaccaaactcacttaacagtcgtttgaccagtcgtggatcagtcaacgcaactgaccccaagattaagcgatcgattcctaattcgagataacgagtcgccagctcgtaggttcgaatacctccaccgagctcgatcgtcccggtaaatgcttgccggatcgccgtgattgtcgcgaagttttctgggcgccctgacttggcaccatccaaatcgaccatgtgtaattgctgcaagcccgctgcgttaatttgttgggcttgaacgacaggatcaggattaatcaatgtcgcctgtttaaaatcaccttggtagagccggacactctgaccggctcgtaaatcaattgctggaaaaatcatttgcactcaccatttccttaaaagctgctagttgttgtaatccgactcgaccactcttctccgggtgaaactgcatcccaatcacattttgatgctgaacaatacttggaacctggacgccgtgttgaactgtcgccacgatttcagttgccggacataccgcatagtacgaatgaacgaagtaagtataggccgcgtcaatactggcaaagggactatcaggacgccgaagctcgttctgattccaccccatctgtgggactttgacattcaagtccgttggcaaagcgctaacccggccgcttaacaagcctagcccagcatgctcgccgtactcggaactactttcaaacaagagctgcatgcctaagcaaataccgagaacgggtttgccactccgcgccaatgcttgtaacacgccgactaactggcgttcttttaaagcggccattgcagctgcgaaagctcccacaccgggtaaaataactgcgtcagcggccgctaattgttgcgggtcagccgttaagatggttgacacttgcaggtagtcaaaagctttcttcaaattacgggtattacccgtatcataatcgacgattgcaaacatttaaatcacgcctttcgtagagttgaccccctgaatatctggattaatcgtgacagccgcgcgcattgcccgcccaaacgctttgaacaaactttcaactttgtggtgagtgttacggccgtacaggatgcgtgcgtgcaaattcatttcagcagcaaaggccacggcttggaagaaatcttcgactgtctccgtatctaagccaccgagccgcggattcgtgagctcggcatcaaaaactaagtatgaccgtccacttaggtcgacactgacctgacctaaagtctcatccattggcacaaattccgtcccgtaccgttcaattccctgcttatcacccaacgcctgcttaaagcattcgccaagcacgattcccgtatcttcagtagtgtggtgcgggtcaacgtcgaggtcgccgtgacacttcacgaccaacccgaagcgcccgtgcttcgcaaataagttcaacatgtggttcaaaaagcctatcccggtatcgatttcgataccgctctgttcgtctaaattcaaactgatttcaatctgggtttctttcgtttcacgtttaatcgttgcttgtcgcatgttcatttcctcctcatctgctaaaacgactaccggctgtaatcacaatcagtatcaactactaattacgccctaatcgtaataggtgtcaaaacgactctcaatcgcacgagcatggccttccagaccttcgacccgtgccaacgtggtaatcgccggagcttccttagccaaagcgtccttagtgtattggataaaggacgttcgcttaacgaaatcatagacgccaagtggtgatgagaaacgggccgtgccactcgttggtaagatgtggttcggaccagcaacgtagtcaccgagtggttcagaggcgtagcgtcctaagaagaccgacccggcatttttgattaaattcaagtactgagttggattcttcaattgcacttccaagtgttctggtgccaccgtattcatcaagtcaaacatttcttcaacctttgcgacaacggcaatgaagcctttttcgttaacagcgtcggtagcgatcgcttctcgtggcaaaactttcaactgtgacgtcacgttgtcactgacggcctgcgctaagtcggcactatccgtaattaggattggccgggctcgacggtcatgttctgcttgactcaataagtcagccgctaattgccgaggatcagctgaatcatccgctaaaataccaatttctgacgggccggccaccatgtcgatcgccacctgaccaaagacctgcttcttagcagtcgccacaaaaatgttcccaggaccaataatcttgtcgaccgctggaatcgactcagtcccataagctaacgcagcaattgcttgagcgcctcccacttgatagatggcgtcgacgccagcgattttggctgcagcaagaacggctggattgatgccatcgacttgtggtggcgtcaccataatgacttcattaacgccggcaatcttagcgggcaaggcactcatcagtaaagtcgatggataggctgccgtgccacctggaacgtataagccaacccgattaagcggcattaacttctgccctcgtagaacgccaggctgttcagcatcaataaagccagtcgccttttccttttcgtgaaaactcgtgatattgcgtttagctaacaacaaggcgtccttcacttgcgggtccagattgttataagcatcatcaataacagtttgtgacaacttaaagtcggtcaaggtgaccttatcgaattgggtttcgtaatccttgacggcggcatccccgtttttaatcacattggcaataatttcgcgaaccgctgattcaacctttaagtcagtcaattgttgggtcttcgtttgaactaagcgttttaaactagctaaatcttcattaataattttcattagacaaactcctttggattattcgtatcaacaactgtggccaaccgatcaactaaatcaaagatggcggcttgttgctgttttaaggctaaccggttgaccactaggcgggtcgagactggttgtaaatagtcataaatttgtaaatggttctcacgaatcgtggtccccgtctcggtgatatctacgatggcgtcggctaagccagtcagtggtgctaattcaaccgagccttcaatcttaataatttcaacatcttggcccaagcgatcaaaataccgttgggtaatcaatgggtacttggtgccgatgattttgcgtcgtggtgcaacgggatcaaagtcggccgtggatgctagcacaaattggcacttaccaacccccaagtctaacagttcatattgggtactctcgtgttcagtcaaaatatcgctaccaacgatgccgatatcagcagcaccccgttcgaggaaggtcgtcacgtccggccctttcgctaaaataaactcatatggttgcgtctcagaatcaaaaatcaaccgccgttgcttgttgcggacttgcgaacaatccagtccagcttcttccagcaacggcaggacttgttgttcgacgcggcccttagtcaaggcaatctttaaacgtggttcagtcattggtcatacctccagttaaatcaatcagttgggcattcaaacgttgtgcttcgatgcgcgcacctgctaagtcatccgccaaactcaaaatggcgtgcggttgtttcgctaagtatgcctccgcttgtgaccactgttcaggctcaaagtaaatcaattgttcagcataagcggtctgttggtcggtggctaaagtcgttaacaagtcaacgtctaaccccattcccacagccggttctgcttcagcttgaaagttcgttaacagtttgtcgtaacggccgccgctgaacaggtagccaggtcccgcttgtgagtaaccccgaaaagtcaggccggtatagtatttttgtggtgcttggctactcaaatccaccgagatgacctgctccggcatcgtttgttgcatccaggccaccaccgtttgaagccgtttcagacttggttggactgtttcaggtagtggtgctgccgctaattctttgaagatacgttctggacgcccgaacaaacgcggccatgctttgagaaaattatataaaggctgtgcgcggtacttggcaatcaacttcgtgtagcgtggtacttgcttatcgaacagtgcggttaaaatggcttgttgttcgccttcgtcaccagtcaaactggccacgacccgttgtgcaaattgggcatctcctaattcgatttcaacagcatcggcaatcagctcacttgaaagctggttggcaatcgttaaacattcaaattcggctttcagcgatgcgtaaccgactaattcgactcccgcttgtgtgatttggttatatgaacctgataattgacggcttactcgaaagatatcgccgacataaccaaacttttgcggtaaggggacattcgtcgcgctaatgaagcgagcaactggtaaggtcatgtccggccgtaagaccaaggtgcgaccatcgttgccaaataagcggtatagttggtagttacccatctgatatggatcaaacaccgcttcgttttctaataacggcgttgcaattggcgcgagcccgcgttgtttaaaatgggcttggatcaccgcgatcaagtgttgtttggtacgtgcccgccgaccaaattcatcccgggttcctagtggtaataagtgtttcaacataatttacgcctcctaaaacgtcgttatttttaaaactaatcagtttaattcatatcgttacttatcaacgtgcttaatcaattgcttacatgctaaccggagcgacttgcgattccgtcacgcaaacttaccgcatggatcggtgaaactaaaaaacgcccccttagcaatttgctaaaaggacgtttacgcgtggttccaccttatttcatctaccgttcgcacggcagacctcatgttgatcaagtcaacttggataacgaaaccaattcggctaaggctaatgagactggttcaccttagcagttcatagatgtgtgttcgttaagcctgtctgtccggttctcagctacccgggctctctggatgaggaagacttaattacttgttctaatcacaaccgtttattaaaatttgattagtcgtttaatttataattcattgtaatcactaaactgacggctgtcaaccctcaattaatttttttataagatgatagccacgccccacactggctatgtcatgggcatcagagccataaaccagcggaatgtcaagcttttgagcgcgttgtagaatctgttgaccgggataaaaatcattacaatacggtttgtagagaccagccaaattcaaatctaactgccgccgttgctgcttcactaacgccaacgtctgatctactaattgaagattatggacatccaagggttcagtcaagccaaagtaatcctgatatttgcggacgagactcatgtggccgatccgttgtggtgcgtaagggcccagatctgcttgtactgatgccaagaccgtctgataatactgttcaaaaacacgttggggcgtcttaagccactgcccaaaaccggctgcaaaatcatccgttgacatgtcaacacaccagaaatgctgccgtaacccccgcatgaaatggactgacaaaatactttcctgcgtccgaggaccataggtattcagaaaatcacgcgtccaagcaacatgctctggtaagaaatcaacttcaaaacccactgagatctcgatttgcccggcatatttggtcttcagtccgttagccagtgccaaataatcggctacttggttctcacgcaacgacgcctcagtataaccggccggcgtcccttcatactggtcacgaaatgccggtggtaacggtgcgtgctccgtaatacaataccgctgaaaacctagctgtatcgcccgttgaatcattttttccgttgcttcaccactcccatgcggacatagttccgtgtgggtatgcccatccattagcatatcctcatcaccctctcataatttatgcttattcaatcatattttttttagataagcaagtatggtcgaaacggtcattcgcgacaatacgctagcagtcacggcgaaagtctaacaatttacttatttatttatattaatcgtcacaatttctttataccatgatatagtcaacattagttaaagaacagcgctattcccaaaaaaggggggaccagccatgcacgaactcattacaaaactttatcaactcgcactttccagtcacattgtcagtacgttgctggaacccgtgcacatcgttatcttagctttacccatcatgaccttactactcgccatgattatcctgactatccagctccgaacacgtcaaacactgagtgagcgtaacttgatcagtacctattcgtttatttggtacttggcagcagcctacttactaattattctgccactcccgactcgctcatccgtggctagcctaacaactgctgagtataatttacaacccttctactttctcacccagttgaaggcactcacgccgtttgaactcggggaccccagtacttggttagccgccttcaaatctgacacgttcttccagccgttcttcaatattctattatttatgccgatcggtgcctacttaaagtggcggcaccgctggccgctctggttgatcaccctgacgagcttctcgatttcattgttcttcgaaaccacgcagttaaccggattatacggctactactcacgagcctaccggatgttcgatgtcgacgatttaatgatgaacacacttggtgggattgtcggtgctgggtgtctacatctgattcctaatcagtggcgcaatcgcgaccacagtacccggttgaattggcaggaacaccccatcaattggcgccgcattggggcgttggtcatcgattggctcgcaattgccgcctttgacaccgtctacttcgtcttagtcaaacattttaattggccattaccacatgattttcgctggctatacctggccgatatcatcctcttcttcattgggcccgcctggtgttggcatggtaaaaccattggtggtcgcctgctcaatagtcagatcgtaaccatcagtggtcaccaggccaatctctggcaactgcttatccattacagtgggctctacctaatcggcctgccacttttattcttggatttatggttattcaatcgtctaggcaacgttcctagtgccacccttaaccgcctggatgtctacctcgtcgtcgtttcagtcattttactgattatcagttatgatttattgttagcgcttttcagtcgcagtcaccagttatggtgtgaaaagttaagtagaacaactgttaaataattaggtggccttaaaacttcctttgcgttgtctcgcaactcatgttaaattgaagatatctcaaaacgctggaagtaaaaacaatgataaaagtccatgaactaagcgacgattttcgctgggtcgctgttaataattacactgaaaatgattatcatcaactcgtaagtgaggaacacgttaccgacgaaatgttaggctacgcaaccgatcaacacgaacgaggccggttggaatatgacgccaaaagtgccatcacgaccattatttttgacgtggtcacagaagacgttgaggaaggtacttataccgcccaagtcagtttcatgttgattgaccacaccctactgacttttacgaccgataacacaatattcgttgaggatatgttggcagacgaaatcgatgccgattgggaagatgtcctgcatccatacgaccatatctttaacgtcttgtacaagctatcacggcaatatttttcggccatcaacaagatcaataaacaacgccaagacattcagatgaagatgaaaaagcaaattcagcgttcggtcattattcaattgatggacttagaaacaacgctagtctatttcctcacgtcccttaaaagtaataacgacatgttgcagtcactcaaacggtttgtaccggtcaaattctcggcggcccaattagaacggctcgacgatattattgtcgaggcacaacaaggattggaaatggccaacattgcctcagacataatcggccgggtgtcgaacgcctactcgaacattctagacaacagtttgaacaacacgatgtgggtgctgacgattttctccatcgtcctgacaatgcccaacattgtcttcggttttttcgggcaaaacgtcgacttaccgttcatgaagaatccattcggttgggagattacggtattcatcgccgttgcactatgtgccctaaccatttggttgctacgacgcaattcatttcgtaaataaaggaggttttaaaaatgcctagtcgagttaaagtcacggacaccaacgattacatcaataaagctgcaatcgctgcacaaccaatcttgagcacccttgcccaactgattacatcggaattgcttgactttactgctaaaatcaagtggaatttgccgttctatgaacatgacaaacaatacgttagcattgctgcttatcaggcccacgtcagtctaagtatttcagccgaccttgacgatgcgaccctcactgctgctaaaactgctggttacgcaaccggtcaaaagcggctgaacattggcctggatcaacccgtaccagtggcgctagttagacaagtcttacaactaattgcttaaatatacgctgcttttaatttcaaaaggttccgaactgtcaaacaactgacaattcagaaccttttattttggttattcttatccaatatccaagctatcaaaaccagtttttctgtacagtttcatcgattaaactgaaactgctaaggactatcgcttgcgcaaccgataatcctttacattagcaaatcgagacagctcaaccagttgaccggtcgccttcaaatacgcatcatattcctggtcaagaccgggaagaacttcattagtacccggtacaaaatgaatatcctcatgtccggcagccgtagcggtctcataataccactccttaaacttcaaataactcatcgtatcctgtaagtcggtaatccgctgttgtaattcctgctcatgcgttttgagtaattggtaacgatcgtttaatgtcgtatcaccttcgagtctgagcgcaataaaagtagcaatgtcagctactgacacacccgcatttttgagacatacaatggtcctcatcaaatgtagatcattatcagtaaattcacgccggccaattgaattacgcttcacgaatggcagtaatcccgacttatcatagtaacgaatggtatcaatcgtcactcctaacttatcagctacttgtccgattgaataactcatactgaactgaacctcctcgattgtcgtttaaccactatcttaacgcagctaatcgtctgtcgataatgaaaggtcctcacgtgacttaatttcactaacaatgctttgtaaattagcgagtccaccttgataggcaaattcacctaatggcaagtgtgccggtacttctgccaaattggcctgatcaaacataacctgagcaattcggtgcggattgcccggtgcctgagtaaccgagtccgataccgtcgtaatcgcgtcactaaacgcggcgtaatctgcaattgtcggtaccatcttttgggatgaccgccctgaccactgcgttcgagcgccacttggttcaaccgtcataatttgaatccccaagtcttttacttcttgccgcaaggtatcactatacccctcaactgcatactttgtcgcactgtaaaagcccatagttggtagtgtcgtcaatgccaacgccgatgataaattaataattatcccagcatggtgtgcccgcatggtcggtaaaacggtcctagtcacgttagcgagtcccataacgttaacttcaaacatgtagcgaactttcgccatatcactttcttcaattgttgaaaaatagcctaagccagcattgttcactaaaacatcaatagttccaaaacgttgaatcgcttgagcgaccccagttttaatttgtgattcatttgtcacatcaatgcttactttctcaatacgcgtcgcgtcaaaaacatctaggtaggctaaatcatcggtgtggcgggcagccgcaatcagctgagtgtcagactgccgtgcaacaattgtcgcgagttcctttccaaaaccacttgaagttcctgtaatgaaccatgttttcatcttttaatcactcctattaatcttgctgagctactactttactcagtcatagtccttttagcagccttgactaacccatctaaccagctttggtgaccatttaacatcggattgggtgtttgattagctaagtctttagcaggctgtccaacttgcgattcttgtgttaataatcgaatccggccatctgtcaacttttcaattaggaaagcgtgatagacatcaaactgagtatctgcatcaccattttgccaaccatgccatgctagtcgtgctgtttcaccatccgtcggttcaacgagttccatgacctgggcatcgataggaaaaccaaatgtatcaaatcggaaatgttccgcaaactttagttcagtattcgtttgatcatccaaaataatgttagtcgcattgtcataatacgtcgtccacttcgatgtatcgactaagtttttccaaacagccgctaaagtcacaccgtctgtaatgacctcgtttgacacgaaattatcagtatgccctggtaaatagtccgttgaccaattaattgatttcattattaattcctccatatttgcgttaaaattttattctagctagcaaattaacatcatgacatctcattgaccattcactaactttgaataaacttagcttatatgctggagctgactccaggacaaggataaaggacactcatcagttttagcttaacaaattcttaatattgctttctaaaacgaacctaatttcaacatgacgcttattatattttatctgactctaacgctcgaataattcgacatcaaaaaaagctggtcgccagaatattgattctagcgatcagcttttcattacccttaacaaattagttttattgcatgtgcaataagcccatcttgtccattgtttccgcaatctgaactgagttccaagcagcaccctttaagaggttgtcggaaacgttccacatgtggaaggcttgtggcgtttcttgatcaggacgaacccgaccaacgaacgtgtctttagaaccttccgcattatgcgcttgcggataaatttggttatcagggtcgtcttgtaagaccacgcctggtgcagctgccaaagcatcttgaatgcccttgacagttgccttaggatcttcaacttcaaagtaaactgattcggagtgactcactggcaccggaatccgcacacaagttgccgttactttgatatccttactgtccatgtcgccgccacacataatctttttggtttcatggatcatcttccattcttcatgggtgtagccatcttcttcaaacacgtcaatttgtggtaacgcattgaaggcaattggataatgctttttgtcgcccgcaacaggtaagatatgagcttccatctcttcaccttttaagtaggcttccgtctcatcatgcaattccttcaaggcccggttaccagcaccaccaacggcttgataggttgaaacaatgacccgcttcaaaccaaatgccttgcgcactggttccaaagcaacgaccatttggatggttgagcagttcgggttagccacgattccatgatgaagcttcaacgcttcagggttaacttcaggaacaactaacggaatctttgggtccatccggaaagcactcgtattatcaacaactacggcaccccgtttgactgcttcaggggcgaacttcttagatactgagccacccgctgagaagagggctaaatcaattccttcgaatgattcaggaacggtctcttcaacagttaaggcttgaccattgaactgtaattgtttaccggctgaacggcttgatgccaaaagtttaactgagttgacaggtaaactcgtctgttccaccattttgatcatccgcgcgccaactgcaccagttgcaccgacaatcgcgacgttatatccactcactatgaagacctcgctttgatagttattgaaacctcattatagcacgtttgtaaagattagaaaataatgagttccatccgaccataaattaatctgtcactgattgcactgccagctgttttgcacacgcagatcatcaaaaaagtaaccgttaccatcgttaattaaacagtcatttagctgtcgcccattttgacgtataatgaacctaattaaaaggaggccgcgccatgtgtaccagcttaacttatcttgatactgacaatcaccgctacttcgcccgcaccatggactttccaacaacgacaccttggcggccaatttttttgccgcgccgttatccgtggccaactgggttagcgacgacgcgtatgacgcagtatgccattctcggtggtggtcggctacctgaccactttaaggcttgtttgatggctgacggcattaacgaagctggtttggtgtgtgctgaactgtacttgccccacgccgttgaatacgccactcaaccacaagtcaaccaaattaatttaacaccccaagccttcatcaactgggctttaggtgaacaccaatcagtcgcagccgtgatcgccgatctgccaagtgttaacctggtcggtgcgtcctggggtgatgacactggtgaagtctatccctttcactggtatctcagtgatgcacacaccagtgccgtcatcgaacccactggtggcccactgacggcgcaaccgaatccagccggcgtcctgaccaatacaccagtcctaagcgaccatcagcgccgactaaatcgttatttagcagtatctggcaaccagattacaactgccactcgtcaggctgctcagcacgtgattcagactaagcaaccattaccgagcgggccgattcccactgatcgtttcattcacatggcacttcgacgactgggaacaccgcagctagcaccgcaacaagtgccgaccactttattccgctggttacaagaagtaagcttaccataccacgccgaccgtcgccatctcatcagccacaactacacgcactatcgttgtttgatcacgttagcgactcgtacttaccgctttattccacgcacgactggtcacgaacaacgactgacactaacacctgaaatggcaacaacctggcgaacaccgtacctctttcctgccgattgaaactaaaaaatcacgatgttgagactgaactcacatcgtgatttttaattaatgacgctgcttcaaaaaatgatcaaattcctgattgattgctgctcgtacttggggctcatgtaaatcagcttgcgctgcattcggaccacccgtaacttgactaaccacttgcaaatagccgaacaagacctggctggggtcaagatgatactgcttggctaacgtcacggctagatcataacgatcaggtcctaataaacttgaataatccattatgccgtccctcccttcgcctgttctagctggcgactcatccgtaagtaggccaaaaagtgaaaaatgatgccacctgctagtaagattgcacctaaccataccgaccaaaacgttgccacgatggctaagccataaatcgtgacacttcgaaccggatcaaacttaattgcggtataaaaagccattgagattcccggcttctttagatcctggtgatgatgcagataagcgtacatgaaataaaatgtcgccgaaataaacagggcaaccaaatcataaacaataaatgccgtttgcatatcctgtcgattaccagttgtcaacgcatctgccactaatgacatcgggtaatccaataaggtgatactaaagagcattaataagtttagcatattaacgttgcgatcaattcgttgtagcatgttgaaataatcatgatgaaataaccacagcgtgccaacgtagaaatacgaaaagacgtacgacaagatcaacggccattgcgctaatagtgccgccagtaaatgtcccggttggtaatcaggaatgtgaaattctaagactaaaattgtaattaaaatggcaaaaataccatcactgaacgcctgaaatcgatctgttttcaaaatcagcacctcccacagcgttttaggataccataactcacaagtaattactgtaattaacttttcaaactgacgaccaaaccgcttctctaacacctgatatggtaagattaagtcaaaataaagtaattgatgtgggggcgtcaagacgaatgcgaaaattattaaaaccaaagtggttgttcttatttttctggggaatcgtggtgtttgcaagtattctgattttaccgaacattaccacgtttgtgaatgaacaaaccgcaatgccacaagatgcaacaacgagtcctaaatatcaacaacaatggggtcacgggttaaccaacagccagtccttaacgttagtcttcaacaattcaaatggtaaattatccaaacagcaacgccaacaaatctccacgaccctagccaaacttaatcgccgagccgatgattatggcattaaccagcttcgaacgccaaccggtatgactaatgaccggcacttattacgttccaatgatggttccaccgaattagcccttgtcgccgttcagacatcccgggctgacctatctgtgattgcaaatcaacttaataatgcgattgcaatcgccgacctcaatacgagtgtcaccagtacggacttgatctaccaacaacacgtgcaacaacaacgtcgcaacttgctgattagcatgcttgtcggtagtctgctcagtttaatcattctcggcctcatcttccgctcactgttagtgccattactgaacttactgtgtcaagtggtcactctgatcacaacgattagctttatcactaacgcgcgtttagcttggcattggccactgacggctaatgcgctgagccttgctagtctaatcagtttaatactgactagtctattgacatggcactttatgtacgcgtattggcaatcgagcgcaccaaccgcaccgaccactgtcagtctcaaaattctgacacttcaatatcgacagtgggcacttgtttttatcccattaatactcataaccatcactttacactggactgccttcatctcattagccgctgcttgggccattactgtagcgcttggaatcaccttactggcggtaccgccgctcaattacgcctttaccgcttggctcagtgataatttattttggccaggaacaacggcttggccgacccgtccacgcaatctatagggccaattgagcaagttcggctactggcagccagcgcttgggagcttggccgtcgcactgttactactccccggcctcattcttgctaacggccagtttgccgatgacaacttacgaccctggcgccaaaatcagcttagtaatgctgaattaggtcagcaattagtccaagctcacttcggtaccggtgccacggcgccaatcacaattacactacgagcaccgcagaatttaacgcagcagcaatcattacaaacaatcgatcacctgacgactaaactgcgggccgtaccaaatgtggctcaagtcatctcagtgacccagcccaccggccaaccactaagtaatttctacgttaaccagcaacttgcgactatcaacattgatttggctggtaaactgacgagtatggcgaaactcaagagccaactcacgactgaccaacaaagtctggaacaagcagcgactagtcgccataccaagtcggtcgaccagttgtccgaccgcatcaatgatttggctgaactgaatgatcaagtgcaacggcaattacaggctattgacacgacgctaacgacatcagctgaggctgaacccgatttaaccaaagtcaatcagcaggtcaccaagttagatcacctgactgaccgcatgacaaccgcactaaatcacgtggtaacggcccaaactacggtcgcaaccgaagctggacacgttgatcagcgtgttcaccacgtcaaccaatcattgaagcagaccgttcaacccttaaccaccttactcgcttcactgaaaaatacgaagacctatctacatgatttagccgctagtcaagttggccggagtttttacctgcctgctaacgcggctactaatcaggcctatcaaaacagtctttttactaatattagtagtgatttaagcatgacacagctaacggtcactttgaaatcagcgccggctagtgcggctagtcgcaggaccctgcaacgacttcaggcagtcacccacgacagcctactcgccacgcccttagcgcacgccaaaatcctaacaaccggggtaacacagcaacagcactatcagcataccctgattgcgacccacgcactgagatggctcacactcggattaatcatcggcatagttgttttatggttcggcctgcgttcattgaccttcagtctgttaatgaccgcgtgcttaactggcgtgacgttaactagttggggttggactcagttaatattaacacgctggttgcaaaccgggccgctcagtagcagtgtcttgcttggtagcttgatgttgttgacactgcactggctaatgattaccaccgcaaccggttaccgtcaaagttggttacggcacttggatcccgctcatctgcaacagcacttttatactagtggacgattcgtttgcccggtaacaatgattgaattgacctacttactgccactgcttttgacgaccgcaccaaccttaaaggggcttgcactcatgagtctcattgggattacgataagtaacctcatcgttccattgggattttcagggtggacacgttgggctaatgagccaccagctatagccacgctttggcagcactttcgcccatcatctaccaaccgctagcaattagttagcctaatctttgagtaaaaaaagttgcgtttccagacgtcaaatctggaaacgcaacttttttacaatactaaattgaatcgtagcaaactgccagtcgtttatacttaatgattgtgtgagcaccggtaatctgatagtcaccgctgactaactcaatatcgtcatactagcaacgacaaagactaataaggtcatcgccatccgccattcactgtgccaaagattttgcgtgtgccaccacacggctaacaatctccacatcagctagctagaccatattgcttaatcgtaactcacacgatgattcaaatttattgattgaaattctgaactgcccccgtaaacaatgttagctctacacataaccaaaacaatgccccagaagccataaaatttctggggcatcatcaatccctacatgatactttaataaatcaattcatgcgtcttcaagcacgacggcgataaccgattcccaccgcggcaattaacaagcccaaaagcccggcaaaaatcacccaaatcggcgactgcttctcgctggtttgcggcaaagttccgtggttatagccagctgatgtgctttggtcactaccagttggcgttccaaagccgttcataccagttgtcacaccattacccacagtgccaccagcaccattgacacccgtgcttggttgcttgatcagtcctggtaatgccggttgacctaatccagattgtcccggtttaggtgcagcgggttggcttggaccgggtacagctggtcgttccggttgtggcgcggttggccccgtggttccagggttacctggctcagtcgttcctggttcgcctggtttgcctggttggcttggttcagttgttcctggttcacccggtttacttggctcagtcgtccctggctcacccggttggcttggttcagtcgttcctggttcacccggtttacttggctcagttgttcctggttcacctggtttacttggttcagtcgtccctggttcacctggttggcttggttcagtcgtccctggttcacctggtttgcctggttcagttgttcctggttcagtgaccggttcatcagttgctgctaccgttaccactgccgtttgattcggcttgattgtaaatgataacggtgccgcattaagctgataaccactaggcgctttagtttcaacaaattgataattgcccgcggtcagaccagatacggtaagttgaccagtggtatccgtcgttaatcccatcttgagcactttgccagtggcatcttgcaattcataaacggccccagccaatgccgccttggtcgtggcatcagtcttggttaacgtgacatcaccagttgtcggcacaactggttgcttgacatcatcctgacttacctgaaaagcaacctctggcttaataccgccgagagtaaattttactggggtggtattaagttcatacccaaacggagccttggtttcaacgaactgataatcaccagcacgtagatttttgacaatcaattgtccctgcgaatcagtcgtcaacccagtttggattaccttgcccgtactatcttgcaattcataaacggctccagccaacacggccttggttgccgcatcatgcttcgttaattcgatggtataggtcatccctgctgttccattgccaccataggtaatatcggccgtcgcatcaacgcctagtccgtccagtgcagccgtattatgccatttagctgtgtcagccggattaaaattctcaaccttagtgttataagtaatcacaaacggcgaatgaatgttgttaaacgtaaaagtaatcacgttaccattagttgcaacagtcggtgttaacggttgctgtggcacttggataccattgataatttgcacggcctgtgccgcaaccgaatctggaatgaatgtctgattgggccctagcgtatctgtaaccacaaccgtcgagttattgcccggtgtcacggtaatgtgccaccccaataccgttggcgcaccatcacttcccgacgaaacaaccaagccacttttagcaatttcggctgatccttccgtcgccgtcgcattgcccttcgcattcatgctcaatgtgccagcccgactattgagtgtacccaacgcatccgtaaacgtgattgtcccagtactggcacctttcgtatacgtaaacgtgcccaaggtttgcccggcagaatctgttaacggcatcacaacatcatgatcgatactgacgtacgttggaatctcaacggttgctgtatcaccggccttaatcacttcagaatctggaatactccaatgatacgttaattggtagccagccttatcattcaacgtacttgtgtcagtaacgggcttgccattcgcatcaagtacgatggcattgccagccgttaaacccgtaacactgatttctttagcatgtgcagtactccccagcataaatagcgctaatattaccgttaacatgcttagcatatacccaactagctttcttcgcatacgctcctcccccattcaaaaaaagctttgtctttgtcattctcacaacccaacacaccctcacagtcgcgtatgattgtcagggtcggccaccagttagtgattcacgctaatcagctccatatgtacaatactgcaaccaactagtttactacgaatcaaaacttttatttgcgaactatccgaactaatcgtttagcaaaaaaggcccctagaactatgcctagaagtctaccggaaattccatttacattgtctcgctaaaaaataaccacaaagctaagccttaagctgaaggcccctttattctggaatatgactcgaatcaacaacctaaccaactgaaagttaagccaatatgcttacgacaatgtcaatatcatcgtctgatgtcgcaaacccgcctccataaacgggcgcccttgtggctgataccctaattgtgtataaaacccttgtgcagtgacttgagcgcctagtaccaactgtcgccaaccacggctcagcccatccgctgcaatccgttgaagcaattgtcgtgcatagccctgccctcgcgccgctttcaacgtagcaactcgttgaacatgccccgtccattggtcgctaggtgtcactcgcgctgtggctaccgcctgcttttgatcatcatacaagacgtagtgccacgtcgctggagtgaccgtatcaatttccaaagtttcatcgatatgttgttcctgcacaaagactgcccgccggattgcaatggcatccgcataaactgatgaatcaacctggttactcatttttatctgcatcacgttatcacccgttcttctgaaatactttgagaatacgcgtttcaccggttatcgtcaaactaactcgaaacgaaattaacgcattcttaaaattgttagcgattacgagttccgatattatgttaaaatgatttgatgactggttatcgagtcatatccaaatttgttaaaaatgaggtctttatcgatgtttaccaaatttcgccaatacgttaacacgcgaattggatttttttggctactagtcttcttattctgggccaaaacgatctatgcgtacttaaccgaattttcactaggcgttgccgatccactccaggcattcctgatgctcgtgaacccgattgcaacgacggtctttctgtttagtctggcgttctacattcgtaaaaccggtgtatattactatattttgctattcattgatgcactcgacaccattttactgtatgccaacgttatctaccatcgtgaattcacggatttcatgactgttagtacgattaccggcgtgtccaaggtcagtcagggacttaccggctcatcgttagccctagcgagttggggcgatgttctttactgggcggatattattgtcattctggccttggtcattcttcatcggattaagcaagacacacgaccaattaagaaacacacggcctttgcgtacacctctgccgcgattgcaggtttcggtcttaacttgaccttagcagaatccaaccgaccacaactactaaccagaacgtttgaccgcacttatatcgtcaaatatcttggtatagatgcttttacagtctatgatggtatcaaggatgaacagaccaatcatcaacgcgccagcgcaaagaaatcagaattagataccgttaaagattatactgaatcacactatgccgcgccaaacgctaagatgtacggtctggcgaagggtcgcaacgtcattgtgattcatctagaaagttttcaacaatttcttattgatcagaaagtcaacggtaaggaagttacgccgttcttaaataaactgtatcatagcaactcaacttacagttttaagaactttttccaccaagttggtcaagggaaaacttctgatgccgaaaatatgcttgaaactagtacttacgggctctcaactggatcattgttctcccaattaggctcagataatacgttccaggccgctcccgcgattctaaaccaacgggccaattattcctccgccgtcttccacggtaacgtggccagtttctggaatcgaaataacacgtataagaatatggggtaccaatatttctttgatgccagttatttcgatacgactggtgataaatcaactggatatggtctaaaggataagctgttatttaagaattcagttcagtatcttgaacggctacaacaaccgttctacgtcaaatacatcacggtaacgaaccacttcccattcacacttgataaggaagacacgacgtttaagacaacggatactagtgattccgccattaacggttacttccagaccgcccactacctcgatcaatccgtcaaagaattctatacctacttgcaaaaggctggtttattaaagaattcgatgatcgtactctatggtgaccactacggcttatccaacagtgaaaactcgaccttggcacctattctcggtaaatctgcggacgattggacttcctttgatagcgcccagcttcaacgtgtgccattcatgatcaatattccaggaatcaagagtggtaaagtcgaatcgacttatggcggtgaaattgacgtcctaccaacgattctgcacttactagggatttcaagcaaacgttatattcagtttgggaccgacctcttctctaaacaacacgatagtaccgttgcgtttagaaatcgcgatttcgtcacgtctaaatacaccgtccttagcggcaaaatttatgacaacgcaactggcgaaacgattgatgatgatgaggcagttcagaagactgttgataaagatcagaagaaagtcgacaaagaattaagcctctctgattcacttaacaataaaaatttgttacgtttctacacccctaagggcttcaagaaagtcgacgcttctaattacaattacgccgatggccttgaaaaagaaattcagattcaaaataaattagctggcaagtcaaccagtctctactcgaagaatggtaataagtcaacggactcgttgtatacgaccgacgcaccggaagcttcgcataagaagactgattctactcgtatcaagattaccaaccctgatgatacggatagtaccacgactagctctagcagttccaaatagcaacaagcattccatttacaatgcaaggcgcgacggcaatttatttgccatcgcgcctttttatgatctcctttaaatatgacgctgccctcacccatctggcatcgttttcatgataaaatactgattacggcttgtctcatgcttgcgcattaacgatgattacacgtgccatctcttaagttcagtggccgttcatcagccattcgcacggattaccgaaacgtgctcggtagccccattatgcttagttgaaagtggtttcctagagtgactaatctaagcaattatttagataaaaataactaacacaatgcgtgttacaataaaattaataatgacttgattcgtcaatgccggatcaagggaggaggcaccacgcatgggcgcttggcgtttttggtgggatagtacccgccgtttttataagaactggggcagttacgttgccctgatatttagtaccaatttggtcattagttacctagcaattcctttttttaattgggtgctagaaatgttactcaagtggcaacgggtcagttatgtctcgtacacgaatatcggtagtattattattcaccaaccactggccgcactcggtatggtggcgatcttattagccattattattttagtttattggcaatttgcgtttctgctactgggtattatgaatatctttcgtggccgaccacaaactgtacgcgcggtcttgcggtcaacggtcactagtctgactggcacctcacccagcactttcttattctttatcggctactttattgtgattttgccatttggaagtttcatctttacaacaccattactcaacaaggccaaaattccagccttcattgtcagctatctcatggaaaacccgtggatgacgctcggcttggggtgcttctacttgctggctggttaccttggaattcgcctaattagcctattaccgctaatgattgtcgatcggcttccatggaaaacggccgttactcgtagttggcaacaaacgcgccaccatctttggcgctacttatggaccatgattgtgaccttatttatgatttttctgatcgccacgaccatttatacgttgatttacgtagcccagcttcaattcgataaaacaagttttgccatggccgctgccactgttaatctctttatcatggaagcaatcaccgaaattattatttgttataccacggccatcttcatgatgttaattattgtttgctatcgtcaagactttacactcctccgccaacaaccgcaatactttaacgaggcaccacggttgcgcaaattgactcgggcgagtgttgcaattggcttgctgttagcgacaagtttgctagttgccgttaatttagtctacttaaatggactagtaattaccaagccaatcatgatttcccaccgcggcgtcgataacggtaacggcgtgcaaaacacaattcctgcactgatcaagaccagcaaggaacatccggattacgttgagatggacatccaagtcaccaaggaccatcaattcgttgtcatgcatgatccaaccttaaaagccttagctggcgttaagaaaaagccatctcaattaacattaaaacaactagaaaaaattactgttcgtgaaaatggctatcaggcaaagattccaagtttcgatgcttacctgaaagcggctcacaagcatcatcaaaaactattagtcgaaatcaagaccagctcggcttacaccgccgccgatactaaacggttcatcgatcgttatggtgcgaccctactggctcatcatgaccaagtccatacgcttagtttcaaagtcatgcgtgacttgaaacgcttagatcaaaaacaattcgttagttacatcttgccttataatctcacgttcccgcatacagtcgcgaacggctacaccatggaggtcaccacattaaacgaccaattcgttgacaaggctgaccgcaatcacaagacggtttacgcctgggacattgataatacggaccaaatggatcaaatgatgttcatgggcgtcaccggcgtagtcactgataatctaacggaaatgcagcaagaagttaagagcaacaccgaccatcccagctatgccaaactcttattgacttttatgaatgaattaagtctaactagcaacgagtaatccacattatttcaaagttgctgtcacagcgagtgcataaatcattcagcaaccacgaaaattctgaatgatgtcgttgctgaaaaagtgacttccagctgatgacgaatcgtaagcgccatctgaatgcataagtgcatttggatagcgctttttttgatctgattagccgtcgcggtgattgagatgttggtaaaaaactgtattaaagtgctcagcgctccgggttatctgccattttaatttctaaagcgcacgaatgccgatagttgatcagccactgatttttaatacttttaccgccaattaggtgctcatatggaatgacccagaaacagggtctgaaccatgaagtcctttgatgacagtacgttatcagggacgtcaatattagataaaaaccagaaagagccatgagttatcatgactccgtaagcaacagattggtagcagttcgtcctacttttgcttgtgtctcaacacaacaaccgaaatacctaaaattccaagaactattggaacatcgattgcggtaaccggcaatccaaattgcgataaaatgtaaatgaagcatactattaataaaacaccaccgtattttaaaaaaaaccgataattacattgtctggataacgcttttttaaatacagtaatagaaaaataaaacacaaataaagtatcgtatgcttcacaacacttagtgacatataaaatctaatcatctaaactaacacaccatcaataatggaaccttttgccataaacagaatcatcctctcaaattctacgttaacaacaggcagtatgttacgaatttatcttaacaacagcgtttctttatcgttatcaattttcagtaaattttgtgtatttttttgtacaaacttatacattgtaaaagtttagtcggagcgaccggttgtttttttattttaagacacaccaaagctatctagattgaaaaaaacatttgcctttctaccacttcatggtacaacaggccgccaataaagcgggttcttaaaggaacaagcaaataggacgagaaaccaagattcggtttctcgtcctatttgcttgtatagcgccagttatatcgcagctcttttaaacttacattttttcaaacacggtcgtactatgcagtggactccgtcgttcgggatacaaggtcatcattaactgattgaccgcgttaggagcttccccgaagccactggcaatcaagcctaacttgcccgcgtaagtcaccgtatcaccaatagccgcaatcccaggtacgtcggtattcatctccgtatcaacggtgatgagtcggtgggccatggttggggtcacgtgccagtttcggatgactttattatccgcgataaagccatagttaacaatcaaatcatcaacggccaatgtttcttcagttgtgccgcgaacctctttcatcgtcagctgtaactgtccggtagccgtctctgcaagttgcttaatcaaaaatggcgtcttgatttcaacggaagacgcttttaacaagtccacattgtgttccatcccacggaaccgatcacgccgatgcatgatataaacgtgcttagcaacgggttcaagcatcaaggccatatcgatggctgagtcgccaccacccgcaactagtaccgttcgatccgcaaattgcttgacacttggaatgtggtagaataattgcttattctcaaattcagccgcattatcgactgctaagcgccggggttcaaaagccccactcccagtcgctacgataatcgctttggaatgtgactgctgtccactcgccgtggtaatcgtgaaatcacccatcgctcccgtgacatccgtcaccgggctcgccaattgaatgtcaattggaaattgtgtgagttgcttttcaagttgtgccaccagttcgcggcccttgattgccggatatcccgcaacgtcatgaatgatcttctcaggatacaaagcctgaacctgcccccctaattcggggagactttctaataactgaacccgtgcattacgcataccagcatagaaggctgcaaacatgccgaccgggccaccaccaataattgttaaatcatattctgcactcatcgtttcccagctctcttctatgtagacttattgcttctcattctagtggattcggcgaaggtttgcaaaagcaatttttactaattcgactataataggattcaaaggcgaggtggatcagtgatgcgacgaattaaaattattaaaatcatggccattattagtgcgaccctggtcgtagggattggatcctattggcaacatcgcttgaccccattacgaaaaacgcgggtcgcccaaacgagtattccgaccatcttcgtcggtggcgattacgcgcgcgcattttctaccgacggctttgtgcaccgcttaaccgcggcacacctgatgacgaaaggattggtcgtccatgttagtcacgccggccacgtgactgtccaacagttcggaccactaaaaaacaacccaacgattcaggttatctttgccgataatcatcatgcgaaacgtcaagctcggcagtttgctactgtcatgcaagggctcgcaaaacgctaccacgtgacccgctacaatgctgtcggtcactcatctggaggtaatatcatctttgattatctgacagcgcaagtcccccagcgcgcacaaatcaataagtttgtgaccattggctcgacctatccgggcttgaccactcagcagttaaaccggttaccacggtccttgccgatattgaatattgccggccatgtttggcatacaagtggtgatggcggcgtcaatttacaagccgtacttaaattcagccatcaattattggcagctggttggtcaccaaaaacccaaatcattcacggtagtcccctgaccgccagccactcaatgttgcatatcaatccacaggtcgacttactcatcatccagttcttgtacggcaactgatcaattcatcgaggcgtgctgccaatcaacctgaagcacgccacacttctaatttaacaagattcggacacccttacgtcccttggatgggatggcaaatggtgtcttttctggtatcctaaaacatcacatatcagttaataacgcaatcacaaaaaagtctgctaaatctggccgcataccgttagttaagctagcaaacggtgttttgtcagcgatttccatgtacaatggtggtaatatatgggtatatcttaatggaggcgattaccatgcgcaaaaaatggcgatggttattattagcactcactggaattttctttttgatgttcgggccacccttagttagtcaggcccgcaacgtaattgaagcaacgggcaacgatgttaatagtgcggttatcaaagatagtaagggcaagataatggctcacgatgcacaattgccagaagaccaagaatacacagtcaattacaactggcgcatccctgataacctcaagatcaaggtgggcgacacgatggctttccaagtccccgaaaacgttcgtattccgcatgacgaggcttttccaatgaaaggaaccactgcaggtaccatcggaaccttcttcattgctgccggcgcacatacgggtctcgtcacatttaatcaggcctatcaaaccagaccacgtaatcggaaagggtttgttcaattggacgccttcggaaccgttcctagtcatcctggtaacttagccccaattttattagagaaatcagctgaatgggctgacgaagctaatccacggcggatcaactggacaattcgtgtcttgcctaataacaatcagctcgtcgatcccacctttgttgatacgttgagtccgaaccaaacgtatgtcaatggcagcgccgtcctacgcgatgagacaggtaatattattcccgtcaatacgagcgtgaatggtaatcaattgacgtttaatgccacagggtcgtttacgtcagagttagctttgacctaccaaactaagactaacgaacccactggcgacgcaacttttgaaaataatgtcacctatactgacaagaacggcaacaagggatccgcgacagccacgatttcacggccagtcaccgaaccggacgttcccgaaaatccaggtatttcggaaccaacagatcccgatgaagatgaggaaccaggagttactgaaccggaaaaacctgggactaccgaacccgagaaacccggagtcaccgaaccagagaaacctgggactaccgaacccgagaaacccggagtcaccgaaccagaaaaacctgggactactgaaccagagaaacccggagtcaccgaaccagaaaaacctgggactaccgaacccgagaaacccggagtcaccgaaccagagaaacctgggactaccgaacctgagaaacccggagtcaccgaaccagaaaaacctgggactactgaaccggagaaacccggggtcactgaaccagaaaaacctgggactactgaaccggagaaacccggggtcactgaaccagaaaagccgggtaccgtctcaccagaacagccgagtggtcctaagcccaccaatccaggaaccgtaacacctgaaaaaccaacggccgtcactccagccgttccaaatgagtcgtctccatcgacccccgaaccaagcgtcagtggtaatctgtcagcacctgccaatccagcgacaaattcgactaacacgaccgccacaacggttccggcaactaatcccttaccagcatcggcagctacagcttttgcaggctcagcaccgatgaataagtcgttgccacaaactaacgaacactcggcaagttggtcagtagctatcggtctcgccttattgattggattactcggtagcgcttttgtcctgacacgccgaactaagcatcggcattcataattagcttgtcacaccgtcaaaaaaatgagctgctcacgtcgcgttgaactgacgatcaacggtgtgagtagctcattttttataatttcaacttgctgctagtaacactgcgcgatactttgttagtcggtctcacgatctagttgctccagcgccgtttttaattgtgcttgcgcactcgcatccagtgagggatacgctaatggcaattccgacaggcgttgattgatgatttccgaaacacagagccgcgaataccacttactatccgacggaatgacgtaccacggtgtcgctttagtagccgtcttggtgatagcatcatcataagcacgctgataatcatcccaatactgccgttcctgaatatcggcagctgagaatttccagttgtgacttggaatttcaatacggcgaataaaacgttgcttctgttccgcctttgacatgtgtaagaagaacttgagcactaagtagccgttgtgttgcaagtaatcttcaaagtaccgaagatcgttaaaacgacgttcaaaaaaagcatcatccacttgtttcttatcgttaatctcaccgacgtgctcattcacaataatttccggatggactcgactaacaagtacgtcttcataatacgaccgattgaagatcccaatcatgccgcgtttggggacccgatcatgaattcgccataaataatcatgcgcaatttctttagtagttggttgcttgaacgatgtgacttcacagccttgggggttgaccccactcatgatatggcgaatcatactgtccttacccgccgcatccatcgcctgaaaaatgactaaaacaccaaatcggtcttgtgcatataacttaccttgcagttcagtcagttgcttaatattcttggcgatttgcgccttgatgaccttttcgtcttcaaattctggatcaaccgccgttgctaatttagttaatcctaatttttgctttccagtatatcggtagtgcttttcaaaattcacgttctagcttcccctcaatattatcgataatcaactaatgtcgctagcggttgatgatctgctggcttgccagcaacggccgctttgccaattgaaacgagcaatagtggccgataccgctgggcgtcaagttccaaaatagacgtgaatccggcagcatcaaacccggtcatcggattcgtatcaaagccatgatctttagccactaacataaattgcatcgcaaccaggccagcatctagggcgccaatggtctcgtcaccagtatcaaattgttgcccctgactggtctgaaacgctggcgcttggtgttggttttcacgatccagcacaaataagacgacggcactggccgtagttaactgactggtattaccagtcgcggcacacaaccgttgtcgcaaggctgcatcctcaatcaccaacgcccgaatcggttgttgattcaatgcggttggtgccaaaaatgcggtctgtaacatcgcggccatttcttcacgcccaattttagtttggccgtcatattgccgaaccgaatggcgcgcattcatgattgcttctaatggactattcgtcgtcatcagcttcaccttccttaattgtcagtataaaacagccttcaacatttcgccagtaagcgtggtcgtgaaatatttccgaacatttttctgttcaatgttaatttaattcgccgctagccgttgtcagcatcaactgaaacgtttacaattaaaacatagctttatagcgcttcagacctaatcagggaggatgttttacatggcaaaacgtaaaatgattttagacttagacaccgggattgacgacgcaatggccattgcctacgcagtcggtgcacccgacgttgatttaattgggattatcagttcttatgggaactgcctagtggatcaggcggcgattaacagtttacaaattctagaactactaggtgccactgacgtacccgtctttctaggtgaaccccactccagtacgacggaacactttgacgttatgccgatttcacagcagattcatggcatgaacggtatcggcgacgtgaaccttcctgaaccgaaacgcgccgtggaaaagcagtccggtgtcgactttttaattgatgccgttcaccaatatggcgccgatctgaccctagtgccaaccggtcccttaaccaacttggccgaagcactcgaaaaagcaccagacattgccagcaccattggtaatgtgaccttaatgggtggtgcactgactgttccaggtaatgtcagtcactacgctgaagccaatattaatcaagatgccgaagcggccaacgccgtcttcaccagtacgatgcctcttacgatggtcggactcgacgtaacgttacggacattattaaccaagactgaaacacaacaatggcgggacttaaagacaactgcgggcgaaaaatttgctgacattgttgactattacattgcggcttacgatattacgagtcctgacttacacggttgtgccttacacgatccactggcagtcggcgtttcactcgatccaagttttgtcaccacgttagacctgaatatgtacgtccaggctagtggtgaagattatggccggacaattggtgaccctgcgcgactcaatgacccaactaacgtcacggttgcgttaacggtcgacaaggatcgttatttgaagacattcatgaattacctgacgacattatttaaagcccattagttatatttcatcatggcaaccggatcacagaagttcgcttccgtgatccggttgttattatttatttacaagtctgctaatttttcatttttccccggcaatttatgttaaattagcagtatcaccattcagaaagtaggtatcgccatggcacaaaaatattacgctgttcgtaagggacgccaacctggtatttaccgcacctggcccgaaactcaaaagcaagttagcggttatccacaagcacagtacaagagcttcacaagcgagaaagacgctcaggattttatggctggtaaggccagtccaacccgactagctcactcaaaatcaatatctaatcaaacgccggtcaacgcagccattactgtttatactgatggcggttcgcgaaataccggaaacgttgccggtcagcacgtgcaccaagatgataaggctgcctgggcttatcggattgaaatgcccgaccaactcgtcactgactctgccggcgaatggggtgccaccaataatcgcatggaaatcatggccttcttacgagctcttgaacaattgcaacagcttggccaaactaagactgggattctgttcgtacttgattcacagtatgtcctcaacgcagtcactaagggctggctggctggttggaaacgacgcggctggaaacgcagcaatggtccgttagttaacgctgagttatggcgtgaagtcgaccggttgcttccagcattcactgcacttaattaccgctggactaagggccacgctaccaatcagggcaatgtctttgtcgatcatttgttgaatcaaactatggatcaaatgcacgctggtcagccggctcaagcctcgactggtgctaaaattagtccacagccagctaaaactagtgtgccacagccgactatgtcgaacccaacaccaactaagtctaatcaatcggccactgtacgctcgacaccagctgaaaaaaagccagttgatcccgaacaagtcgcccgttcagtagcggcgatcaagaagatgctacgcgataactaatcaaaaactgtgaccccaacatactgattgctggaaccgaattccgcaagtcaactgtttggatcacagttttatttcattaaaatttatagccaaccaattttttttagtccattggcgatgccatcgtgatcacaatcggtcgtcgtaatgtctgctaatgctttaatctcagctttcgcgttacccatagcgaccccaataccggcgctctgaatcatctctcggtcattatcattatcaccaaaggccgcaacgttactcgaatcgacattaagtgccgctgccagttttgcaattccttgcgccttagatcccactttgggaatgatatcaaccccgcgttcatgaaaacgaacaaaggaaaactcatctggatgcggcaacaatcgattttggacatccgggtaaaacatcatggcctgatacacatcatggtgctgatagtaatcaggggcataatccaactcaggtgcccgaaacgtgttcaacacctggcgcgtcgtggtggacggatgtgtgtggatatgtagcccatccagtgattcgaccacaatatcaatattctgtttatccgccgccgcaaccaatttgccaacattgtctttagataaggtgtgttgatgaatttgttggcgaccagcaaacgctgctgaaccattgcacagtacataatcttgtaattgtaaggcattaataactggccgggccatcgctaaattgcgacccgtggcgatggctacatgaatcccgtcatctctaagtgcttgaatactttcaatggtgctcggtaataattgcttattgcgagccaatagtgtgtcatcaatgtcaaaaactgctaatcttgctaccatattaattgctcctccaagttatcgcgggataaattctgatttaatcaattcatgggtacgggtcttgccgattgccaatcgaaatgctgactgacccaatgattctagatgatggtcgatcgtcgaaaactttaatagtcgactcgtcagcaagttctcctgcccaatcactggaatgggggctaacccgtgatccataaaatattgataggcgcccgccccaatatcatcgccatttgcaaaaatcgcggccacgcgagacgcttgattggcaaaatacttaccagcgtggtaaccgtcttcataagtggcagcaccggtatagagtcgctcgtcatccaactgaccatatacttcgtggtaggctcgccgcgtaacccgtgtactagcactaatgacgttattacggctcaaaataacgcccatcgtcgcataaccttgttgcttcgcccaccgtaatgccgtaacatatgaagccatgcggtccgtataagctgcggccaatgcccggtcatcacctggatcttcacaacagacgatttgaccatacttgcggtaacgttccagtgtatccagtgaactactacgtgacgtaaaaatcagcgcatcataggctttacttcttaagtcttctaaataatggcgttcaatcgtcatatcataattagtcggcagcaacatgattttataacccgccgcaaagcctgcactgacgataccatcaactacccgtgcgaaatacgggtgattcgcatacggtagtaccacgccaattgtcttcgtccgcccccgacttaaatcacgagcgacccggttaggtacgtaatccagttcttgcataatagcctcaactttggcccgtttatcatccgcaacgtacttctgatggttaattacccgcgagactgtcgagacggaataacccgatagtcgcgcaatatcatgtatattcgtcatcacagaacttcctctctcaattgatgataccacgttgtttcatataattaccataatttatgaaaccggtaccaggtcaagctgattttactcagttttatgataatcgtcgcttttttccaatattaaccgtatgatactaactatggaggtcgatgacatgtcaatattaattgccttgcaacaacagtcagactttactagtactgaacagcggatcagtagctatattctggcacatctagatcaaatgccaactattctgatcaaagacctagccgctaagacgtacacatcccattcagcaatcattaggttggcccaaaaattgaactaccggggctttcgcgatttccaacggaaattgactgccgaaagcattgcccaggcacatcaagccgccactgtggatgccaattttccgttctcggcgacagattcggtcgccacaatcagccaaaagatggccgccttgaatattcgggccattcagacagcccagcagcaacttgatacgaaccaattagcccaagctgctgacttattgacgcgatcaaaacgaatctttatcttctcgcaaggtgactcacaactacgggcccgtagttttcaaaataaactcgtcaaaatcaatcgttttgctataatcgccgaagaatatgctgacgaatcctggaacgcagccaacttaacagctgatgattgtgctctgattatttcatatgctggtactactaaaatccatcagcaagttgccacctattttcacgctcatcaaattcccatgattgtcctaacaggtaatccacaatcaccactcatcagtcaagcgacccagcacttgctcaccgttcagagtgaatataattttgccaaaatcggtacttttgcatcccaagcggcgtttgaatacgtcttagacagtcttttcgcagtcatgtatgcacatgattttcatcaccatttacaagacctgcgacaaaaacagcacctaatccaggacggcccgctcaccacaaaataacacatctaacggctcaaaagcgcgtcctacagtttctaggacacgctttttacaatctcttctatttattgtgcagccacattagcaacgacgcattagcccaattgcaatcccgcgctcgctaacgcttggtcaacaacttccatgaccgcttgggaatgatctaattgccgcttaacggttaccatatcgtgattagcaataagacgttcaaacgccacaaactcagcatacatccgatgctcagcttgattaagcgctaaatcagttgtcgttccatcatgtgcaatttcagtgatactttcgaccgtattagtaggaccgttgacaatgatcgaaccagtcgtcccctgaatcgtggaacgtaccggtgaagtcgaatccttggcaccgatacaaacgactttaacattcggataggtcaacactaagatgcctgatgtatcaatatttcgttcaacattagctaaatactgcacgtgcgttggtgcgcctaacaagccaaccacaaaatgaatattataaatattcaagtccatcagggcgcccccaccaagcttaggattaaaagctggtaagatcgttccggctttaaactgatcataacgtgatgaatactgcgaatagttgcattcgataattttcaagtcgcccaacttggtcaaatcacgtttgattgcctgatagttttccaaatactgattcgtaattgcttcgattaacactaagtcttggcgacctgccaattcgattagttccgttaactgagatgccactaacgtaaacggcttctcacaaatgacgttcttccccgcttcgcatagtcataatgtaacgaattcggcaaagcgacgtacactgtatcaattgtcgtatcggctagcaaagctgcataatctgtgtagaccgttccaatacgatacgtggcttgcagctcgcgtgctcgcgccacactccgcggcgttgacagcaatcccaccaattcaatcgcgggaatgctcttcaccattggcaagaagtcctgaacaatcttgcctgttcctaaaattcctaatcgcatcataatcctcctcataatttatattaacgaattaataccggccaaatgaaatcagctaaggcccactgaaaaaagctcaagtttgcgtaaacatgcttagccagcgtcggcttgcgccgaccgccaacaattggcaccaacctcctaggacgcacaccggtagccgaacaacaatctaaagctgacacgtaccaatagctgggctagtgcaacactcaagaagcgctaatgtcggcattgttgaataccagtttctaacattttcacttgcaacaacgtttcctcatctttgactaacttaggttgtccattgatgatgctgtcgtaaacgccggcgtaaacccgactgtagtcaccaacttccgaaacgactgcctcttcgtgatactgacccgcatcgtcgatataagttaacgtgccatagttttcaggttgatcaatgccaaagtcagcgtgattcggcatgtaaaaatgtttcagatcgtattcctgacgatccttagtcgcctttacgaacatgccctttttgccataaaccacgaagctcggccgtgatttaatgcggaaatagctagattttacagagactttcaaggcaccgtaatacagatcgatatcaaaataatcattcatccggtcacttcccaatagttgccgaacatcatagtgcacgtcatccggctccccgaagtatgcaatcacttggtctaaagtatggcaagcatgaccatataaataactcgtatctaatgaaaaatggtcaacattggttggaacctctggccggaaataatcaaagtgcatttcgacttccagcaagtcaccgaggacgccgctttcaatgaccttttgtgtcgtcaaatagtccgaatcaaagcgccgattctggtaacactgaataaacaaatgcttttgcttagccaattcaaaaagttcgcgggcttccgctgatgtttccgtaaatggtttttccaccaagacattcttaccatggttcaagacatccttagctaccgaatagtgcgtatgactaggtgttgaaacaactacgagctgaatatcagggtcctcataaatatctgctaacgtagtcgtgtaatgcacgcccgcaattggttgccaattctggtgtcctgaacgtgaatagatggtcttcaccttaatttgatctttgagtttcagtgcaaatggtaagtgatagcggttagcactcttaccgttgccgatataagcaattgttaacatcgcgatgtcctccagttaagttgataatttcattatactgacttagaacgtcacgccaagctaatgacatactttaggtcaaaacgttcaataattaacttctaatcggtctttttttaaacattaggtccagccccaaattaatcattgcagataatacttttattcatatgattgcgttaaaattaaactactttacaaaatctaggaggaaatttggtttgcaaaccgttttcttagtcttattactcgttgcggctgtcgtcgttgctaacgccgtctacgcacgtttcaatcaaattccagtcgcctttttacaaattggggctgggttaatcttgtctctgattccgttgtatcgaaattttgaattggaacctgaaatttttctattcgtcattatttcgattttaatgtttaatgatggccaaaacaccaacattcgcaagctcagtcaccagtttggcacgaccctttcgctttcggtagtgttagccatcgtgaccatcctaattgttggtacggtcactcacttactgattcctgagttttcgctggcacttgcttttgcccttggcgctattattacgccaaccgatgccgtcgcggtctcatcgattacgactaaagttgcgattccaagagcagtcatgacgacgcttgaaaatgaatcactgttcaatgacgcctccggaatcgtggcctttaacttagcgattgctgcgatcgtcactggtaagttttcagtctggcacggaatcactaactttttatatgtctttgccggtggaatcttcgtcggcctaatcatcggttatgtcattgttgctgtcaggattatgctgattcgcatgcgggtcgatacaccttctgtgatcgtcccctacacattactgacaccgtttgtcgtctatttcttagctgaatcgttaggcgtttccggtatcttggctgttgttgccaccggtctcattcatggtgtccagtccgatcaattacggttgaccacttcccggctacaaatcgtgatgacaacgacttggtcaatcgtggctagtattttgaacggtatcgtctttgtgttattaggtgtgtcgttgccaagtgtcatcaaccacttacagcaacgtgatactagttcggtcgcggtattagtcggtctgggaatcttgctctacctaatcatgacgttcgcccgttttctctggacgcgcttcgacttagcccgtattcgcgcgtgggataatcatgaaaagacccgtaatgcattcgtgatgggtctgagcggcgttcacggcacgattacgctggcgatggctttttcattaccactaacactcaacggcagtacttttccttatcgcaacgatattattttcgttgccgcagtggtcattctaactagtctgctggtgccaacacttttgttaccgttgacgttgccaaaacaagttgttaaggtcactgaagatgaattggcaaccgccaaagctgacatggtaactcacgctattgatctcatgcaagcacgccatggtaataatgctggcactagtaaagtgattgcgattctgtccggccaacgagtactagatggtcgtcctaagcgctcgcaactggcgagcttgttcgacgccactttcaaagttgaacaaaccactattgatgaaatggttgccaacaatgaaatcacgccccatgccgccgaaaagtacatgcgcgtcgctagtcagacgcgtctgcagaatcaacaaactttcttcgaacgcttgaaattatttttccggtttacactcagcaaatggtcgctcagcaaaaaagctcgtgcccgacgtaaaatgttccgacaataccggccccgtggtggtcagagtcgaactgagctcatgactcgtaatcggcaaatgtggcaacaaatgcgacagatcgaacaaaagccgtatgaggccgtgttagcttatttagccgacacgattactgctgacaatcagcaagctatcgggatcgttcgccgcgcctatgatgaacgtcatcgccgcctatctggtgaacgggatttccaggaaactcaaaatgagcttctaattgaagcattccagttggaatataacttcattcagacccaattagccaataaaacattcagctcagaacttggtaaccaactctatgaacaaatttcaactgatcagttagtttacttgcaatcgatcaataccgactaaattcgtttagtaatgtcaataacgtgaccaactgtccacaccactatttgggcatcgggtccgttacactaacgttgtaccattggtcgaactgccaactgaacgtctcaacaagccccccaatcttgtgaccatggtaacctaatgacgcctgacaacttgtcggcgtcattttttatgatatttttgaaacaaaacacttgtcttagagtggctctaaggtgctaatctataaaagtattcatgaatgagaaagtgagcgatagataatggaaacaccgattttagcacgcattgatcagccggccgatctgaaacaattatccttgccggaattaacacaactcgcaagcgagttacgtcacgtcctactcaataaagttagtcaaactggtggtcacgttggccctaacttgggcgtagtcgaattaaccattgcctttcacaccatttttaattcaccagttgataaggttgtatgggatgtttcacaccaatcctacacacacaagattctaacgggccgaaagcaagcttggcttgaccccgctcattataatgatgtcagcggctacactgccccagaagaaagcccccacgactatttcaatattggtcatacttcaacctcgattgccttggcaactggcatggctgttgctcgtgaccttgagggcaaaacaggcaatgtcatggcagtgattggtgacggctcattatccggtggtttagcattggaaggtctaaacatcgcggccaccttaaagtctaacctcattattctggttaacgataatggcatggcaattgcagaagaccatggtggcatttaccaaaatctccgtgaactccgcgaaactaacggcacaagttcccataacttgttcaaagattttggcctcgattatcgctacgttgatgatggtaacgaccttgagaccatgctaacgacttttaaggaaattaaggatgttgaccacccaatcgtgttgcacgtccataccgaaaagggtcacggctatcaacccgcgatcactaataaagaagctttccactggcacgtgccgtttgacctagcgaccggtcagacgttgcatcccaacaccaaggaaacgtatacggatgtcattcatgccacgttagccgatgagttagcagccaagacgcctatcacggcaattacggcggctgttccaggaacttatgacctcaaacgctttgctcgccaatatccagaccggtactttgacgtcggcattgccgaacaagaatcgattacatttgctgccggacaggcccaacaaggcttacggccaatcgtcttccattctggtaccttcttgcaacgggcctatgatcaactatctcatgatcttggcatcaataaattgcccgttacgatcatggttgccggtggccgcattaacgcaggcgatccaactcatcaaggtacctttgacgttgccatgctcagtaatattcctaacttaacttacttagcgccaacgaccaaggaagaacttcaagccatgatgcactgggctctccatcaaaataacggtccggttgccatccgggtaccaagtaatgacgtccagtcagtacctctagcgcctgattttgacgcaactaagatgcacacattacacgctggtcagcaagttgctttactcggtgtaggcagtctcctgcctttagcaacagccgtgcaacaacaattagctgagcaacacattgacgcgacgctcattgatccccgggacatttctgcccccgatacgacgactttggccaacttaaaggccgaccatcagttagttgtcacggttgaggaagccagtctcagcggtggttttggtgaaaaagttagtcgctactatggcaacagcgctatgcgcgttctgaactttggtgctgccaaacgctttaatgaccgtgaaacaactaatgaactgcggcatgaatttaagctgacccctgaccaaattgtcacggcaattactgatcaactagcagaataatcatcaggccagcgactcaactttcgtttacccaccaaaagtctagccagtatgttgtcgaactcaacacgctggctagactttttatatttaactgacaataacccaatctcagtttaacgattgggaaaacaggacggcggctactgtgccaatttggggcaaaaatcagcaattagcaaacagaacaccggctaataagtcgccattcgcaattatttatattaacgcccgatacctggcgccttggtcggccacaaaatattattaatattttattgttcagaaaagactttcagcaagctgctgtccttatagctccaaatctcattaatataattatttagtcaatccaacgctagttaaacaattgacagtcccatcagagttgtttacagtaaaaccaatctcaaacctaatattggaggcctttattatggcaagtcaccaagccttactgattattgattatacgaatgattttgtggctgacggcggggcactcacttgtgggcaacccggccaagcgctcgcaccaacgatcgtcaaactcgccaaccaaatggctacggcaagcgactgggtcttactgccaaccgatgtccataccccgcatgatccttaccatcccgaaagcaagttgtttccacctcataatgttcggggtacctggggtcgtgaactctatgggccactcaaagattggtacgctgatcatcaagccgccgataatgtttgggcattcgacaagacgcgttacagttcatttgcgggtactgacttggatttacgtctgcgagaacgccatgttgacaccctgcacttagtcggtgtttgtaccgacatttgtgtccttcacacggctgttgacgcctataatttgggttaccaactcgtcattcatcaggatgccgttgctagttttgacgccgctggtcacgaatgggcgttgcgtcacttcaaaaacagcttaggtgcaaccatcgtttaaaaaatgcgcaataaaaatcactcattcaatacgaatgagtgattttttaggattactaaattaattcaaggttggctcaacccatttttgcaacatcaaggtatttaacacaccttcaactaagataactgccaacatgacgagactaccgacccataaagaatcgatttgtccctggttgactagctgactggagagaaagctgaccatgctaatcaacaaattagctaagcggaaagctacgtaaatgaccaccaccgtgataatcacattgacgaaccgttgccgaaatcgtggtaaaaagcccttggtcgcattcgtaacaaaatggcaaagcgttatcgtgctccaaatcagaatcgtcacaagaactaagactagcaacgttccgagtgcgaactgcacggcactacccgcatcaaactggctaaagaacagcgacgctgatgttaagcctcccatcagttcattccaaccaatccacagagttaagcagaataaaatcacttggaccaaccaaacataaacaatatcaaccaacgaaacgactaaattaatcgtatagcgtcgccaatcgctaattggcaataaccagaacgtccccgcccggaagaatttttcatttgaaactgccaataagataaacccaacgattaaaggtaacgccatccaagcacataaattatagaataatgtggcagctgtgaagtttcctttgatggcagtccacaaactagtgacaatcaccgccaaagcttcgataccaatcaataaactcatttgcttaaagcgtggccaactgagggccttaaatagtgaccaactacttgtcatccgtcacacctcccatatataagctctcataataatcttcaagttccatgccatgttcgtcgcgaatctcatctgcaccctgatgaacaacaattgtttggtccttaacgaccacgatttcatcaagaatcggcgcgatttcagtgacataatgatcactaatcaataatgtcgcttcggcaggcgtccacttgataatactgttaataatttttttgcggctcatactgtcgatcccactaaacggttcatctaataagtacaaagccactttgcgactcagggtcagcgcaatgattaatttctcgcgggtccccttagacaactcacccaatttttgttgttggttgagttccagaaagtcaaccagctcttgatagcgtttggcgtcaaaatcaggataaacaagttgataaaattgcgcgatttgttgtaatttcataccggcactaaaaccagtcaaatgatccgtgaaacttacctgctgcttacgggctacggcagttgtcgcgccattgatcacaatactgccctgacccttggcactacccgtaattagtcgcatcaaggtcgttttccccgccccattttcacctaataaaccgacaatcttgctgggcgccagggttaattgaacattttgtaaaatcattcgttgattatgtttataacgtaaatccttaatcgtcaatgctgtcatgattgtgctcctctcgttgggcaatgtattgttgcagactcgccacgatttcggcgtcacttaaatttagtgcgtgcaattggtcgtacgctaatgctaattgctcgttcaccagtgtagtcctcaattgcataatatgcgcctgatcttccgttacgaaattccccttacctcgttgggacgtcagagtgccttccgtaatcatctcactgagtgcccgctgaactgtattaacattaaccgtcaagtccaacgcaagctgccggactgcgggcaactttgcccctggtggtaacgttccgtcaatcattttatgataaatatactgtttgatttgataataaatcggaaccttgtcatcaaatttcaatttaacggcctccttagtgttctatttttctattacaatataacacagctgataccaaaagtacaataatgatctaccgttacttgtgatagcggttacatttgtaacttgaatctcaatttaggagcgctatacttaaattaggacgtggactaagttcgccacatcacaggagagggatggtagcatgttaaaaaacgaaaacgccattgcgctaattcgcgccatcgatgtcgcttatagtgaccccgaagtacgcgcaattcccgaattacaacaagccttagctaaggccgcacaagacttagactgtgttgcggaccaccatcaagtcgctagccgcctaaaccagttgctaactacttggggggctcgtcattcacaaggccccgccgtgcttgaccagttatacctgatcacactcaaagatggcgtcgatgtaccttgccaggtcccataccgggcataattatcttaatatcacaaaagctcccagatcgaatcgatttgggagcttttgtgatattaggatgctaactttcaaggacaaaagcagccagctatggaccactggaaaaagtgcgagttagcgtaaccttgcttagttagttcgtcctacgccgacttccaggcatttctgctaattgccggaacgtggcgggttgggcacgggctcaaatcgacgtcggcttacgttccagcaattgtcacccagccccagaggtcggaatcggacgattattgctgacgaacaggaatcaaacaaacggcctcttaatatcacgattcatgacaaatcagtgctaattcaagcaagctaacattactgcacgtattgttccaagaatgcagcgacgtgacgcttgtaacgttggtaattctgagtaatggccgtggtgtggccggctcccttcaccaaccataaagacttgggttggtgagcattgcggtacagcgtcttgcccatgctagtcgggacaaaatcatcccgggtgccgctgataatcatgataggcaagtggtttttacgaatctgagcgattgcatccgcctctttgaagctataaccagcacgtaatttagtaatgagactggttacgttgactaacggaaacgcgggtaaatgatagagttgccccgcttgataactaataatcgcatcagcactcgtaaacggactatcgacgacgtacgctttgatctgtggcaactgccgttcaccactggccatcgtcatcccggctgcacccatactgataccgctcatcacgatttgagttgtggccgttttatgtacgacggttttggcccactgcaagtcgtcgcggcgctccagccagccgtagccgaccgcttttccctggctcgcaccacttgctcgggaatcaggaaccagcacgttgtagccgagttcatgatacatccccgcccacgcacccatcaaacccttattcccagcaaatccgtgtgccaaaacaacagtcctcttagaatttttaactggaatataccaagcaaccaaccgtaaatgatccgatgactcaatagtccaagtttgcttacgcgcatgtaaataccaatacttttggtgataaaccgaactttttttcgatagctttgtactctgcgtaacaaatgacttatcaccacgggcaattgccacgtggtaaaaataactgccagcaccaatcacagctcccgctaccagaacaacgagtacccccagtgtgttccaccatttcttcattaaaattcactccttgatgagacaaaaatctgttttgagcgggaaaatttcgccactacttcataataaccgttataattaaagataactagaccagattgaggaggcttctttttatgcactattccgaaacgtgggatttggacagtatctttgctggtggcattgattccccagcactaactgcaaaaatgtccacgattaaacagcagttgaccacgacagcagacaccttagttcactggcgtgctgccgctgacacaccagacgccgactggtttacccaactcgtcaacagtctgcaagccattcaagccggtattgaccaagctaccgttttcgtggttgcttatcaatccgcacatgcggacgacaccaaagccgccccactattgaaccaaatttatcaacttgataatcagttaaacaatttattaacccgcttcaagaagcagctcgttaagttagatcaagccacctttgacacgctcgtgcaacaaccgtcactacaagccatcgcctttaacttaaccgaaatgcgtcagcaaggcttagcgctcctagatgacgacactgaagccctaatcaatgacttagcactcgacggttttcagggttggagtgaccactacgacacgttagttagccaaattcaagtgccctataccgatgaaaacggaataacccagcccctatccgcgggtcaagctcaaaacatgttagcagccgccatgccgaacgctcaacgcgccgaattaatgcgcaactgggagcacgcttggcaaactcacgccgctccctttgctgatacgttgaaccacttggcgggcttccgacttgccaattatcgtgcgcatggtacgacgaacttcctacaaaaaccactagaactcaaccgcatgagtcaagcgacactagacacaatgtaccaagttgtcgctgacagcaaggacattttactaagttacctgaagcgtaaggcccagttactcggtaaagatcaactagattggcaagatattgaagccccactaaccttgggacaacttcctaaccaaacttacgatcaagctgccgattttgtcattaacaactttcgccaatttagtccaaagatgggcgctttagcccaacacgcccttgaacatcgttgggtcgaagctgagaaccgccctaataagcggcctggtggctatatggaaaatctaccagagacccacgaatcccgaattttcatgacgtttacgggttcacctaatgacacagccaccctcgcccacgaattagggcacgcctttcatggcagcgtcattcaagatctgccactttggcgtcaagattacgcgatgaacgtggccgaaaccgcctcaacattcgccgaactgattgtcgctgacgccagtgtcaaagcggccgatgatgccaaaaccaaattaactttattggatgctaaaatgcaaaatccgttagccatgtttctggatattcgagcccgcttcctgtttgagacgcgcttctatgccgcccgtcagcacgggatcgtcactcctgatactttgtcagacttgatgctaaccgcccaaaaagacgcctatggtaatgccttaaatacttaccacccgatgttttgggctagcaagttgcacttttacattgccgacgtcccgttttataactttccatacacatttggctaccttttcagtctcggtatctatgctcaagctaaaacacaatcggactttgaagaccgctacattgccctattgcgagacaccgccaacatgtcgaccgaagccctagctgccaaacacctcggtgttgatctgaccaaaccagccttctggcaagctggtgtagctttgatcaagcgggacatcgatgaattcatggcgttatccgcaccgttaatctaaggaatggaagtgagcacatgtttccagaacgtttaagagcactacgtcgggggcaaaaaatgaccctcgctcaactcgcggcggccctcaatcaaatgccgaccgcagacaagacgactcgtcaaaataccgcggctcaaatcggtaactgggagcgggacttacggaccccgtcctacctagaagttcgtaaattagccgaatttttcaacgtcacgaccgattacttgtcaggtaaatcagaccaagaagagtatgacctcggtcgcatctttttatcgggcaagccgttgacgtttaatcaagaacaattatccagtgaagaccgctatgaactgtttcagttgatggatggttacttacatggtcgccagcatcgagtttcaacggatgcgaccggccaagaagaattagacttacactttgatgactaggagttttttatgaatcccaagaagttaaaacaattaaaaaagcgggtcaaaaagcaagccggtgccccgtatattcaacagttaatgaagtaccgcgacttatttaaggatgatccccaaattctagtgctgatcaataatgtcttggaaagtgaccgcttgctggcagccggcttagctccccaacaattgccagtcttagaaatccctgatgattttcaggaccatctctttgagcgcatcaatcagcaatatgccatgggtgatcctgctggtgatgcggcttggaaccaactatcagccgctctcccaaaagttgaccaacttctacgcaactttcgagactatatcgaagatcagtatgggatgtgggcctacatcagtgcgccatttctgaaagacctagctgacttcaccggcagcgcaccagttctggaagtcatggccggtaacggctatatttccaagggcctcaaacgtctccatcctggtcagccaatttataccacggattcaaaggattggacacacgaaactggcaatcagacgggacgccacccagtcacgacgattgaagcgttggatgccgtcagtgccttcaataagtacgccgcaactattaaatacgtcattatggcctggtcaccggacaaattgactattgattgggacttgttacaagctatgcggcaaagtccttacgatatcccattgatcgtcattggcgaaaaatacggcgccacgggttccaaacaattttgggaccacgctaattatcaggataacgaggccgttaccaagttaaatgctcatttccgaccattcgacctgattcacgaccacgtctatgtgatccgataattgaacacgcgttaaattaaaagtcgtgctttcaggattaaattctgagagcacgacttttaatttttccgtcatagctgaatctcttttttgccaaattcattcgtgatttgcttaaatcttagcatcacattttcaattgttgcagttgttccaatcccgccaccaacgatgttcgtgaaattcccccggcagcgagactttggtcgtcaaattgattaagcgtcgcataaaaccaaattccgagctgcaagaattcagcttccgtcattgcaaactgcaacgctaacaaccgctgagcggcttgagcataagcctttctgtcaatgagttgtgccaattcgacttgatgtggcaacggctgattttgattttgcggaaacaccacctcagttgtgcctcccttatgacgactaagcgtgtaccctaaccccgttgcgaacgcatgtaactgccgcattaaccaatcactttcatcttgcattagcattaatccccctaattgtgtgccatccaataaatcgctaaaattgtcaaaatgactgataacgtacacatataccagtaaaattgtttttccggtactgttcgaccatgatttccctgataggcatccgccatactagtgataaacgtcgccaaaattgtatataagatcaataacgtaaacgcgtaggccgtccaagccgtccccatcggttggtgcattgcttgcaagccccagccaatcaaccatcccaccaataaaagacccgtaggcgctgcaattaaccgtcgcttcatcctcatcactccccctagaattagcttcattatccgcttttaaaactcccagaccaagcagaatgacgcctaaaattatatccgcataataccaagccttttctgcacgaaatattgttaaaaggttccggtttaagatcaaaagtaaccagttaggcccgctggaaaaagttcgaatcagcgtaaacatgcttggttaaacgcgtcctacgccgacttccaggcatttccgtcaattgctggaacgcggtggacacagatttaagccgcaacccacgtcttaaatactggtcttccactaaccaagcaaaggacgcttgctaagtgaaatttcaccgctgagcattgaccgaaacgccttccagtcggcataggacgcgcaccggctgacgaacaggaatcgagttaaccggaaccttttaacaatcattcctgacctatcctagaacgaaaaagcctgcaatcaattgattgcaggctcgttcacactgactattcgacgttgaactccttgaaataactggttagtggtttcaattcgttcgcgtcatatttttctttgaaggcactgacagaagcatccgatgtcttggttggatcaacatcaaggatttcaactggtaacccccgtttgtccgtaatcttggcatcaattaggaccggacgaccagcctttaattcggtcatcgcagtttcgaaggctgcgtgcagttgatcaaaatgttcaacacggatacctttgacgcccattccttcagctatcttagcaaaatcagcatcaatcaagtcgataccataatatggttgcggcacatcttcttgttctgatttaataaagttcaacgtttggttagacgtgacaatattaaagattggcaagtgatacttaacttcggtcaataagtcttgcatgaccattgagaaggccccgtcgccagcaatgttgaaggcttgccgatcaggataactcatcttcgccgcaatcgcaccgggaacaccggcacccatcgtggcaaatagtgctgaagtcaataatttttgcttgggattcatctttaggaaacggaaactattaatcgtattgtcgccaacatccattgagaaaactgcatcatcggcagcgacccggttgatttcttggtagacttgttcgtattcaagtggatcggtcgtccgttcactcagcttcttcaaatactgtttccagtcagccatatctgctttagccgcttggtagtatggcgacggtgacgctggttcacttaatgccaaggcccgtttgatgaagactttagcatcgccattaaccccgaaatccaaatgatggtgccgaccaaacttgccaggatccagttcaatttgcacatatttgaagtcgtgagtcgtgtacataatctgtgcgaacgaataatctgcgccaactgaaacgaccaaatcggtaatccccatcagttcatccgccgctttcgaggctgcccgataagcgcttcccatattaccatcaaaactatcaggaatgacgcccttggctaacccagtgataataatcggtacttgcagacgctccgctaacgccatcatgtcctcggttgcaccacgcgtcccttgaccaacgtggaagacggggtacttggcgttcttgatcatcgttaataccgtcttaacttgttcatcatcaatagtaggaatgccggtcagtttagcagggacacttgctgaatcgtaattaagatcaggaatttcaacatatccaaaatcattaggaattgtcaccaccgcaaccccattttcacgataagccgtccgaatggccttatcgacgacgtatggtaagctttctggtgtcatgacggttcgattaaagaccgccacatcactaaaaatcggttcttcagcgaattcttggaaataatcatagttcatattagtgtgagcaacttgacccaccaaggcaagtacgggcacgtgatcttccttagcatcatacaacccgttgagtaaattaacggcaccaggaccggccgatccaaaggcgaccccgattttacccgtcaactttgcatccgctgccgcagcgagggcccccacttgttcgtgacgtacctgcacatattggagccgttcttgctcaacatccaacgcgtgcatggttgagttaaacgatccaccagcatagccgtaaatctgtttaacatcccaagcttcaataacttttaacattgcaacagacgcttcaatcatctttgccatagtaaatgccttctttttaaaattattgtatacgttttcatttacggttatcagaatacatctaaattgttcaaaattcaattgtaaacaatcattattttataaatattttcttaactaaccaaattcgatgacctgacactggtccgaaatcgtgttagcctgccgttgttctggaaaatatcgaacgcttatccatcggcttaatctaaccaatcagcaaggtgaaataatgatgaaagataaagcaattaatattctgactgccgaactgtcagcactccccgttttaataatgacgtactatgcgcttaccgcgaaaccgaccggacagtggcagctgacctttagtctccccgtttattggctgatcagttccgacctgctagcctatccctggctcctcatccggattccccgcttgcgccacaaccctctcaaaatgaattcactggctctaaaggcaagctcaagatacaactgccggctcaacgaacgggtcgcgcgctgggatgatgagatgaatctcgcgattttcttactggaacgcggttgtctaatgttactgtcagaaccactacttttaggcgatttaggctatcatagtgtccgacggttatggtattgatggcaataaaaagcacccatgctgttcagttttatgaacagtgtgggtgctgtgtgcattatttaagaatgttggtctccaagaaggcgacagcagcttcttgaatcttgtgaggtacgtggtgaacgccaccttcagcgcgtttaaagacagttgccttcagggctggctcatctttaaaacggtgcttaaaatcacgcatatactgataaggtaccatttgatcggccgtaccgttgaaaaagaacattggtcgtcccgccagtgcttctgggtgttcagataagtcaaactttgccaattgttgataagtttgttcaattagttctgctgggagcttagcttgtaatgccgctggtaattgtgcaacttgatcggttgcaaaggccaccggttctggtgaaccaattaacgagacaccagcaactaccgtgggctgcgttgccataatgccggcagcggtaataccgcccatcgaagttcccatgacaccgattttattagcatcactaattccagcagccactaaggccgcgactaattgtggaaattccgcaactgaatgtccaacaatcgaccaaaaatgttcaggatgccgatcgagatcagtcccatcatttcgactgccatgtaaatacgctgtcgggagaatgactcgaaaacccgcgcgtactaactgataagccgtacccagttcagtcgctgtctgatttgtccaaccatgataatcgatgatcgttggtaatttagtttgtgcttgactagctgcaaacacgtgtaatacgggcaaatcaccaaatttggtcgtccgcaccaccacatcttcaaataaatttgttgtcatgtttatcaccgtttccaaaattaatagttaatagtgtagcagaagcccaaacgaaaaccaacccaaacgcgtccatcgtggttaaagcttaaccatcatggacgcactcgagttggctcgttttaacacggttagttatcagctaacgtcatgcctttcaaaactacttttcaagtgtatctaagaaatcttcaacttgcttttgggtcttacggaatttgtcaacatatcgaccaatttcttgaccatcttcgatcccaacgaaactaggaatccccatcacacccatgtcttgggcaatttcaatgttggcgtcacgatcaaccgtgatccagtcatattgatcgtacttcgcttcgatttggggcattactggtttaataaaagcgcaatccgggcaccagtccgccgtaaagaataacatgtgtttacccgtcttgatacgttcgcgaatttcttcgtcgcttaaagttgcagttgccatgaaaaatgcctccaatatctttataataattatagtttaccacatactaaaagtaagtaaagtcttttgctttattttgttgctcggatcagcgcttgcttgagatccgctgctaaatcggcactattttcgatcccaacggatagccgcaataagttagcggtgatcccctttgattgtcgttgctcttccgttaaatctgcgtgtgtctgaactgccggaactgttaacaggctctcgacaccgccaagactttccgcaaacgagattacgttcaatgctcgtaaaaaggtatcgacgtcggtacccgtagcgagataaaaactaatcattccaccacgtcctggatataagacacgttcaacgtgttcatctgcctcaaggaccgtaacgagttcctgcgcattagcctcctgctgatgcaaacgtaatggcaaagtcttcaagctccgtaagagcagccaagcgtcgaacgggtcaaggaccgcaccagtcgtcaccagattaaattcaagcgcatcagcatccgcctgcgacttgactaccactgcaccggctaaaacatcattatgaccggctaaatacttagttgcggaatgaacgacgatgtctgcgcctagatccagtggcttttgaatcaacggtgtatagaaagtattatcaacgattaacttgaggtcatgggcgtgtgcggtagccgctgtggccgtaatatctatgaccttcatggttggattcgatggcgtttccaaccacagggcaacggtttgatcgtctgccagtgctgccaatgtcgcttgatcctgcccatcccagacagcaaaatccaaatgataatggtcgtgtaagaggtcaaagaagcggtacgaacccccgtataagtcatcagacacaataattttgtcaccactattgaaaagcgtgaaaacgagctggattgccgccatgccagaagtcagcgcatacgcagcgatgccgtgttccatctctgccagcactcgttccaaaatacagcgggtcggttgggcctcgcgcgggtagtcaaatcccgtagattgtcctaaaccagcatgtcgatatgctgtcgacaagtagatgggcgccgaaattgccccggtcttctcatcatcactccgattaccagcttgtgctaaccgcgtttcaatgtgtaatttctcagcttgttttgtcataatctcaatcccatccaatctagttatggtcgggcagtctacagagaggccagtgtaaaaatgactacaaaaaaagccgccatcttcaagggacgccggtcgcgtgttaccacccaagttcaattacgggtcaccccgttaaactcatcaagtcattattgactcactggagtatcggccagtcccgccagtacagccttgcgaccgcaactgggcattccgagttcatcttcatcaggcgctaccttaccgctttacactccccacggctccctgtcaaaggtataacctgactactcttctcatcaacatgttatttaatgatattttcatcttactctcataataataggagcgcaagccccaatcttatttcagcacaataaaaaatggtgccagcattatcctgaccaccatttttacagaaacgcattcgacactgcctagctatcccaataatttcaagacaatcacaaaatatcctaaaatcaaaatactcaaccccagcgtcttcaagagggctaaccactggccccctgcagttcgacctttagggcccagacaaatcgcaacgccgccacaaatcacggccaaggttcctagctcacggccccagtttgcattcaataagtaaatgaacggtcccactaagccgctgacaatcgcgacgatccccagtattttcagaatcaagcggcccagtcgcttatcctgttcgtcataaatttcatgtttctcttttgccatcaaaccagccaccaatctttatgaactactttcagtatgccgtatttggtcacaatgagcaagaaggcggttacaatatcctggtcaaattactgaggcatcactaggctagcttgtcataccttaccttgggccctgccggcacttacccgtgataacagctgaatcaagctaccaaattgaccatgatgatactaaaaattaggtgttcaaaattgacacccgctgaacacccaattggcaataactatttttcaattgtaacctgctaaacgacgccattatggctgtgttgcaacaacttgccatacgttccccttagccaactgctgttgttccaattgaccttgggcgttaatccgaaaacgacccgctaagtgtgcgacatcggcgttggtattttcataaacttccacgtaaactaaaccaccgctttgatactgattaaacacaaagttttgcttattggcggttgtttgttgatagtccttagccacttgttgccaagcccaatcattaatctgactagctgttaactgctgtggattggtcgtttgctggccgctagttgatgatgaggtcgcggatgcagactgcccggtagttgtttgactagttgcagtggtatttgaatgtccctgcgagctagctgcagtagctgtcttactaccctgactagtcgttgcactagcttcggattgtgactcattagctgaagttgtggaaactgacgatgctttagttgacgacgatttagcagctgtcgattgcttcgtcgactttgctgaagatgacgcgtcttttttagccttagtctttgacacaactgattgtgtttcactaacccgcgactgactagactgatggtcggcttctaagtaataaccgcctcccagcgcaatgatcccagcaatcacggctgaactaactaacatttttttcaagataatcaactccccaaagattaattgtctgatgctaactacagcatacgctatgttgtctcactttaccaacgtttacctgttctggatcgaaatttaactttaaattatatttggctcagttggtccatttttgggcacctaagattcattgtgccatccttttcttgactacgtatctcctcaacaacaaccgtggcatcagcagaaatgaattttgttaacttgaaagctgtttccacaaccttatttctttaaagttcattttgccatcatactgccccttataagtatatcgtaaatgacacccgactacggcccaaaacaggctaacaatgtaaccgtttcataatttgtcatcaaattgttacttatgtgaggcccccttcgcatgctatagtaatcaaccgatacaaaaaaactaggagtgtgtgaatagaatgccacgtaatttaaaagaagaagttgtctttaccgccattatggccggtttaatggtctttgtgatgaccgcctataacgttacccttgctcaaggtttcagcaacgggttagtaatggcaatccttagtggctacccactcggtttattcgttgccatcattttagacttattggtcgtgggaccaattgccaaacgattagctttcaaatatatcattaatgattacatgcgcaaacgggttgtcttgattgggattaccatctccgtcttgatggttcttggcatggtaacttgcatgtccctcttcgggattgcagtggaaggtgaattgtccggaagtcacgttttagcgacttacggtcacacttggatctttaacttgattgttgcattaccactccaactcatcatcgtcggcccaatcgcccgcggtgtgcttggaaaaatgcaacgggcaactgctaacaccgagtcagcagctgcaatgaacgaagaggactaatctttcagtccattgacggacggtcgccgggataatcttatcctgatggccgtccgttttattttacgactatccagtcgaccaccgcttttgccgaatagtccaccctatgaaagtcttatgcgtgatctgtacgcaaaaaaaacgcgtgtcagccatccgaaaatggttaacacgcgttcatcgcggcactggtaaaaccagcgggagtgacactccacaatgtcagtgacccagacactctgaaatacgtcagagaaacgtgccccgctatcaatattagtcactagccgctcgcgcggaaccgttattgctaacgatctgactctatcgactcatcgcatggactaccatatcatcttcattgataaaatgcaagtcgcaccgccacaaaattcgtggctcctactcaccacagttgggccgcagtacttaacttttcgcaaccaaaaaaattgagtatcccgttcgatttaatgaacgacacactcaattccattggtattttgattttggcttggctccaatatcaattcttaccttaccatagtcatgtaaagatttagtaattaactcgtaaagattacgtttaagcttccgccgccgtgatctggtctaagcgatcagtctgagccgtcagccaatcggttaataacttttcagcgttggcttgatcagcgagcacgtcggcaacgcttcccagctcatcaattcgcaatcctgacggtaacgcatcggattctgcaatcatgtaaacgttgattggcagcgtatcctctgccgccgtaacctttccaatttcggtcagattagccagtggcaaattaataacactcgtctccaaccgaaagctgatagctggctcatgcttagccgtcagcgtcacttgggcaagctggtcggcattgagtgccgctaccagcttcgccagccaaggcttaaccttggtcgctagtttggcataggtaccagtcaagctatcctgcgtaaccttgtcagccgtaacatcatcaataaaagcttgtacgtttcgttgcataaaacattatccctcattcattattcaatttcgttaatttgcacgtcgccagcgagtcagtaacaccaacgtataaaagttgattcccaatccaatcacacccataacttctaacgccagtttaatttccatgccagccgtactctgatagcccgacattaaggcgctgacaagtcctaagctatatatcagtacaactaaccctaggacgtaaaaacccagcatacgattaatatacactgctagaacgcctagaaaatataagactagggcaatcagcaacccctgccacatttccgctaccgaaatattttttgcctgcaggtgaaaatggctagtcgacatcatccaattgacgataccgtaacaaaaaaaggacacaaacgcaaatgcaactaagcgagtcagtttcaacaaatcactcctattattgggcaattaagtcaataacggctgaccgttcaattcccgtgaagtactgatttaaatcaatatctgccagcgctttagcgatggcctcatggtcgtaccgcacacctttaagggcggcttcaatatcttgaacgttgccactaccaaagaaatcaccataaaatttaatgttattgatcaagccgtcatcaaccgagatccgcgcatcaatggttcccatatcaaagtgttgacgccgcttaaccgagaattccggtgatttaccgtaaacccaatcccaattagcataatagtcttcgtaaattttatcaatagctttttgttgttcaggtgtcacgtgatattccttatccgcaatctgatccaacgaatcaacatggaacaactcttttaacagggcatcctgaaattctggcaccgtgatattctgatattctggcgctaaataaggccgtaaattcgtgacccgactccgaacggacttaatacctttggaagcaatcttgtcggtcgggactgttagcgcctgtgggacaacgtttaaatcaacattcaacatcaaagtgccatgggagaacgtcttgccattccgtgaatacatggcgttaccggagaatttcttaccatcaacgagcaaatcattgcgaccactgaccgtcgctgtcgtcgcccccatatcgtgaagcgcatcaatgattggcttggtaaatgtcttaaagtcgccaaactcttgactgtcactatccaccacaaagctgaagcagaggttaccaagatcttgatacacagccccaccaccagagagacgccgcgttacggtaatgtgatgttcccggacatagtcggcattaatttcttcaagggtgttctggttccgaccaacaatgatgcacggttcttcatagtagaacaaaactaatggttcatcgaaatccacgttattcattaaatattgttcggttgccaagttacggccaatctcatgatctttcattgcgacataatacatgttttaaaatctccttcagctttaggttactttaatcatacagcaagatgaaaaaaggacccacaatgtgaccccattttttggaagaatcatacaaaaagtttggcgtggcattcttcacaccacaagatgactgattcactatccacatccgtgaacgtttgattggcggcaatccgttctccgtggacataaccgtgccatcaatagatggaggttgggccagtcagttatccgaaattagcggaaacgctgctatactgcactagctatcacttgacgggtttgttacaacaattgggtaacagtttgatactgacctgtgactcttccgataaatccaatatagcatacaatgtaagcgattgcaaaccgagtaaaaaaacaacctagtcagccgaagccaactaggttgccgaaacattaatagcggtcgtaatcgctattccatttcaatatccttagtataaagccatttggacgccggaacaactaatatgcctagccttcaagcttagcaacatagtgcgttgcaccggagcgactcagatatcggagccacgtgtaaccctcagcttgaaccgtcccattgtaataaaccgtttcacctgggttatattcaccgacaacgcttgcgcgcgtacttggcgccgtacgaatattagtcgtcgttacgaagcggaacgccccttgactgtttgttaccggcttagacgtcgtatttccggtagcggcattaccactaatcgctacgtaatgttgggcgcccaaataagacaaataccgtaaccaagtctggccgttagccgttaccttagcgttgtagtagactgtatcaccagcactataggtaccgacacttggggcatttccggccggtgtattcttaatcgccgttgtttgcgtaaagcgataactaccactttgaggcgttacttgcggtttatcaacattggtcgacgtactctcaccactaatttgcacataatgctgggcacctgagtaagacatgtaacgtaaccaagtctgaccatttgtcgtcaccttaccattgtaatagaccgtatcgccagcattataagacccaaccgttgtcgcactagttgcaggtgaactcttgattgctgtcgttttcgtgaaacgatacgacccactggttgcaaccacgtccggtttagccacagcaccaacctcatcaccactcatagccacgtaatgctgagcgcctgaataggataaataccgtaaccaagttgtcccacccgtggtaatcttgccattatagtaaaccgtctcaccagcattataagtgccgaccacttgagccgttttgcttgcggctgatcgaatgttggtctttgcggtaaacttatacgacccactagctggcgtaactgtcgcctggttattattatcattagttgttgtttgactaatcatcacataccgtgatacgccagaataggactgatagcgtaaccaagttgcattaccgaccgttaacttaccattgtaattgactgtttcaccagcgttgtaagtacccactacggcactcgtggcgtccggcgcattgtgaattgtcgttgtcttagtaaacttatgtgtaccactggttggggtgacgtcttgatcaggctgaacttggttattatcatttccgccacttgcctgaccactgagcgcttcttgatcccactcgtgtagcttgttatattcaatgatgctgatcagcgaactcgcgtacgttggcgcggttgcgtagccgtcttgttgcaagagactggcaacgcgccgataatcggtaaccccaattaaattgctgtaacgcggattgacaaccaaaaaggcgccatgatcttcaacactagctgaccaattcgggtacttccgaaaagcgtcttgaatcgtaatgtattgtgagccattccattcctgggttgggaagtagattgattgcccttgataacttcccttgataccgaataagttgtttccctgagttgcaagttgtgattgtccccaaccactttccagaattgcctgtgcggccgtgactgatggcaagacttgatacttgttccaaccagagattgcccccgctttaatctgactcaggaagatttcctgactagtcattgcccgcgtggaccgtgccatcatcgctgatgactggaccgcatcagccgccacagccgtctcaatctttggtgagattttcgcggctaccgcctgctcagtcgcttgcttaggtgcggctgacgatgcggctgatttggctacttcactcgtcacagtcgcgctggattggtccgtagtgacatgactatcctgacttgcggccgcgctggctttagccgtctcattagtcgtactgtgactggcttggctcgtggctgcactagctttggccgttttatcaagttgatcaacagcactagttgtggagtccgccgtagcactagcagccgcgttatccttggcagcttcactggcggaggactggctttgcggtcctgtactgtcagctttagcggcttgactggctgcccgcactgtgacacgacttgttgcactggtagtagccgtcgtcgtgctggtcgattcagcttgatcgtcagtcttggcaccgtcactggcaactgattggtcagtcgcaccggccgctgtcgtttccgtctgactgccagcacttaaggtcacttgttggcttgcagctgaagcagcgctgtttcccttagtcgcagctgccagtttttgatttgcacttgccgtatcagctttaccactcaacatcggcagcaaagcggtacttagcaataatgaagttactactttttttgtcattccaattttcaattttaaaatccccaaactttccgtgagttagctgttaacacaaccgatttaattcccctgtagcacctgctattacagaataatattagcatgtcgaagagggacattcaaacgagatcgcttcgaattattttattaatatcaattgattgacaccgttatcattttaaattattaaccaattaccagttagttatcattattagtatcgttacttgcctaaatcccttgataatattaactttgttaaaattaacttcacttttaaacacttgaaactaattaaagatagctggttatccaatagacttcactcacaattgttaattttaaaaaaacactctgtaaccaaaaaagtcataattctttatcttcatcaaaatatttataatgtgcactttttctattcaaaataacatattccaaacaaaaaatccgatcaacagataacttgttaatcggacaatctgtatatttcgctaaataccttctaccccatcatcaacttgaatagcttgatgatgaaaaactttagtttgtacctggctgattttaactaatttttcagccaattttttagccggagctgaatatgttgtaagctcaaaacccacttcaagcaatgcaccaacattgcaaccacttgtaaccgcaatatctttttcactcacttgacttaacttaacagcttccttgaatggcgtaccacctagtaaatcgcacataaagacaacattattctcaccaattacagcacgttgaaatcgctcactaagctgaatatcatccatgttatcagtaaaatctatatactcgatattggcaatatcacctgctaacaaatgaattgttgattgtagtccacttgcataatttccgtgtccactaactattatcttcattctaaagaacccccatccatgagaaaaggattgccaacataaatgttcctaatattaagactacgggactcacatttttcttctttaatagccaatacaataagaaggtataccctaatggcaataaattagggaaaatccgatcaaaaaattgtgtttgaattgcaatcgtatgccctgctgaaactggaatctttgttttaaccgcaatttgtacataagtagcaattaatcccccaataacagtgcaccccagaatgctagcacaatgtgatacgattcctgaattttcgcgaatttttgaaatagcttttgtgccggcgttgtatcccaataatgcaattggcgcccgtgctacaaacattgctaaatagactaggaaaaaaactaatgggccaagaatactgccctgtttagcaaaagacgctgtaattccagcaacaattggtaagattgtgaaccatgtaatcgcgtccccgataccagccaatggaccaaacaatgcaattctcagtccgtcaattgtcgatcttttttcgccatgttcttcaagagatgcttctaaacccatcaacagcggtgcagcataattattagtgttaataaattgcaagtttgattcaagagcagcagctaggccctctttatcattaccataaatttttcttagtgatggcaacattgccaatgtccaaccatctgcctgcatccgttcatagttcattgcagactgattaaacagtgatcgccaaccaagcattcgtacatcatgcttcgttaatctacctcgttctgatattggtgaattagatgccatcgccatcatctccgtttccactggcactttcaatcattgatttaagttttttctcgttatcggtttgttttttattgtgataaaactcaataaaagcaagtgaaatcccaattaccgcaaccggcatcaaattaccaaacttaataaagcacgccgctgtaaaaccaagtaataaatatgggacgtattcagcttttaacatacttttaagcaacaatccaaatccaactgcgggtaagatattacctgcaatttcaaagccatgacttaaccagacgggcatagaattaaccaatgccttcattggttcttgagcaccataaacacacagaaaagcaatcacaccatatgttaatgcaacaagtactgtaggtaacagcgctaatcttgtgaattttttagtttcaacattcgccgcatatgcatctaattttttagtaaggactgaaaacgccgaataataaaacaaaatgatatattgcattaaaatactaaatgggagtgccaacccaatagccgttgaaggtgtttttccggtggtatacgccaatacgactgtcataattcctgccataattggattaggtggctgtgtcccaccaactggtgttaacccagcaaaagctaactctgttaaaccaccagcaataataccaagagtcagattacctaaaatagcaccagtcactgtacatacgatcattggtcgaaatatatacaagccctctagccaaaaatcaatacctgcaattaaagcaaatagtccaatcaggagaccctgaattaaggtgacttgcatctagatcacctcttccaaaggttgttttttatcttccggaacttcttgaacataaacattcacaccatgatccgcacaatattttaaatcagccttgtcctgatcatccatataagtatacttggttacttggacctttcccttcgaaaaatgcatatttccaagattcagattttttactggaacaccaccctctactaatcgacgagcatcttgagcattgcgaatcaccaaaaagatatgttgtcgcggacttgctttatgaatagtactgatagtcttgtcaattgtccaaaatcgaattccaactccagatgtttcagcagttgctgccatcagctcttgttgcaattgatcattggcagtttcatcattagcaaccaataataaattggctccaacagaggaagtccaaacaacaccaacttgtccatgaactagtcggttatcgattcttgtaagcacaatatttggttcactcatatttatccctctattcacagcggatagtaattaacctacgatatacataatcagatttcctaccacggctgcttttctatagtaaattatttctttctcttctattccacgtgtctgcatataaatcattggatcgccaacatttaagtcaaattctttccggttacttttagtaattaacgcaggttgagtatgtgaaaagaaactagcctttagtccatactttttaaccaaaaaaggcatcaaatcattattaacaatctcgctgttaaaaatacgtgggaagcgctcaaaaggtaaatagacttgttcatggaagacaggtcgatgatctgcataaaccatataacgtagataatacaaataaacatcggagtttatttccattacttttcgaacatcagactccgaaccatccacaatcaatttaaacgcttcaagtcttatttctggaacagcattcatattttcaattgctttgcggacatctaggtaatgaatacctaaatcaatgtcctctttgttttttacaaacgaaccttgtccttgttttttgtaaatataatctttattttccagctctgctagtgcgcgtctaacagtaatccgggaaacatcatacttttcaccaagtttctgctctgatggtaacttagcattttctaccaactcaccagactcaatctgacgaatcaaatcattaagcatgctctgataaagtggaacaatttttgaactagccattttgtttttatctccacgacttgtcatgttgttataacaacctacatcaatattaaaccaccctattctcgatatgtcaacgcttacattgacgatctttttcatgttttagagatttcagatgttttaatgctaacaacaaacaagtttcttttcttcgttatagttataaatacttacattttacgtaaagcaaacatatcaactttagtttaaaccttatcacggcccgttacgattgccaatttgcgtaaaataaaagtccagcactttaatagcctaaataaactactcactgttaatatttatgattaacaaaacatataatgttattgtgacatcgttttgagacgtcacaattgcaaaatataacaccataactatccactattgttagaacattcaaacaaccgtatctcaatatattagtcggtatttccttagtacatacttcataattacgtatttgtttgctaaaagttgagtaataacagctacatcaatcccaatctcttcactcgcagataatcatcactggtgctaatactcctcgaaaaatgctttccttgctattgttactcaattgctacctacttagacactccagctaaacgtacctaatcataaatcgattttaaatgcttacattgctgaaaattaatgctaaaatatagttattaactagccatatcaaacgggggtaaccattatgttacaacaatatcaaaatatcctggtaccagttgatggctccaaggctaccgacgaagttcttcggcggggcatcgaagtcgctaagcgtaacaagacccatctcgacattttaaacgtgttggaagtcaaccaatttagtgacacgtacggcggtgcggtcagtggtgatgtcatctacaagttgtcggaagacgttcaaaagcgcttggaagaactcaagcaacaaacaattgacgctggggtgaccgacgttgatgtccatgttcgttttggtaatcccaaaacggttatcgcgcgtgaatttcccgctgaccaccataatgaattaattatgattggttcaaccggcttatctgccgttgaacgtttgatggtcggttccgtaaccacctacgtcagtcgcaacgcaatttgtgacgttttgatcgttaagccgaccgctaaaaaagaagactaacaaaaaagtctggatacgttccagacttttttagtggtttccgtgcgttgcccgtcttcttccccgttataaaggagctttattcatgacctggacttatcaactcactatcccgtctagtttgaatcaacagtcgattcgggcttgccttcggacttggctgattccaaagcggattcagggccagttacgccaaacgcggcggattcagctgaacggtacaccaacgtcgattgcacaactcgtcaatactggtgattgcctgacgctgacgtttatccccagtgactttcggactccgacctcgaactatattgcggctgccacggccccagccacgattttatatcaaaacagcgatctgttagtcgttgataaacccgctggcgtgaaatcgcatcctaatcaaccaggtgaaaccggatcaattttaaatgacctagcagccacactccaaccaactcagcaggtgccatacatggttcaccggctcgaccagatgacttctggtgcgatgctagtcgcattgaacccggtcgtcgtcccgattttagaccgcttaatcagtgacaagcaaattcgccggacttattatgcctgggtacgtggtcactttgccacgccaactgggcatttcaccgcgccaatcggtcacgatgctaccgacaaacgcaaacgctgggtcaacacggccgatgcccagccagcactcaccgactacgaagtatgtgcaacaaccgcccatcagagtttagttaaactgaccctgcatactggccgtacccatcagctacgggtccacttggccgccagtgaccacccgattatcggtgatccactttacgactcgcaagcggagtcggcacctcggctgatgttacatgcccaattgttggatctacaacttccatttagcaccacacgggtgacggtaccggccccattgccaagtttatttaatagtccgcatttaattgagcgctactgactaagcaagttcaacttcattcagctggctaccgacgcttgccatcaaactgttatgaaagtatctatcttgaagggtccaaaaaggaagctcagtgagcttcctttttttgacacctgcatatttatcttagccacaaagagcttaattatgcctctaaactgttaatttgagcgataataaatcttatcacttggaatgttttggggatcattttgcgttcctaacgccgcaatacggtcccgactactatcaccattatttaggtcagcattatttccaccgggcataaataccacatcataaagtccgccagatgagcctgatattgaaaaactgccttgaagcatgctggcaccgtttgaggtttgataagttaattgttgatgatacttcaatccatcaaccgtcttagaatttccttgctgatcatctaatgatggcacatccattttgagtttagtaatcgtccccggagtagcgtcttgcgtcaggccaaaatctctaaatttcatccgctgattatgaatcttgatttgatttccttgtccattttgccaagtcccattcaaacttgaataatcaccagttttaatctggccgagcgccattgtcgacttgcagtttcccgtattggcggcggtcgtttgacgttcaaaaacttttacataagaattattacttgtgcgcgttatgattcgctcagtatccgtcttaatggtggcaggaacgttatcaccccagccactgattgcaactccctttggataaaaccagtacgtgacggcagctgcaccgatatcaccatcgatatgcagtgcgcctttttcctgtttgatggtagtagtaacagcctcttcatcaccattcgcatcttcaaatttcccgcttgctaaggccatttcaccgtcactgattttcgtgtcttttacggttaatttagcgccagcctcgggagattgccaaacatcgcccttagtatcatgcttattgacactactagcaacttccttccagtcacctaacaaactcccataggagccctgactgatctcattaagattcatagtcgtagcccctcgttgttgagacgttatttttgtcgactgagaacttgcgttgactgacgtactcgttgccttagttgcatcatttgttttgtgcgccttatcagtaatcactttgggcttcactttgaccacactaacgccatgcttcttatccgcatgtgacgcttgcgaggcctgctgtgagctaccacaaccgctaataaataacagtaacagcagactgatacagacagtttcactttttttcaaaatctggtcccctttttttccgctctgaatccatggcatcgtctctttaaaaattaactaatccgtcacggcggtaatccgacggtactaacgcttacgaaaatagtgacgatagttgtgagaaaagcatattgccacctaaaacggctaatatcatgacataaacagatagtgcaaaacctaatgcgatttcagcaatgattaacgcataaaatttgtcaatatggggcttcacaacattatcaataatgatataaataaatgccagattcataatcccgatggttgggatcataaagaagaacaatccagtcatgccagaaaaattaccagttccagtgagaatcgtcaaaagcaacgtgagtagattaaagattagaatcaaattcgtaattgctgcaaattgattgataaaatcactaaattgcatcgaaccagtattaacaacgcggcgaaaggcataggcaatgctaacataaatcgcatatatcccaagaaacatgaaaaacaccagcatactcgtttttaggataaagctgccagcatgaatcgcagcttccgaactaccaccagtcaatgaactagtaaaatcattggcgacattttgtgccttacgtaagattaacgcaattgataaaaccagtaaaaaggcctcaagaccgatcgaagttagtccaaagtaccgattagtcggttcaatcggatgaccgggatgccggatcgtcatcttaaaccacgaaaagtagcttccagagaactttttgacatgttggacggtatctgtggtcaaaattttattgacggtatcatcactactacgttcaaccgtattctcggattcggcaactgactgcccttgatccggaatttcctggtttggggcaaccacagcaccacatttcgggcaaaacttcgccccggctttcagttgattgccacactgcgagcaaaaaagtgcctgcttattcatttaaacatcctccaaattaatcataaatttctcgttaatcatttgaatctaccgtttcaaacttaccggtactcgtgttgtagcgcgctagaatatcattaacatcatcatatcgataagtatctgctaaatcattagtaccactaacatagcatttaatttcatacacatccgtgtgtggttcactcgccgtataatcataatcactaatatccccaccggtagccgcggcaatttctgacatagctgtctgagctgaactagacaaatcatcataagcactgcccgtaccactctgcgattcattctcgctgttgattaaactcgagtctgattcatcactggcagtggtagctttggtgtcagtattcgccgttgacgttgtcgctgcctttttattcgcaactaacgaaattaattcatggacgttcgcgtgccccatcagattaaccttgtgcgtgattgtcgtgtcagaattacttagtttaaacatataggtccccggaaacagcggaccaaccttataagtggcatgcgcactttcggtggtcaccaattcgatgtcatttgcttccagtgtggcattttttagattggtcgtgattaacggctgcatcgtggtgacgcgtaatttgtaagttgggaatagtgtccacttagttccgatttgcttaacaacaaacgtgtgatcactagaataaccgttatgctgtaagtctgttttcagatcttgtgcgtactggggatgtttttggatataggtcattaagggctttacggactgttttgtgatttttaacccagtattatcgctaactaagtgtttcgacaatgtcgtgggcttattactagtcatcatttcgacttccgcggcaatctgctgatttttaccagtgtgatattgataaaacccaaatccacctcccacaataatgacgactgcgagcacgtttccactgattcgcaaccaccttgattgctgcgtcttagctggtttatgagcttgatattgccttgaatccccgagtttctgctccgttccactggcttgcgttcgttcagcactgtcaatatgagtcagatccgctccgcaattttcgcaaaaaacattatcagcctcattttcatgctgacaatttggacatattttcatttttggtacactcctccattaatttgacatccgatgaaataagctcctcccaacactctgatttctattctgctttgcaagctatactaattatttaatagcgttataacaaagctttaataacattatatacgactaaaagaagtatttaaagacctttatagtatgttgctattttatcattaaccgtaacctaataattgctttgtcacattcaacggatcacaaattcagcatgagttcgataactgaaagcaaagtaacgtgatttaattagcatcacgtatcaaaagctttaatgaccttataacggtacttataaggtacttacagctctgtttcaagcatagcgaaacctctaaaattagtgctaagacgcttaatggattaaggaggattcccatgttaaccgagataggcaaaatcattcggcaacgccgacagcaacacggcatcaccatcgagcaattggccgaacaatcgaatgtttcaatctcgctaatttctcgactcgaacgtggtaaggtcgataacattaaactacaaagtttgaccgcaatcgctgaaactctgaatttaaaaatagcggacttctttcgcgacgagcttctccaatcacctaatgttgttgcattactcgactacctgagtgatctgccagcccatcaacgtgaagaacttgccggtacgttactcaaactactccgactatccaaatcgtgagcatttgcgcaacgcactccggacagttagttcaccattgaaccccgtgattcatctacactaaaaaatgattcaccttcctctgacaagaaggcgaatcatttttaatttatcaagcttgttaacggtcggctaagcgctcttaaagccagcatacagttcttaatggtgcgttgtcactaataacccactcatcactgccaatatgatacccaccgccatggctttgagtggttcacgaacgatgggggtggcggtcaaagcctcgaccatcgccccacctaaatacgttacaacgagccccaatacggcgccccaaaagattgtgactagtaaactagccagccacgttgtcttcaatagcaagctcctccaatgcggtcaggcacggctgaccttttgattgagtgtatcaaagtcgtcacgcgtttgcaaattgattaatagaattcataatttttatataatagttctatccaaaggaaatccccaccatcaatgacaaaaaagctcagcaccaaccattcaggtcctaggtactgagcgattatcatgaccgctatgacaggctaatgtcccccactactcaaatccgcaggccaatttgattcgacgaccgtttgcggaacatattggcgattcaatagtgccagccactgccggacaatcttgctcaaggtaaagtcatgactgcgttgccgagcgcgcgcggcatattcagcgcgacattcaaaatcagttaacagtggcattaagccagtaatcagagcattcacatcgcgggccggagtcaacacaccgtactggccaccctgcaagtactcggctgagccagtattccacattgagacgatcggtaaccccatcgtcatcgcttcccccataactaatggcatcccttcccaacgcgaagtcatcatgaagacactcgcctgttgataatgcgcccgtaactcagtatctttcagtgcaccccgataaataatgcggtcacgaacatcgagttcagccatcaatcgattgaacgttgctaattggtcttcgggaccagtccccgcgactgcaatttgccaatcatcgggcaaggctcgcgcaactgtcaacaaataatcgagccccttatgttgcaggtcaatacgaccagtgtaggcaatgatatgttgcgccaagtcggcctgctgaccatgagcttgcatggtcggtggattatagaacttgaccgtatgggcgttaaaacgtgagtagccttcccaatcataatcggtcaatgtcacgaccgtatcagccgctaagagccctgcgaccagttcatcttgcatttggacgtaatactgattgaggtagatatcaacattattgtgcatccacgcaatgacattgacccgtggaaaacgctgtttgattgccggagcaaaactcgtcagtaaacctcccgggagaataacggcatcgtaagctcccgacccaatcgtcgtgagtaaatcatctatttgaggcgcataaacggtcaacggatcagcgccaaagtaattaagtaccgtcgcacttgcaggccggcgcgccgtgataagcggtgcgctcagttcatagaaagaccggggttgggccaaggagtaaaaggcaacttcggcttgcgaggtcaacgcattgccgaggaccgtcgccgctcgtttgacaccatccatcactaaattctcgactgttatcaaaattttcattagcatcgttgactggcgattaaacaaccagtcgctcctttccacataaactcggttcatggaaccggaatcgacgatgttaggctgagctgattgcgtcagacccgttcatccttaactaatcaccatcactagtatcagcttaggtagcgttattataacaggaataattaaaaaccaattaaaatatgctcacaattcacattatgctagtcattgcaagttgcttcttgattaaacgtcagttagctaggttctgattaagacgtcataggctacattccagcaccaatcagcacttgtgacagtatccaatcgacacaattaatagcgcacaaaaatagcgttgctactggaggcacaggccagtagcaacgctattttcaaattaagattttaactgcttattttaaacccttccattgccaatcattaacttctggcaagtcagttccggcatcccggatataggcattgtgtttagcaagcatattatccatggattgaacgaaggccgcaccagtgttttccattgctggttgcgccgcaattgccgacttagctaagtcgaagcggtccatctggttcatgacccgtacgtcgaatggtgtggtaatatcaccattttcacggtaaccgtggacgtataagttatggttgtgacgatcaaagaagatgtcacgaactaagtcttcgtaaccgtggaaagcaaagaccactggtttgtccttagtaaagtaatggtcaaactcagcatctgacaagccccgcggatccttttcaggactacgtaacttcaagatgtcgaccacgttcacgaaacgaatcttcatctctgggaaactgtcgtgtagtaattggatggcagccaacgtttcaagcgttggttccgtcccagcagctgcaaagacaatgtctggttcgctaccttggtccgtacttgcccaatcaatgataccaagaccattgtcaactaattgcttagcttcttcaatgctgaaccattgttgacgtgggtgttttgacgtaaccacgtagttgatcttttcttggctccggaaaatgacgtcaccgacagctaataacgtgttggcatcggctggtaaatattcacgaatgtattctggtttcttttcggccaaatgagttaatgcacctggatcttggtgggtataaccattatggtcttgttggaatacagttgaagccgcgataatgttaagtgatgggtactttttacgccaatcaagttcattggctttacgtaaccacttgaagtgttgcgtcaacattgagtccacaacgcgtaggaaggcttcataactggcaaataacccatgacgtccagttaagacgtaaccttctaaccaaccttcagcttggtgttcagataactgagcatctaagacccggccagctggtgcttcatattggtcactatctggatgaatgtcttccatccattgacgattagtggtttcgaagacaccatataaacggttagacatggtttcatcaggtccgaacaaccggaagttatcaggatttttcttgatgacatcccgcaaatagtctgaccaaacgatcatatcttgcttaacattcgcgccttctttggacgtatcgaccgcataatcacggaagtttggtaagttcaaggctttcggatcgaccccaccattggtgattgggttagcagccatccgactgtccccagtaggaataatttctttaatatcatccttcaaagagccatcttcattgaagagttcttttggttgatatgattcgagccaatcaactaaagcatccgcatgttccatgtcattttgatcaacaggaatcggaatttgatgagcacggaatgaaccttcgatcttatcaccgtcccatgacttcggaccagtccagcccttaggtgcgcggaagacaatcattggccatactggcaatgtcgcatcgtcattttcgcgagcatgcttctggattgccttgatcttttcaacggcttcatccatggccttagctaaggctgggtgaaccttttcaggatcgtcaccttcaacgaagattggttcccaattcatgctttcgaagtattccttaatcttagcatcagaagtccgaccaaaaatcgttgggttagaaatcttaaaaccatttaagttcaagattggtaaaacagccccgtcgttgattgggttaatgaacttcgttgattgccatgaagttgctaatggacccgtttcggattccccatcaccaacaacaaccgcggcgatttcgtcaggattgtcaagaattgccccaaccccgtgtgaaattgagtaaccaagttcgccaccttcatggattgaaccgggtgtttcaggtgccgcatgggaagcaaccccacctgggaatgagaattgcttgaagagcttttgcatcccttcaacatcctgcgtaatttctggataaatatcggtgtaagtaccgtcaaggtaagagtttgaaaccatcacttgaccaccatgacctggaccttcaacgtagaacatcttcaaaccgtacttgttgatgacccggttaagatgagcatagataaagttttgaccggcaatcgtcccccagtgaccaattggatgaaccttaacgtcactggccttcaatggccgttgtaatagtggattatcttttaaataaagttgaccaactgataagtagttggcagcacgccagtacttatcaactttttgcaaatatgctggtgatgagtaatctgttgtcatttcaaaaacactccttaatttgcttttcacttgaacgctaactgtttaaatgttttcgtttacaagttctattttaacaactcatttcaaaaaatcaacctttttgttaattggaacggtccaattttataaattaaaacaaaaaaacaaggctcatcccttgggacaccttgcttttagattaatatattttttaataatttgtacgcagaatgattgaagcagcccatcaattagctttaatatgcccagaattaacaccggcgccctgattagttagtggcaaccagttcagtgcttttaatagatagcggtcccagaaatcccactcgtgcgctccagaaccgaccaaatattcatgcgaaacttttttggtcgttagaaaatgatcaaattcatcattcgctgactttaagccgtcctgatcgccaatcgccataaaaatcgcgggtaaagcgacgtgagctgccagtaatttagttacgagcacttgcaggtttaattctgaatgaccagcagctgctagatctgggccaaaaacgccatgctgatatgcgactgtttccgcaaaccactgaggctttgccggtaacttttccattccgggtcgcacattcagtccggctgataaactcacaatggccccaaaagtatcgtgaaattttagtccgttatacagcgccccgtaaccacccattgataatccgccaataaaagtttggtcacgctggtgtgatagtggaaacgtccggcgtgtaaaatcaatcaattcctgaccaataaattgactatacgtctccccagaccaaggatgatcagtatagaaactattctcgcccgctggcatcacgacagccagattccgttcgtcggcccagcgctggattcgtgtgccactaatccagtcgacttcactacctaagataccgtgcaataagtacagggtggcaaacggaccctgaatcgggcgcggcacgccctgctcatctggaaccaatttatcagttggtaaacacaccatcaggggaacggtccggtgtaaactagccgccataaaattaatacgaatcagtgccatgacacctcagactcctaactattcgttgacacaaacgttgtatacttcatatattgataatgtaatcgcatattagacacttcaaagggtgtcccatcatctaaaaagaagatcccactcatcaggcccaccggttcattcggctgcaaatgtagcaactcttgatcagtcgtattggacgcatcggccgcaatcgataagaatgatttggtcactgcggcgtgcaaggtcttttgcacgtaattaaagatcgatccactgaccacttgtcggttcaactggggcacaagcttgattggaatatagccactttcaatcatgaaaggctggtcatccagtaatcgcagccgtttgatttcataaacaaactcgtcagcagttaaaaataagtcttgttgcaactcttgacttgcaggaatgacgcgaaagtctaataattgaatactgggcttagcaccctcagtatttaaactgtccgtaattcctaggttagttccttcatacttaaacgaagattgatttttaagatataatggattaatgaacgttcccgaaccccgcttcttgaaaatcaggcccttattggctagcacgttaagcgcgcgcttaatcgagctacgacttacctgatactgttcgctaagactacgttcatctggaagcttcttatcaacaaattcattcgccatgatccgtttattgagatcattgatgacttgttgataaactaggtcagccattgtaatccctcctttgaggttatttcatacctcaagtatagcagaattaatggcgtttgggtgaattgttccggtccatttataaaattggaccgtatttttaataaatgtgaggttaacaataatgtcaaaaaagaagaaaaaagatcaattaggtaaaacacttgttgaaaagattttggataaagcaaatatcagctatcaacaatatgaattcccaaccgaaacggaaggcgacgttcaacaattacaagtcgaccacctcggtgttgacgaacatcatatctacaagaccttagcgctgattggtaacaagaccggtcccgtcgtcggcgtcttgccgttagatgagcacctcagctataaaaaattggctaagctatccggcaacaaaaaagttggcatgattccattaaaggacttggaacggactaccggataccaacacggcgccaacacaccagttggtatttgggaaactaagaagtttcccatctacttagacgagaccgctaagcagcaaggtaagattctcgtatcttcgggtaaaatcgggcgttcaattgaaatcgacgctgatgatctacgcaagctcgtgcacggcacttttggtccaataacggagtagcctcgtggataacttgatcaagaataacggcatcgtcttgctggtcatcattggtttacccggactatttgcttggttactgacgattatcaaccgacaaaccaaagcgaatctggtcaaccactacggtattaacagtcaggtctactgtggttttctgggcatcatcatccacgagcttagccatctaatcctcgcactgatttttcgccacggcatccaatcggtccggctgctcaaacgccctcacctccatcctgaagatgagtcggcggatgatctggcactaggctatgttaaccatacttggaatcggcacagccggtatcaagtcattggtaacctgttcattggtgtcgcccccatcttcggatgcacagcggcactccttggactagactggctactcgctcctggcctatttcaagccatcttcaaattagctgatacacccgaacaaccacaatgggctgcaagttttcactcgttaaccagtacgccaacgagttggtggcaactattaatgttgctctttctaaccctcgtcattgtgattggtggcttcgatctaagtcccgctgactatcagaatagtgcgatcgggttgtatagcaccatcgtcatcattatcgtgctgactaccttactgacgttcatcggtatcaccggttggatccatacgttagttacttggggactaatggtcgccattatcttgggttactcactactcgtgtccctactagtcatgttggtaacccatcttctgaccaaccgtgcctgatttagattgccagccttaaaaccagaataagagctaaaaaggccatcacaagaattcacgatacattcttgtgatggcctttttcgttagccaatataaatggtaattgcatcatctgataacatgatctcagctcaaagaactagtgactcaactagacgtagggatgccattacgccttatcatccgccgtccactcagccttaaattggtcaacaaactcgtgcatcaccgctgtccggtgggctgccagtgctttggcagtatccgtattcatgagagctgctaacttgaacaacttttcatagaagtgattgatagccgtgccgggctggtgtcgatattgttcacgcgtcatatgttcacgtggcgcaattgccgggtcatagattttttcaccgacatgacctgaataatacaacgcccgggcgatcccgatagcgccaatcgcgtctaaccgatccgcatcctgaacgacttgcccttcaagacttaatttttgagggccgttgaaggatttgctgaatgacatgtgatcaataattgcaaaaatagccgtttgatcggcagccgtaacattttgcgcgttcaattgagcaatcaaatcttgatgcgccttcgctgggtcggccatcaatttatcgtcgatcacatcatgcagccaagctgccgctaaagtcagatttaaatttgccccttcggcttttgccagccggcgtgctagccggttgacccgctgcaaatgatcgcgaccatgcccactatgatcgtgagcaagcttttgcaaagcatacgtttgaattgccgttaattgtgtttcagttatcatacactcatcctatccctgggtctggtagtacgcccgtaacttcttgatcgttccccggctaaaggtcaagtgatcatgattgtccatactaatcacgcccttattaaaatcaaccgtaatcacatggtcaaggttgagggcataactttgaaactcattaaaaaaatgcatcgctgtcagttgttccttaatcgtatttaaattcttatgtacgacataggactgggtcgtcgtcacgattcgcgtggtccgcagcccatgttccttctcacagtagatgatatctttaagcttcagcgttaataataacgcaccacttcgaatcgttaaagtcggttcagcagattgctgtaacatacctaaccgtttttttacgacttgtaggactctttgtacttctggaacaaactttgccttatcgaacatatttgtttttgaaataaacccggttggtgttgtcatcgcactcaacgtatccgggatcatgtcatcacgcaccgtcacatagacaataaacccatcaggatcataatcacgaatcttagaggccaattgaatgccattgatttcgcgttgtaaaacgatatctaaaaaataaagatttggtccgccgccatcctttaccgccgctaacacatcggtcggctgccatactgagactaactcataattaaagtgcaatgcctccagctgtgccgtaatgatgtcgtttaaccagagacgctgttgttcttgatcgtcactgataaacaccttcatatcaatcactcttcccaatgtaaagcagattaacaaacaaaccactgttgatccactctatcccaatttaaattgcttacaatcattttatatgatactaaagccccgtcattccagcaaccaaaaaaacacgtatggaccaaataactgacattacttggtccaccgcattcagcttatttttcaatttgttgtggcttggtctgtacttgattaagtcgcaataattcatccgtgcgcaatttattaacaatcagttgagccgctgcggttgttaaactgtgactgagatcctgatcagaaatcgtaattggatcatcgggatgatgaagttgattcgttaataccgtaataaaattgtcgtaagctcgcttgggatagccagtcgcagtcacttggtcgattccctgacgaattttatccagtggataactcggttttagtaagctaatgacaataatatccgccaattgcataatttgatatttcttcttgactggtgacaagatcactttatgtttgacataattattgatcattgcggcagtaactggatcagcacctaatggctgcaacgtttcattaattaataataggacctgatccatatataagtcaaagttcggtaactcgatccacttcggcagaatcacctttgccatgcgggcttgccaatctgcataagtctcattagctgccatgctgcgtcctcctctgataaataggttacattaattatacctagattaactagtcttgtaaactagatgacattgtaaatcacattaatttctgaatatggtatcatttatgggttaatgcaaatacaaatgaaaagtaggttatgtagtatgtatgaaatgaccaaaaagctccgtgtcggtgatgatgttaaagaattgattccacaagcagtgattgccggactttgggaccgtctcaaagcgatgcgcaaagagaaattattgattgatagcacgatggccatcatgttcagtgacgactacgaagacaataaaattttcttcatgacacttcaaaaatccggctcattcgccaatgaatatgaaatggcctatgatgggcccaaagacttcctcggccatgggacgattgttattatcaaagaccgtccccgtacgattcaaatgagcatctcggacgctaataaagctgaagacaccaatgacgatgcgactgatgagcaaaagtaggctcgcactttaaatcacatcatgattgctaataagctgctcaggtggtgaccgatgttcactgactaccccgcgctgaattggtacctggttatgctacagactttcagattcgtgctcactaggttgtcacgactgattgctagctctgtcaactagttgagacagcaccttgctaacagcacccctaagtgtgcaaaaaaatccgttgccatcaatgtgtatgtatcgaataaaagcaccgtcagaattcgctgacgatgcttttatttattgtatttctatcttaccttcgctatccgcaacggtttttggcaacgtcacggtcagcagtcctgcttgataatgcgcttgaatctcttcgcgcacgacattcgttagatgaaacttccgggtaaagtccgcgtccatccgttcgcgatggagtacgcgcccgtcatcgttacgatcgtcttgcgaccggtgcgcccgaatagttagccattcgtcagcatacttcaccgtaatagcgtccttatcaaaaccgggtaattctgccgttacggtgtaatcatcgtcatgttcaaccacgtccgttttcatcccaacgtgtgcgtttaagacgttctctgcttcccggtgagcccgcttcaataatttggtgggctttagtagatcatccagatgatgaccgaataattgctggcgcatgtcaataacctccgtatcaaatcaattcttagtaagcctgttggtgaatggcttcagcaagtaaatctaaggcatggtcacgcgtgccaacttgatccatatcaaagatgattgagtcaatgtcgccacccttgaaatcaaattgttcgaagtagatgtacgggtcttcgccttccacttttaggaaagcggcttcaatcttttgatcaaaaccggccgcccaatccgcatcgtccatctgattgaaatctgcacgggtcacgtaaccacggtcacgaattaaatccatcgcttttttgacatcactatcttgataaaccaatttcttcgaatcctcatgaatcttagttttcgtttctactggcatcattaaagatctccctttacttggtatacccttagtttagcaccattcattggaaacgttaaccatctttctcgcgattgcattattggcgcttaaaagattgccagcaggcccgctgactacgatagaccaattaattaaccgtcacgggggctgacaaaacgggtgataggccttataatattagctacttcgcgttatacttaaagtaactaatatttatgaaatgaggaatgtttctttggacagtggccagataattttaaatttagtcattattgtcattacgttcttcgtcgcagctttctttgtggcctgtgagtttgcactcgttcagacccgccctagcgctctcgaagaagaacaaaaaaaacgtgataaaccgtcaaaacggatcgcaacttctttgcacatggtccgcaaccttaacgagtatctttcaaccactcaagtgggagtctcgttagctggtatcattttaggttggataggtgaacaaacaactgaacattttgtgcttgatttcttatccctcttcaacctatccgtctcaaccgcggtattacgaggtattagtatcgtcattggggttttcctactgacctacttagaagtggtcttaaccgaaatcgtgcctaaaaatatcgcaatcgacatgccactcaaagtaatggcggttattacgacaccattacggtggttccacgtgatgttctaccccttcgtatggttgttgaatgtctcatcagctggcgtcgtcaaaatgttaggcatcccagttgcgaatgaagataacgatgtttattcacaagccgaaattcttaatctatcacgaaatgccgtaactggcggtgagcttgaacgtaacgattacctttacatggagcgggcatttgagttcaatgacaagatcgctaaggatatcatgatcgaccgtactcagctagttgtgattgatatcaacgataccgtcaagcaagccattcgcgtttatttacagaaacgctttagccgcttacccgtcgtagctaacaatgataaggacaagattctgggttacgtttataactatgacttaattcgccaaggtgaagttgacgatgatattcgggtcaataagttattgcgtaatatcattacaattcctgaaactacaccgattcaagccattctccaaaagatgatcgacaaacaaacgccgatcgtcgtcgtggttgatgaatatggtgggaccagtgggatcgtcactgataaggatatttacgaagaacttttcggaaccgtcaatgacgaaatcgacaatgtttctaacgaatacatcgaaaagcaggccgatggcacttaccgcatcagtggtaagatgaccatctacgactttgaacgctacttcaagaccgacttacaagaatttgaagattccgatgttgtcactttgaccggttatattttggataattttcctaaaatccaagccggtgatacgattcaaatcggtaacttcaatttcaaagcgcttgattttgaaaatgcttatatcaattggtttgaggttagcgcccagacggatagcacacctgacgatcataatgacgatcaaacacaagactaaatatttacacgcactacttaaaatggcacttaagaaagttgatttcttaggggccatttttttgtatccggcgaacttcaactggtcaactttggtacttttatatgataagtcgtgtgaattgccactaacctgttgtacataaattggatgcggttgatttaagggaaagcctactaaaaattaagtttatcttaagccggccgttatcacgacaaactgcgacgattcggagccgcagtcgtttgcaattaagtagtgcccagcgtaaactaaaactaatgtaaaacagaaatgaggaactgctgtgagtgaatcaacaatcaatatcatttatatctccattgaaggcaatacccgctcatttgtcaccggtatgcaggattacgccaagacccagcatgcagctgatgatagcaacccgttaattaccttaaaagaaatcaccgaacagtcagactttgccattgagactgaaccctacttcgcctttgtcccaacctaccttgacggtggtaacggcattgacaatggggttaaggaattgatgaccaacgtgttaggtgaatatcttaactacgatcaaaactcacggttctgtctcggagttgttggttctggtaaccgtaactttaacgatcagtactgtctaaccgctcggcgttatgctgaacaacttgacacggacatgattgcggattatgagcttcgcgggactgccgttgatactgaacgcgtctataacgtgatgaaagaccgtttggccgcctatttagacaatcaaaccttttaatcgaattaaccaaacaatcaaggtccaagttagttttcgctaacttggaccttgattgtgttcacagcacgaagttgaccaatcgcctcagtaacgacgatttcacgctattccgttgccttatccttatcaaatatcgtggggccgatgactagtgattccgctaataaggtttcattgtacaatttaaaaacgtacttctgatacttgacctctcgttgtgaaatcatatccaaatattgccgttcttgttcgagcgcattcataaatgcccgcatctctaattctttttctgcaccagtaaattccggtcgccgaacaacgtcaacccaggcccgtgcaaaatcacgagtcctagtccgttgtttctgggtcatcaaatcaaaaatgacggattctttcacattcggcggcaaatacattttctgaactgtatcaatcgcgtggtgaaccatcgccacccgaatctgatcaatctcactagttgcctcatcatcagtcaacgccggctttagcaaccagcgaaaaataatcgtcggcacgaccatactcagaataatcaacgtactggcagccattagaaccaagttaaagtcaccacgtccgaccgcagtatcggttaacgtataggctaaggccagcgttaccgcaccgtgcacgccacctagcgcaaaaatccatgcgggccgatttttgaaactcaaccgcaaccgaccgtagctgtaacgcaccagcacattgctaatatacagaacaagcccaatcaacaaaaagttcaaggacccatgcccgaattgttcgttaacaagaattttgataaacatgaatccaagaaccacaaacaccatgctattaaagatttcagtaatcatgctcaccaagtcaaaagcaaaatgaacttgttgtgcattaattaaccggcttcgttgggcttccgcattatgcactaatcccgcaaccacaaccgtaatgattccagaaacgtgaatcgcctcagcagcataatacaaaataaagggcgtaatcacgtacatcaacagcgacgcattcaacgaattatacgaagagcgtaacaatacttgccgaaacagaaccatgatccaggcactgacaaaaccaaagagtaccccacccacagctgaaataataaaatcaataatcgtttgcccatagttaatatagccattagcataccagagaaccgccatgttcaataagatgatgccagaagcatcattaaacaacgactccatttttaaaaaagttccctcagttgatggcatctccaaaccgttcgtcaccgattccattgccgtggcgtcggtcggcgtactgatagccgctagaataaaagctaacggcaagccgactaatcccagccctgccaagctaaatcccgcgacaattaaggcaagaatgactagtccaactgtcgtttggataatgtgctttaattccttaccaacagcattcagtcgagtggcttgtccttcaaaaaacaggagtggcgcaacaatcaggccaataaagatttcagaattgaagttttcaatatgattgctcaaaactggaataaaaaacaagccaataccgacgatcagactcaagtagttcacagatatttgcggcattacccgggaaataaaaatactaacaaccgcagccaacaccagaataaaactggaaaccatcaaattcacgtactcacctcattttattaattaattcatttattctatccgataatgctcaaattgtatcgtcaatcgtctccatcatcactttcaaagaatcaaaaaagctttcaaggcatttgaccttaaaagctttgttaatatcacggggcccacctgctccttaaccatttaataagtgttctcgccgggcgcgccacaagactaacgccaaactacctaacattaagatagtcaccgtaataaacaataacgagtaggagaactgagccaccatcatgccaccgaacaatggtcccacagctcgtcccaatgacaaagccatgttgtatcgaccttgatattttccgcgctgatcatcagccgccacatcatcgacccaggcgggtgcaatcggtaagccaatgacctcaccgatcgttaaaaccaccatgataataataaaatcaacgtattgccgggcaaacactaatcccaagaatgataaggcaaatagcgtaatgcccaagccaatctgagtgccaatcttaaatcgttcgttgaataacgccacgatcggctgactcacaataattaatagcccgttaatcgtccaaacttcactataccggcggaacggaatccccaagttggtcatgtgcacggaaagaatactttcccataaggcataactcagataaatggtgaaaatcatcaaacaaatcatccagattaattgacggtgatttttaggcgtcacatcccgcttctgcggcgcagctttctctgtccgaacagtcggtgtgacgttaaaggtacttagcgtaatcgccataaggccaaggtagcaaactgttgccaccatgaacaccacattgatacctagttccaacaagtaaccgaccaataatgtcccaataacgaccccaacgttgagtgctaaataaagcatgttaaaaacataccggttggatctagtcgttaccgttgcggcataggcattgacgactgtcatgctgataccatcaccaaagccgacaatgatcaagccaatcgcgtaaggccacaaactatgccagaaaatcaacgttgttaaaattgcggtcgaaataccaccaccaagtagcgctgtataatatggtcgccagtgatcaaacaagcgcccgccaataaagttaccagcaatcatagccaacgacatcaaaaaaagaataattcccgaaaacgtcaagctttgtttgagataattatgcatgtagaccgttgttaatggccacataaaagcggcacccgcattattcagcaaattggctagaaacagccaccgtaaccgaacttctttttgcatctcctcaccacatttctgatttaagtttattcattgagaaaacaataccctaaatagtatacgccgcctgaccgtttttacctaccaatcaggtcgcaaaaggtgctgagtagtctacgaaatcatttttacttaagccgcgcttagcatcaagtcttacactgcatgttgtttacaatcgcaacgctgtagtcgcagcctaggcccgtgctttgaccatttggtgcattctaaatgcggcccccactccgcggatccgtttcatccgttttagtattgttccgagaagcactgaccacgtgtatactaaagtcaaaaaggagcaattgacatgagacttttcaccattccagccgaacaaacggcatttagtaccaaagaggttgtcgccatcaccggtatgaccaaggacgccctccgttattatgaacaacaacagttgattgggcccgtaccacgcaaccacaacaactaccgacagtattcacgtcaaaatttagagcgtctacaattcgttgccacttttcggcaattaggccttgatctaaaactactcagcggtgacggcaacattccaaaccgggcccagcgaatccaagaactgagcgcatatcgtgctactgtgaaaaagcaaatcgctcaattacaggcaactgatcagtttttagcacataagattgcttactttgaagcttctccaaatcattaaccaacttttttactttttacttgctatcgtgtggacaccatagtttatactaacggcacacttaatcaaagaaggttacgatattatgaaaacaattgctattaaccaatacggttccgcagatgaatttacgatggtcgacatgcccacgaccgaaccacaagctgatgaagttcaagttgcgattcacgcctttagtctcaatcccatggatattgctggccggatgggagccctatcctcaccttttactgacttatgggcctttccattggtcttaggttgggatttcgctggtgtcattaccaaaatgggcaaggccgtcactggttttaacatcggtgacgctgtgtttggttccgccgcgcctgcccacgcagctaataacggcacttatggtgaatttattactgttaatactaaagaattagcccatctcccagcaggcttatcatttgatcaagctgctgctttgccaatcgctggactaaccgcttattacggcatgaagcacaatcttaagctgcaatccggacagaagattctggtgcagggtggagctggtggtgttggcctctttgcaattcaaattgctaaagcctttggcgcttacgtcgcgaccaccgctagtgctaatcaccgtgacttgttaactcgcctaggggccgatgaagtcattgattaccatgaaaccgatcctgccgccgtcttgcacgactatgatgccgtttttgacaccgttggtgatattgatactggtctcaaggtcctaaaagctgacggccagcttgcaaccattgccggtcaaccgacggacgagcagcaacatgatcaacagaaaaaagttgcctttcagttcacccaaggctcatcacaagacctagccgacttagcccacttagttgtcagcggtcaagtgaagctaaccgttgcgacattaccgttctccgtagccaatgtcattaagggtcatcgatccatcgaaagtcgccatacgacgggtaaaatcgtcattcacgtgacggattaaccaatcctgctactcaataaatatcttccggcaccattcttagtagctagtcccactgtaaaaatgaacgttcagagttcgaaggacttctgaacgttcatttttattttagcggcccaattaaccatggcacacttggtaacaaaccaaccaatttaatttaatgaatcactttaaacttcccagcacacttaacaaccagttataattcacgatgccatgatgaatttggactaagttcaaactgtctcaaccaggttgtactaatattaattcgacaatccataaaaattaatattgaaatgtccggtttttgaacctgattgtcgactaccacccctgatgattgttataatataattaaacactgccaaccggtgtaatctttcaacaattgaggtgacaacatggcgaataacaactttggcttggcgttaggcttcctagtgattctgttgctctggatctatcaacgcgtgcgaatgcctaagatgcgctcactcgctggctacatgtcgcgacgtgcgattgaaaatgaggaaacatggcggttcgcacaacgcttctattcaatgtttggcatcgaaatcttttccattttgttaatcggcgcgattattggtggtctgttcaagattccgctattgcaaagctttaattttcaagccatcgccttagcggttggtttgatcatgcaaaacgttgcaactgagcgtgaactgaaacaccagttcccaaaatctccgcaacattagtactttataattgaccatcaccacgtatggtttaatattaatacggtagtttaatctgaattaatgcttatgaacaagtacttggtttaaaatattcttagtaaagaagtgaaattgatgagtaacgaaaaaattgccttattcaccatctttggcggtactggtgacctcgcacagcgtaaactgtacccgtcactatttaagctctatcaaaagggctatctcaaggaccactttgccgttattgggacggctcggcgtccttggactgatgatcactatcatgaagttattagtgactccctagctgatctgaatgctgatcaggaaacggtgacgcaatttgcgagccatttttattatcaatcgcatgacgttactgatgctgaacattaccgaactttgaaaaaattatcagaaaagctggacgcccaatatggtttacaaggcaaccggatcttctacttagcaatggcaccaaacttcttcggtacgattgcccaacacttacgttccgaaaatattctgacagataacggttttaaccgcgtcattatcgaaaagccttttggtcatgattatgaaagtgccaaggaacttaacgaccaattaacggctacttttaacgaaaatcagatttatcgaattgaccactaccttggtaaggaaatgattcaaaatatcacggccattcgttttggcaataatatttgggaatcattatggaacaaccgttacatcgacaatgtccaaattacgttaagtgaaaaactgggtgtcgaagaacgggccgtttactatgataacagcggtgccttgcgggatatggtccaaaatcacattttgcaaattttgagtctgttaacaatggatcaaccagttgaattcactgaaaatgatatcgacgtggaaaaggtcaaggctttacggagcttacgaccacttaaaccagaagaagtcgcaaccaactttgtccgtggtcaatacggtgccggcgatgatgctaaagcttaccgcgacgaagataagatttcatcagattctaacaccgatactttcgtcgctggtaaagtcatgatcgataattatcggtggtccggagtgccgttttacatccggactgggaaacgcttagccgataagttcacgcgaatcgacgtggtgttcaaacggccagtcgtcaatatcttcaatcatgaagacgtccgagctaatgacgacgcagcaaccagtctcgatccaaacatcttgacaatcaacgttgaaccgactgaaggcttcgagctccgcatgaatgctaaagcaatcggccaaggcttcgcaaccaccccggtcaagttgaattattctcacgatgctgaagccacggctggtagcccagaagcttacgaacgtttgcttcacgatgccttaaatggcgacgcaaccaactttacccactggcaagaggttgccgattcgtggaaattcgttgacgtcattcaaaaatactgggatgaacatcaacccgaatttccaaactaccgccctggtacaatgggaccagatgcggccgatgaattattacgtcaagatggtcaccgctgggtctaccgcaactagccgtcctagcgtattcacttaaatggcttaattaaaagaaccagttaccaacacttgcctaacaacgtgttgataactggtcctttttatatcgctttaacaattggatgggttgctgcccatcggcaatacacgtttattttgctcttcgggattgcgcctgcggattagcttaactagcgtcgcaataatccctaacaccacccattccgcttataaacgcctaccctaccagttgttcacaaacttgaatcaaccgtttgacaccggtcgtcaactctgacagtgtcagcccggcaaaccctaacaagtaatagtccgccgtgggcatgtcgcgccaattggagttaagcggataaatccgaacctgttgccgttctagggcttctaataatttagcctgtgcaatgcctggaatctgaacaactaagtgtacccccgcgccggttgcaattggtcggatctgcttagtttgcgctaactggtgacaaagtacccgatacttttgtcgattagcagctcggtttcgactaaggtgccgataatacgccccatcttcaaaataattagccattgcttgttgtaacaggccggccaccatttcagcccgatattgataccgttgatgataagttgccaccagttgtggtggtaagaccaaatatcccatccgtaatgtcggatcaattccccgcgaaaatgtccccaaataagccacctgattagccgttgctagcgactgtagcgcgggtaatgggtgcgcactgtatcggtattcactatcataatcatcctcaatgatgagatgctgagtccccgcccattgtaacaacgctaatcgtttctcgatgggcaagacgactcctaatggaaattgatggccaggggtcgtataaatgatctgaggattacgcgcacgaacttgtgtcaaatcgagcccatcttccgtcactctgatggggaccgccgtctgtccataactagccgccaattcggataaaccgcggtagcctggattctcaattccgaccgttccgcgtggcaagatactaagtagaatactgagacctgccttagccccactcgtgatgacaatctggtccgctgtgcaccgcacaccacgagtcgttttcaaaaatcgaaccaagttttcacgtaaagccggtaagccctgcgcatccggataaacggccgttggttgctgctcagtctgacgcaacgctagtcggacagcccgtttccaagcgttccaacttggcgataacaactgagtcacaccataccgaaaatcataagtgaacgccctgggtttagtgggctgtggcacagtctccagcgcctgtttagctgctggccagtgtgtccgatcgcgataaaagtagccactcccgggaacggtataaacatagccctctgctagcaactgatcgtaagcttgttcgacagtggtcttggaaactcccaaattttgtgccattttacgaattgaccataactggtggttggcttgagtagcatcatagtcatcacgcatctgctggtataactgaatatataacggtgtcgttgactgacgatttaatggcatcacacaactgtcctttcatttttatcaaaattgtctatttctaaccggacgattgttgtttattataaacggtaatcacgttgagaggaaggtcctaatgatgaatacaaatattcggatccaacaaattcaagtctctggcatccgacgcttcgatgaagcaatcagtcaaattcccgatattatcagattaacggtcggcgaacctgacttacccaccccaagtcacgtaaaaaaagcggcaattcaagctattcataatgattggacacactactcgccactaatgggatttgccgctttgcaagatgctgcgagtcactactttcaacagaaataccaactcacctatgtacctgagcaaatcattgcaacagtcggcgctagtgaagccgtggcaacgaccctgctcactttacttaatcctggcgataccgtcttattgccaacaccggcttacacgagctatcaacccgtcgttgacatcgcaaacgcacaattagctcccattgacacaaccgcaacgggttataaattaacacccagtgcgttacaagctgcgctagatgatcaccgtcgcgaccacgtcaaggccttaattctaaactacccgaccaaccccaccggcgtcacgtacactgatgatgaattacgggctttgcaagccgtcattgctaccgccggaatctacgttattagcgatgagatttacagtgaactaacctatgaacagccccatactgcttttgccacactatatccaagcaaaacgatcacaatcaatggcctctccaaatcgcatgccatgactggttggcgactgggattcatcatggccccaagtaacttgattaccgagatgaagaagacccaccagtacctcgttacttcaacgagttcaatcacccaagcggctggtatcgaagcacttacccatggtctggatgatggctcagaaatgcgtgacgtctatcaaacacgccgcgattacgtcgtcaaacgtctgagtgaaattggattcaattatatctatccgacgggcgcattctatatctttgtccagctaccacaggatttccaaggcaccagctgggactttgcgacccgactcgcacacgaggcccaagttgctgtcgttcctggctcagcatttggtacgagtggcgagggttggttccggataagttatgcagccagtcaatcggcactacgcgaagggctaaatcgtttagccttatggcgcgcccaaactaccacacaggaggattagccacatgaatttagcatccgcacacctgattaccgctatggtcaccccatttgatgaccaacaacacattgatttccaccgcttagagcaactgatcgaacacttacttgcaactggcacggacggcttattagtcgggggcacgactggcgaaggccccacgttgatcatcgctaatacggggaccaatgacactgccgccacaattcatttcacccacattgtcagtcaaatcgagggcatcgacgccgccctcgtcgttgtcccgccctataacaaacccaaccaaaccgggatgatggcgcattttacagccattgccgaaaaatcagacttgcccattataatttataatattcccggtcgcgtaggcgttaagatgacggtcacgacgattctcacgttggcccacaaccccaacattattgggatcaaacaatgtggttccgatgaagaactggccgcaattgttgaaaaggcgcctaaagattttctcgtttacacgggcgaagatgctcagagcttgaccaccctcgtcttgggtggtcagggaacaatttcagtggcgagtcatttatttggaaatgaaatggcgacgatgcgtcgcgccttgaaccacggcgatatcacccaagcagggcaaattcaacgacgtttaatgccgaagatggcagcactattcacacaaccctcaccggcacccgtcaaagcggcgctgaacgcccaacactggttagtcggaagcacacgcctaccaattttaccgttaaccaccaatgaacaaagtcaactactcaacagcttaaaataatgcagaacggttggtagtacctggcaaaagcgcgtatactgaacctaaaataattaggaaagtggtgaccatgatgtgcggttgggcttttactggcggtatgccctttatgtggatgggtggcggcttgggcattatcagcttactgattctgttagccgttggtgcttactttttagggacacgttcacgccatcacgattaaagttctcattgggataatcaaaaaagactttcaaggcacggcttgaaagtcttttttgtttcatcatcagggatcagccaaccgggtcaagccctccccatttcaggttacctgcagttttgcctgatagcatcagcccaaacgctgatttagactcgatgacttaatttcaagacagtaacgtaagtaagtttaccagccttaacattgctattgagtttgtccccactaacttcattttcactcacaatccataagccgatttgaacaaactggccgccagtcccaatgccccgattccaatcacaattttaagtaatctggcaggtaagtggcgtacaattcgtggtcctaggctaccaccaatcagaaaaccaatgcctaagggtagtacatagcgccactgaattggcgtttgcaagccataaacgacggctgaaacaatattggctaatcccaacgccagatttttctgagcattatagacgacgaatggtgcggcactcgtgaaagacaggatcgacaacatcaagacaccacccgcagcaccaaaataccccgtataagccccgactaaaaagatgcccaaccaagctaaagccgtcatccatttaggtgtcacaacaatttcaccgggctgtttaatatgaatatgacgaggaatcagcactaaaattcccgcaatcaaaataaaaaatgggacgaccttcgcaaaggtcgctgccgggataataataacagaattgccccaacaatactcccaactaaagtcagcgggatgagcgtcttcaattcctgaccatgcccccgtagttcccggcgtgaggccggcacggctccaaagctagtaaagactaaacccacggtgttagtgacattagccgtaacgggcggcagtcccagcgccagtaggaccgggtacgaaaccagcgacgctaaccccgctgcagtgctaacgatacccgcaacaatcccaacaacgactaaaataacgattaactctccgaacgtaaacatgtacaacgttcccttctctcttaatagccctacaatagccacaacgattaccatagtcaaataaccatgttataataacaaatcataatactaacaattaagcatcaattaaataaggactttaagatgaatattaaagatttgcaatattatgtttcgttaactcagctgaaaaatttttcattagttgcagcccaatttcacgttagtcaaccgaccatttcggctgctattcggcgcttggagaccgaactgaaaacacaattactaattcgggctaatccccacttacccgtagcactcaccacgaccgggattcaagtccaacgacacgccaatcagatcctattagagcaccaactgatgtgccaagaagttgcccacaccacaaccgatcaacttgttatcgggatgccgccaatcattgaaatcaactactttccccggattgcaagtcaattaccacaggctttattcagccagattcaacctatcagtcaaggttcactcgcggcgctcaaaggattaaaaaacggacaattagacttagccgtacttgcttacctcaatgaattcacggatacgaccattcaactcacgacgtttgacacccagtcatttagtattgttgtaccaactgacgatccgctagcaaccaactcacaacttcagttcagatcgttgcgtcatcagcattttgtggcgctcaaagataactttgtccaccgccaggcgtttcgtcaactcagtcatcaaaatcatgttcggccaacgattgtctttgaatccaacgaaatcggcagtatcttaaacgtggttcgtcagcatgtgggcattgccttattgagtaacgccgtccaattaccggcgggattacagcggctccccctaactgacgcgcaagcgcccacgttcaatgtcggcgttgcgtaccgccactcaatgacgtttagtccaacccaagccgacctgatccaacgactgaccgctgcttttcaatccgtcgattggcacgcatactaaccagcacctaaaaatccaccgtgtaagtttatcaatatgataagctcacacggtggattttataacgactgtacgtcaagttaggtcgccaaatgcaggtcattaaacagacaagttttagtaacctatcatggtcgctaacccgtctcaacctcagattaagcttgttgaacagcctttgagattggggtatcgccattgatcaacgcaatggttttaccgaccgttgcaggggtgtgtagcgtttgaactgtaaaagttgcgacatcatcacgcgtaatctcaccgccaacgtcagggttaacggttactttgccagtaccggcatcattgatcagcgtacctggttgtaaaatggtgtaatccaattgggttctgttttttaaccattcgtcagcataatactttgccacgtagtacggttgtaatgctcgtggccaacgactccgatccggtgtaaattcagcactaataattacgtagcgtttaacgccggcaattttggctgcgaccattgatttgacagccccatccaagtcaatcattaaagtcatatcataacccgtttgaccacctgatccggctgcaaaaacaatggcatccataccattaaaagccaacgctaaatcttcaggctgagccatcaaattgaattgtactggctgcgcaccagcatcctcgaaagcctcagcctgttctggttggcgaatacccgcgtacacttggtcaccttgggcaactaacttggaaacgattttcttaccaatctgcccatgggcaccaatcacaaagattttcatctgggtcactcctgtcctttagttaagtttcattataaagcttaccaggacaaaaaagtatcattctgttcctgatttgtccagtttacaaaattggcttataatatgagcatctaaacgagagtagtgataattcatgtcaaaatatattcgtcaagctactagtgctgacttaccagccatgatggctattatcgaacagggcaaacacgccttggctgccgatcagattccccaatggcaagatggttacccgttagctgctgatattcaggctgacattgatgctagaattgcctgggtactcattgtcgatgatcagattgctgggacggctgcactgctaacaacacctgaccccaattacgctattatttatgatggcagctgggcgcctactgagaaccaccgctatgcctcgattcaccgtattgctattgccaatggttaccacggacaacatctgactgacttttactttagcaatctcattaccatgagttaccaactcggctttcgtcaactccgaattgatacgcacttgttaaacaagcgaatgcaacacattattaccaaagctggcttcgaataccgtggtatcgtctacatgaatcatgacaacaacgatcaacggaatgcttatcagttactactatcctaatatttgtcagccacgcggcatttggctttaaacatgacaaacgctttaattaagaccaaactcaacaaaaagcacgccagattattctgacgtgctttttccaattttgtaaacaccacctgacagccaaacttaattaactggcacaaacacctgttgtggcagtgagtacaaatactgtttagtcacctttcctggatacatcgacgctagcgctgctgcatatagtttaacttgaccagcgtagcgcgtcttcaattcttcaggccgcttgacgtggtccgtcttataatcaaacaaggttaacccatcagccgtttctaaatagccgtcaataattccatgaatcaggacttttcccgtctcatgttcatcaacatcgaaaatctgacgtgctggaatcagtaacgagaatggcacttcgcggtgcaccttcgccggattatccaaaatttgactgcccagcgcactctggtaaaaagccacgatggtgtcaactgcaatcaatttcgcgacattggtcgttaagacccggttagccactaacccatcaatcgtactttgaaccgtcgtttcattgaccggtttggtcaaatcaagttgttctaaaactaagtgggtcgcactcccaacttccgcactggttggcgcctgcatagtttgtaaaaattgtggtaactccagtgaccctgtcacaaaccgggatgtcggtcgtgaacgccgctgactaacagtcgggttcgcattcatcagcggagtatccggatcttcaaagattcgtttcacttctgataccgattgatatgccgtcgtcgtcgtggaagcctggtgtggataatgaaaattcagtaacgtggtcagataatcacgcgttacttgatcaacatcgatggtgacttgctgttcaactagttcaagcgcatcaggttgagtatccgttaccgcttcactttgctccgccaggacggtggtggcatctcccaattcaacggctagcttggtcggatcatccgtcaattcgtaattgggccattcatctccccaatatgccttcatggccggatgccgtatcacggccataccgacccaatctaattgattagtcgcagcaattcgtgcctgagcactcaaaacgcgcccgtcgctagcaaaggcctgccgccatttttcggtcgcggtatcaatatccttgattgttccaaccaaatagagctgttgttgagctcgcgtcatcgcgacatatagtttccgcatctcttcagcgcgcatcttcttgctgactacctgcttagtcacaacttgtggcaaggtcgggtacttcacacgcgtttctgggtccaaataagtaatcccaatccccgcttctcggtccaatagcgcgctcgagcgcgtatcagtctgattgaactgcttatccatatccatcacgaaaatcacagggtattcaagccccttgctaccatgaatcgtcattacgttgaccgcttccgcatcagtctcggccacggcagctgccaagtcctgatccttttcctgcatccggcgaataaaacgaacgaactgaaataagcccttaaaactgccctgttcatacgtataagcacgttcatataaagcgtggagattagcctgacgctgtttaccagccggcatgccgccaacgtagtctaaaaagccagttcgttcatagatttgccaaatcagggttacgatttgattacgtcgtgccagatctcgaaattcagtcaattgtgtcaagaaggtctcgatcttagcataaacttgatcaccatattcagtcgccggaccagtcggataatgatgataaaagtcctggacggcttgaaaataatcactcgttttattctggatacgcaaataaactaattgattttcgtctaatccgacaattggcgagcgtagaaccgccactaacggaatatcttgatatggattatcgataatactgagtagtgccatcatgattcgaatctcagtggtttgaaaataattctgggcatcattgaccacaacgggaatgtgataccgtttgaaaacatcaataattgttaaattatgattacgtgttggtactagtaacgccacgtcgctgtaacgaaacggccggtattccccattagcacgttcatagattggcttatcttgggccttaagtgccaaaatcttttgggcgaccatcgtgatactcccaacggcaggatcatcaattgaaaaattggtttcatccgtggagacatcttctgtcgacttgtcagtttccgtctggtaaagtaatagattcgtcgtttgtggcatatcggccggataatccttgggcccatacttgaggtaagccgcttcatcataatcaatttgcccgaccggcgcgtccatcagctgactaaagattaggttagtcaaatgatcgacattcgccaccgaccggaagttttcagctaatacgattcgttccccgtgttcgggattcgtcccaaaatcgtgatacttgtgcaaaaacaataacggatcagctaatcggaactggtaaatcgactgtttgacgtctcccaccatgaacatatttcctggctggtcgcgcgccaacagctgcaaaatactttcttgcaaagagttaatatcttgatattcatcaaccataacttcttcaaattgggcccgtaactgcgccaaagctgcctgaccactttcattgtcactcgttaagatttgcaacgttaggtgttccaaatccgaaaagtccaggacgtgtcgccgccgtttttcagctgcaaaagccgtcttaaactgcttggtcgcatccactagctcagtcacaattgactttgcccctaccataatatctaagacttgctgctcatcggccgcaaaataggtctcgctaagggtggtcatttgtttcttgacaccgtccacaaatgtgcccatagttttggcccgcgcagtcttctccggctcgtccttataagtttttttgagagctccaatcttgaaagtagcgacttgagtacgtaactcattccaacttgccgttgccaattgttcacggagcgtcgtcagcgttttttgtgctgtagcgagtacctcaagcgttttcgggactaagtcagcatccgtcgcaactttttgtgcctgtcgtaatttcatttgcatcccatcgacttcattaatgagcaatggtaataattgttgttgataaaaggcactggccgttaacgcttcctcatccacctgataaggttccggtaacttgctcagccagccttccggatccggggtcgactgggcaaaatcaaataaccgaaaaatcaatcgactgagaccatcatcacttcgatcattagaaaaattcgctgttaataagtcaaataacgtaccatcttcatcatataattgttcacgaacactgtcccaaacctgatcacgaatgagtaacccctcagtgttgtccgtcaataggcgaaaaacaggatccaaatcaataacgtagtaataacgctgaatcacgcggagacaaaaagcatccaacgtactaatgttggctaccccgagcaaatttaattgctgccgtaattgccgaatcgctggtgacgccgtggtttgcgccggattgtccgtcattaactgtgatattcgcttattgatttgcgattccagcttttgtttcatatgcttggcagctaagtttgtaaacgtcaccacgagtaactggtcaatattcgtgccggccaatatcttgcgcataatacgttcgatcaatacggtcgtctttccagaaccagccgaagctgaaactaacaagttatttccctgctgtgcgataacagcttgctggctaggtgtatagtttgtaccctcactcatggttttctccacctttctgtgtcttcagtaaatcaagaacctgtttggctgataatggcggtagatcccgataagcattttctgccaacattgcatcaaactgcataattgatagatacggcgaatactgtaaagcagttgtcttatcgttcagccgaattggatttagttgaatttctccagcgaaaatcgcttcagcagctgcaataatcaattgactattatgctgtaataatcgttccaactggtcattcgtcaccagtgaagctgcacgccccccactatacgccccgtcctttttacgtgcgaatgggtaaactttcgaggtcccgttaccttgttgtagttcgctatctaaatgttccaataactgcggatcatcgagcaaaattcccttatacttgttcttctttaggagtgctgcttcaaaaccgccctgaatatcttttggtttcagagttggattttgaatgtgcatgtaaagtgcgccagctaatttaaccgcagcttgatcagaaccgactaaagcttgctcgttatgcagcacagcgtccaaataagttaacatttgcattgcgagaccatagtaagcctcttgaaaatcaaatttatgttgggatgacttataatcgacgattcccaggtaactttgatctgccacttgaatttggtcgagacggtcaatcttcccccgcacgtgcacactatgcgttgcatcaatttgaaaatcgagcgcttttaatccgtgttccttgccaacgttaccaaataagacctcggtttgcttcggttcagcggctgacagtttactttgattgcgaatcgcaaatgcaatctgccggactgtgttgattaactgccgttgcaagtaagccatccggttagaactcgtcaaaattgtaaactgtggttgatctaagatttgacgggtcacagtctctaaatactgtcctaactgctgatcactggcttgggccaatgggatttgatcagaccgtaacgccttgatgagcccatctaagacagcgtggaaaaactccccagtactagcagctgataactcgaacacatcacgctcacgcagtttgagcccatatttcaagaaataagcgtactgattacgataaaattcttctagttttgaaattgacgtataaatttgatgcccatacaaagcctcaacgctggctggtgtcagcttgacaggttgattgcgatagcttaatccagccatcaattgacgtgctagctcaccgaattgggggtcacgcgtcaattgttgccgtaaccacacccacaccggagcaggttgtaatggtgcgccaacacgattacggtcagtattcgtcgttaacacatcgcggtaaacctgaatcacatgactaatcgtccggcgcttagtcccaacaaatggccgcgcatcggcattagtcggatcaggcgtcccaagataagtatgttctcgcaaattgaactggcgttgaattcgccgcacatagttggaccaatttaaatctgtttcttgatcatcttttaacggggcgctgaaaaacaagtgtcgacgggcacttaaaaaggccaaataattcagacaactttcatcaccgagctgaacgacagctgaatcatttaaatagtggtcaccatctaacgaactgagcgttggttgcaaattttctttatccacatcactcaataagttgttcgtcataatccggtcaggcatcactaaatcggttgccccaaccatgaagacaactttatggtcctgactttgaaccattccgctctctgaaattaacacctggtccaacgtcgacggaatttgcgagtaactagcaccttcaaagcccgcttgtaatagtgccaaaaagtccgtaatttcaaatggctctgcacctaaaatcgtcacgtattcatctagcatcccacagaaagtttgccaggtctgctcaggctcggcagctgcccggacatcttggcgatccaaggcttgatcacgccaagctaatagctggtccgtaacgccctggcttgtcaaaaagttgaccagcaatgtcacggccgctttgccatccggtgcttgccgcatttttttaaaaaacggtggtaacgtttcagcaacaaagtgatgaatcaagttgatttgtcgcgaaatttcagcattttggtccgtctcgaccccggcatcaccctcggttaattgaaagtattgccaatcttccctttgtacccaccgctggccgtgataaccacttttaaggataaagttttcggtcagatctactgcttggcggtaggcttgccgatccatcggttgcccattgatatttggcatcaacagctcggttttcaacactcgcataacatcacgatattgatactgctgtgcgtcgatatcaaacaacgcgttaatcaactcaactaacggatggtcggccattgaacgctgtaaatcaacaaagtatggtatttctaattcatgaaaagtcggcgctaacatcgtttggtaggcatctaagtgccgtgtcatgatcaagaagtcccgataatgataatcgtcggcgggatcggcatgttttttcgcgaccattgcccgaatcatgcggccaacttgtgccaattcggtctgtcgactatcggtccggaataaatgcacattcgtattcggctcctcgtaaccggtagccgcttggggctgaccacgccaaaaatcatcgagagccactaagccgggagccacgcgcggcgtttcagcataaatatcttggctaaccggaatctgacgaatacgggcatactgataaagccgataataaagccgaccagattgataaaacagcgtgccattttctggcgcccggtcaacgactttgtgatcgagcatcaaactgattgtcacgtccgcgccctgttccagcatagtcgtgacgattccctgttcctgggccggtaattgggcaaagccagcgagttccacataaacgtgcgttccgtgcaagtcttgacgccgtaagtaagcattcaattgaacgagaatatcagcgggcttaagatacttatctgcagtcgccgccacgaagtctttgtaaacgatcgccagatcatgtagcttagcctgcaagtcacccgcctgagcattcgctgccaattgaaccacatcttctggttgcaaattagcggtctgtaactcattaatttcacgagctagttgagtcacaaaacccgtttgcgagatttcaccaccaaacaatcgcagctcatcggcatgtcgttgtagaatgcgatataatagcatgtcaatcccagcagcggagagtcgtggtacttgataagctgcttcgttcttcatcaagtaccaagcaagacgggtaaatgaaaagacctgaacctgagtctgggcatacaaatctggttgcccaaatgcctgtgccaagcggttcaacacgtcaacttcagtatcgaacttaatatggttcggtaccaaataaaaaaactgatcttgtggcttagccatcaaggttgccactaactgcgccaccatggtacggcgatggtccatcttggctggtcccaatacaaattgtaagctcaccactaattcctcctctgaactgaacaaacgttctcattaagttagtctcattatcgcatatttaaccggctaaaaaaacacctaacccgtaagttagatgtttattatcgcgtccattaaataccacgttattcagccaggcgacccgtgtgctgcacgtcttaattctcaacgttgacggccactgctgccagatgtgcgtcggatttataatggcttatcgtgcccggcatccagtaccgttttgtcatcctgatttgaaattttagaagctttaacgaacgtggtcacggcttaatgtggtcaactcgcacggtcgcttattcatccggctgcaagtctcgacctcaaaacaccttaccgatcacccggtgacactcgccaatcctcagagtgcttaaaagacgcgaattagcacaacccccacaatcatgacgagcaagcccatcaactggacccccgaaattgggttcttttttgaagcaaaccagccaaattggtcaatcattaaactaccggccatcagtccgactaaaacaatgacgaccgctaaaccagtgccaacgaccggaaccaagtaaacattacccaaaacatacagcgcgccaatcatgccaccaatccacatccaccaaggattaggcgtcttagttggcctaatcaatttgaattgaggtcgcaagactaacacgatgacgatcagccccagagtaccaactaaaaaagaaacaaatgccgcgtgcactgtggagccaagcacccgacctaggtgcccattgaccgcagtttgcatcgcactgagcattccggcaaccacacctagtgcacgccaaattccaaggccactttggtcagtgtcagtgtcagtagctgtatctttttccgctgtttcagtgattcgattatgccgctgttcgagccacccctgagccgcaacggtgatgatgactcccgccaagactaaaattgcacccaaaaatcgggtcatcgtcaatgtactttggggtgagtcgaaccaaccaaaattatcaatcaatagcccggccaaaatttgaccaagcacgggcataataacggtttgaacactacccagcttcggaaacaacaagatattgccagttaagtagacgacccccaacagcccacccagccaaatccaaaccggttgactcgtaaataacgtcgtcgaaaatcctaaagtatggacatcaattagtgtcattatcgccaaaaacaacgtccccacagcaaaagatattagggaggcaccaaatggagatcccactgaattgcgcaatcgcgaattaatactcgtttgcattggtaacccaatcccgattgctaagccaactaaaattgctaacatcgaatattccctcatttctttatcttgtcttaacaatctgtcacaggttaatattagcacgagccggtaactaaaatagtcatgaaaatcatctggataatccagcttaattttcatgactattttaaatatgccagccatttatggcgcgtaatcctaatcagtcactccccagtgttctgggtcctgacgccacgtatgcagcgaagctaattcctcgtcatcaatgtaatctgcttggcgagcaactttgattagttcaggatagttggacaaactgaacagcggtaatgacacaacggcaaaattttgcgttgccgcatccaaggcataactgaagattgccccaacagcctgaatatcgccacctgctgcttgaacggccttggccgcctgtaacacactgccacccgtcgaaatcagatcatccagcatgacaactttttgaccgggctttaacaccccttcgatttggcgtccagcaccgtgatccttgggtttagcacgaacgtagatcaatggtagatttaacaattccgccacccaggctgcatggggaatgccagccgttgcgacccccgcaatcacttcggtcgccgggtattcacgcttgatgatggcggcgattccgtgcgcgatatgctgacggaccgccggataagaaatcgtcagccgattgtccgtataaattggacttttaatgccactggcccaggtgaacgggtcgtttggtcgtagtgtaacggctttaatcgtcaacaaatcagtggcgatagttgctgcaatttcactcatattagttactccattctgtcataatgtctcggtaagcttgaactggttctgcagcctgcgtaattggccgcccgatgacgagaccgttgctcccagccttagcagcggcagccggtgtcatcacccgttgctggtcatctgactgcgccgacgctggccgaattcccggcgtaattccgagaaaatcggcaccgacggccgtatgaatcgcctgaacttcttgggcggaacaaatgacgccatcacagtcactcgcccgtgctagtttggcataatgcacgacactcgcccgaatcgttcccatgatttgctggtcctgattcaaaatagcttgattagtcgaagttaactgcgtaatcgctaataacttgggggcagtgactccagcggccattgcacccgcgaccaatcctcgtttggcggctgaaagcatcacgtgcccacccgcagcatgaaccgttgtataggttacccctaaccgcccgatcacccgcattgcggattcgacggtattgggaatatcatgtagtttcaaatctaagaaaaccgcatggccgcgagcttgcacgtccgtcacaatactcggtcccgctgcataaaataactccatgccgattttgacagtgacatgtaaatcagccggaaattggtctaaaaaagctaaggcccgttcggcggtgggaaaatctaacgcaatgataattggtcgcttcatccttggacctcctgaatcaacgcttgcaagctggtgatcccgtactgatccatcgccgccggtaatccagcaataatgtctgtacaagcagtcgggtgaccatacgttgcggccccaacttgaacagcatttgcaccagccaggtaaaattccaacacatcagccggcgtgaacacgccaccaacgccaataatcggcaacttggtatgttgacgcacgtcatggatcatccgaacagcaagtggatgaatggcttttccagataaaccgcccgtaccatgcgctaagatcggttgacgtgtggctaaatcgatgcccatacccgttaacgtgttaatcatcgtcagtccagccgctccaccagcttcggcagcgagtgcaattgggacaatatcagtaacattcggggtcagcttcatgaaaactggtttatcgaccgcggcaacaatcgccttagtcaacgccgttaccgtcgctggatcagttccaaatgctaggccgccatggtcgacgtttggacatgaaatattgatttccaataatttgacgttaggtgccgacgccatttttcgtgcgactgccacgtattcatcaaagctcgcccccgcgacactcccaataatcggtaaatccggataatgagtcgctaaccacggtaatttatcggccagcacattgtcaattccgggatttttgagtccaattgcattgagccaccccgcggttgtttccgcggtcgttggtcgtgggttgcccgctttcggttcggcggtggtcgacttgatgaccaagccccccagcgcactcaggtctaactgttgagccatctgttgaccatatgccgccgtaccactagccggcataaccggatttttgaacgtgacaccggctaaatttactgttaatcgtcccatcgttttcctcctatgatcaagcttatcggcgggtgtcctgatttagagcgcctgcgttacaaatgattgtgattctcgtacttgcaaaattgccgcgaccgtatctaaggccgtaaacaacggaataccgtgcataattgacgtgtttcgaatcagggtaccatcattttcagcctgttcttcatccgaaaccgtattaatgacgacttgaatttcgccagcttccatgcgatgcagtaaatcatgctcgccactatcgatcttgtcgacggtcgtaacgggtaacccgtgtgtggtcagagcagtcgccgttccccgagtcgctagcaattggtaacccaacgcatggaaccgcttggctaacgccactgtttctggcttgtcttcatcccggacagtcaaaagtacgttaccatggctcggcacgtgtagcttagccgcttcaaaggctttgtaaagcgcctttgccatcgtgacatcgctgcccatgacttcacccgttgacttcatttctggtcccaacaaactatccacacgattcaactttgaaaatgaaaagaccggcgctttgacgtgtactaagggacccggtgtgaccaagccagtctgataaccttgttcagccaatgactggccaaggattgcccgagtcgcaacttgagccatcggaatgttcgtgaccttgcttaagaatggcaccgtccggctcgcgcgcggattgacttcaatcacataaacttggtcgtcgtggattacgaattgaatgttcatcatcccgacacagttgagcgcaatggctaatttttcagtataatccacaatttgtgcttggaccgccgccgaaagtgactgtggcggataaacggccatcgaatcgccagaatggacacccgcccgttcgatgtgttccataattcccggaatcaagactgtttgaccgtcacaaatggcatcaacttcacattccttcccgaccaaataactgtccactaaaacggggtggtcgtgcgacaccttgaccgcgttatgcatgtaatagtctaagtcggtccgcttcttgacaatttccatcgcccggccaccaaggacataactgggccggacaaggacgggatagcccaacttatccgcaatagctagcgcggttgcttcatcacttgccgtatcaccagccggttgtggaatagctaaagctttgatgaccttatcaaattcgtcacggtcttccgcgcggttgacatccgccacactcgtccctaagattttgataccatggtcagccaatggtttcgctaagttaatcgctgtttgaccaccaaattgcacaatcacgcccactggtttttcaagttcgatcacgtttaagacatcttcaatcgtcagtggctcgaagtacaatttgtctgatactgagaaatcagtcgagacggtttccggattactattcatgataatcgcttcatagccagctttttggatggctttaacggagtgaacggtagcatagtcgaattccaccccttgcccaatgcgaatcggccctgaccctaacactaaaacggatgggcatttcgtgacaatactctcattttcaaactcataagtgccgtagtaataaggtgtctccgaagcaaactcaccggcacaagtatcgaccatcttataaacgggcgctagtttgtgcgctaagcggaagtcgcgaacctgatcgattgtttcgtgccaatagtcagctaccgtttgatcggcgaagccattgcgtttagcgacagttagtgtctctatgtcatccgtatgggtacgcaaggcttgttcgatttcaataatgtgtaatagtttatccaggaagaacacgttgatcttggtgagttcggctaattcatcaatcgggtaaccgcggcgaattgcttccgttaagtagaataaccgatcatcctgcgcatgaatgagcttatcgctgagtacatcatcgtcaacactacgcaaagcgggttcttcaacgtggtgcaccccaatttctagtgatcggaccgcctttagtgtggcttcttcaatattgcgcccaatcgccatgacttcgccggtcgccttcatctgagtgcccaaacgacgatcagcatgggtgaacttatcaaacggccagcgaggaatcttgcaaaccacgtagtccaacgctggctcgaattcagcgtaagtggttcccgtcaccggatttttaatttcatccaaatgtaagccgactgcaatcttggcagccatcttagcaattgggtaaccagtcgctttggaggctaacgctgatgagcgactgacccgcggatttacttcaataatatagtaattaaaactattcggatcgagggccaactgaacgttacagcccccctcaatcttcaacgcccgaataatcttcaaagcagcatcccgtaataattgcacttcgcgatctgctaacgtttgaacaggtgcatagacgattgaatcaccggtatgaatccccacggggtcaaaattttccatattgcagacgaccatcgcattatccgcagcatcacgcataacttcaaactcaatttctttgtacccggcaatactttgttcgatcagaacttgggtcactggtgataacgccaacccattttcggtaatgtcgtgtaactgttggggcgtctcggcgatgccaccgccagtcccccccatcgtaaaggctggtcgcacgatgaccggataaccagcttgctcagcgaaagccaacgcttcgtcaaccgtccgcgcaataccagaagctggcacgggttcgcccaattcttccatcagtgccttaaactgttcccggtcttccgcctgatcaattgcgctgagcttcgttcctaacagttcaatgtgcaactcatcgagaatacccgatttagataattccatcgccatattcaagccctgctggccgcctaaagttggcaaaatcgcatccggatgttctttgcggagaatctgtgaaacaaattcaagtgtaattggttccaagtagacctggtccgcaatttctttgtccgtcataatcgttgcggggttagaattgaccaagaccacttcataatcgagttcttttaatgccaggcaagcttgtgtcccagaataatcaaattctgcggcctgaccaataataattggtcctgaaccaattaccataattttatgaatatctgtccgtttaggcattgaattggcttcctttctgggttgcttgattagccgccatcaaatcaataaattcgtcaaaaatatgatcagcatcgtgaggacccggcgctgcgtccggatgatattgcacggaaaaggccgcgtagtcgcgatgccgcaagccttccacggtaccatcattaatctcctcatgggtgattaacaagtcagtctgcgctaatgaatcccgatccaccgcgtaaccatggttttgcgacgtaaaatcaatccgcccagttgcaatctcacgaacgggatggttaaacccacgatgtccgaacttcatcttgaacgtgtccgcaccgtttgctagcgcaaaaagttgatgtccgagacaaattccaaatagcggcacatgtttttccacttctctgatcatctctaaggctcccggaacatctttgggatcaccagggccgttcgtcaacatcacaccatccggattcaaagccatgatttcactcgccgtggtattgtacggcaacaccgtcaagttacattgacgctttgctaattcgcgtaaaatcgaatgcttcaacccaaagtcgacgacgaccacgttggggcctgtcgctgggttgggataggcgttattcgttgagctctgggcaacaacggcccgatttaattccgtgactttgagccggtcaaccgtatctggtaagacgttatcgacgatggtggccttcatcgcgcccttcgttcggatatgtttagtgaccgcccgcgtatcaatatccataatgccaggaatcgcattctgttttagataatcgtccaacgactgagcattacgccaattactggctcgtcgggcaacttcgtgaacaacaacgcccttacaagttggcttgattgactcatggtcatcccgattaatgccgtaatttccaatcaaaggatacgtaaacatcaagatttcgccattataagactggtctgtgatcgactcttgataaccactcatgccggtattaaagactaattcaccaaccgtggccgttgtcgcaccaaaccccgtgccggggtaaatcgtaccatcttcaagtactaagtatcgtttcatgcttgcgtttcctttccatatgccaacttaccgtcaactagtgtcattaagacgttgccataaacgggccaaccgataaacggggaattgtgccccttcgataacatggtggccgcttcgatttcatattgatgatctaaatcaataatggttagatcagccggtgcccccactaccaaccggccggctgtatttaagccaaatagttcagccggacgcgtgctcatcagttcaattaaacgaccgagcgtcagtaaccgggtcttgaccagcgccgtatatagcgtggcaaaggcagtctcaatcccagtaatcccgaaggctgccgtcttcatgctgccctgtttttcggcatcagtatgcggcgcatggtccgtcgcaatcatgtcgatcgtgccatccaacaatcccgcaactaacgctgcgcgatccttggctgaacgcaacggtggattcatctttaacatcgggttatccatcgtaatatcttcatcacaaaggagtaaatgatggggcgatacttcacaagtcacgttgatgccagctgctttcgcattgcgaatcacgcgtaaactttccgctgttgagacgtgacaaacatggtagtgaaccccactcgcttccgccaacatgacatcacgagccacttgggccgcttctgaaacattattgataccaggcaatcctagccgatcagcaacgggccccgcgttcatcacgccatgatgataaagcgaatcatcctcaacgtgtgccgctaatggcaacccaactttagcagcaccttgcatggctgcaaacatggttccggccgtttgaacaccggaaccatcgttactgacggcaaaggccccctcagctttgatgccggcaaagtcaacgagctgttcactagtccgcccagtcgtaatgctggcatattgtgcgacgtgaacatgtgcttcctgctgattacgcgccaccatcgtcgcgacccgctcaggtgtatcgggtaccggatccacattaggcattgctccgaccgttgtgaaaccgccatgcgccgcggctaacgttccggtcgcaatcgtttccttcgctgtttgaccaggatcgcgtaaatggacgtgtacgtcgacaaagcccggactaacaaagtgctgatcggcacaaatgacgtgatccgccggtccaaactgatcgtgcagttgatgcccgatcgccttaattcggccctcggcaatcaggatatccgttgtttgtaactgccctgcttgccacacttgagcattcttaattaatgttgtcatgcgttaaacctccacttgagttgctgaaattaatccttgatgagcgaggacgctcgccaccattgccatccgaatataaacaccattcgtcatctgctgaaaaattcgtgattgcggcgcttcaactaagtcactcgctagctcaacacctcgattaacgggggccggatgcatgataatcgcatgcttgggcattcgtgcggcgcgctcagctgttaaaccatactgttgatggtaggcagacgcatcgaaggtctgattgttcacttgcgataatcgttcgtgttggacacgtaataacatcatgacgtccatcgttgcgactaactggtccatcgtctgatattcgccgtatgcttcaaagtcacggccataccattctttggggccgccaaagtaaacctgggctcctagttgcgtcagtaacgccatattggaacgggccacacgtgaatgggccaagtcacccacaatagctatctttaaaccatcaaaatgaccaaattcttcataaatagttagcatatccaacaacgattgtgacggatgttgcccactaccatcaccagcattgatcaaactcatgtcaaacccggcgtcgagaagtggttgataataacgatcgcgtggatgccgaaccactgccaagttgacgccaatggcttcaatcgttttcaaagtatccagcaagctttcgcccttagtcacggaactagtctttgggtcaaacggaatcacctgtaatcctaatcgtcgttcggccatctcaaaacttgtatgtgtgcgggtgctattctcaaaaaataagttcatcgcaaacgttggctgtgacagttgtaccgttttcccattcttgaaagcttgggccaacttcaagtaggccatcacgtcctgattactaaattgttcaacactaactaggttttgactcgttttcatggctattgccgtctcctttgtatataaaaaaagtctagcttccgcaaaaatgtttgcaaagaggctagactccgattaagtggtcacgcatgaccaaaccgtttcgttcctctctggaaacaattaaatggttttattcaattaaatcattcttctaatttttcaatactaattccatcatgtccgtcgtgttcttcaagggcgacactgacttgttcatccaaggccgttggaatatttttaccaataaaatcaggccggatcggtaattcacgatgtccacgatcgactaagaccgctaacgaaatctttgcgggacgtccatggtccatcaaggcatctagcgcagcccgaactgtccggcctgtaaataagacatcatcgaccaagataacgtgtttgccattgatatcaaccggaatatcagcaccatttagcttcgcttgaccggcaacatcaaccgcatgatgatcatcccgatataacgtgatatctaacgaaccaactggcacgtcaacgccttccaactgtttcaatcgttgcgctaaccgttgggccaaaaaaatcccacgagtcttgataccgataaataccaggttaccaacacccttattctgctcaataatctcataagtgatccgcgtcagcgcgcggcgcatggtcattgcatcaacgacttctcgtgccattagtttgtcagctccatttctgtaatttcaccttaatccacggggtaaaaaaagagtcaccctgttttcctgcgaaaagcgtgggagaccctacatgaccgttccccttgttagcctcacaggactaagttaaaggtgcttgtttaattggactaagtgtaacgaactccaccacaactgtcaaggactaatcaacttaagtcgcgttaattatctgacgactttggtcatttgccctttatgttgacaagcatcattgaggaacctggcgagttcaatagatttccaatcgtgacacgtgatcgtcttattccggcctctaagaataaatgatgagcggtcgcctaatattagtaccattggtcgttgaatccgttgatattagaacttcaattaaagctgggagaccatcaattcactttaatgactgtttcaatcttaacgtgctaatttagcaacaaatggtctatcaaaatatcattatatgcgaaatctaccctttatgagcaacaacaaactcagcaaaagttaagtccacccatcacttgaacaccacctcgactgaaaggcgttgctgacaatactcagcactggaagccggtgaagttcagacgggttgaaactgaagattatctcaacggcaacgttgagggggtgaactttcacttagctaactggaagtctcaacccgagcgaatcccgtttctgtatgtcggcatccaacgccctaaccaggtgaatttacactaaacaaaactttcttcagcagtcctgcgccggctactcctgcgcttaaatgaggataaacctttccaatacttaaattccttaacccataacactggttcgacgcttcatttgtttttaatctatttttcatttaattatagtcaaactgccaaattatcggtatactacttgttaaagataactaattgtagggggacttaccatgcgtttacaaacactattacaaacaccatcaatgcaacatatgcgggtaattgcgggtgaacgcggtctcaaacgcgaaattagtaatatcggaatgatcgagtcacctgacattgctgactaccttgctaatggtcagtttttgattacgaacggctatcccttcgtcaatacaaccaccgacccactaactttgatcaaggcgatgcacaatgccaactgtgctggtctcggatttaaggatcatcgttacgttgaccatttaccaaaaaaagtgattgaattagcgaacgaactcgcttttccaatcattattacgcccggtgatgagttgatttctgaaaccatgcgcaaaatgctgagcatcatcttaaagtcacaaactaatgagctcagtcgcatcgtcaaggcaaaccaaacactagcggatttgttgctcaaagacccaaccaacaccacggtcttgaataaatgtagcgagctaattcatcatcctctcttcttaatggatagtcattttcgggtggtcagtgcttcccaagatttaccgatgacccgcaataccttgactgattttttacgcaatcaaaccgatatcgactatttcaacctcaatacccgcgtcattctcccttaccaagcaaatgacctgaccatcatgccactattttcggcttataaggaaaataaggcctttgtaggcgtcgtcgacttggacccggccaactcaactgatcagatgctgacgcaagtcgtcttaaacaccttgagtttcgtcaatggtcgggtggacatgttaaacgaatccgcattccgcaaccaaagtggtttctacttaaacgtaatggatggcggtatttcaaacgacctcgtgaataagactctgaaagcccgcaatattgatccgagtacgaagttccactgcgccaccattttagtcacgactaatcaccaggccctcttaagtaaccatctcttggaacaggttcagcaactgacactgtggtttattaaagaataccaagcatccgtcattgttttttcattaaagcagcaattggtcttattaatcaatgaccagcaaaatgcccagcactttctgaccgccctcgttcaatttattcagccaaagttggacagacaggcgcgtttgattgctggttacagttattcgactctaccactaaccgaactcgcaacaacctataatgaagcggcagaagccttggcactcagcaaaaacagtacccacgcagtcacgatctatcggcccaagtacgtcaaggaactaatttcactgattccacaaaatgaagcgcgatcgtttgtcgaacgggttttaggtggactcgtcagtggtgtcagtgcgaatgaacaacttaatctactcacgaccctgtatggctatttttattaccatcaaaacattgccgaagtggccggccacctagatattcaccgcaatacggtgatttaccgccttaaaaagatcgaaaaaatgctaacgttgaacttggacgatcctgaacagacccaaacactagaaatggcagtgctactttggcataatcaacaatcacaaaagtgaacgttttcattttcatcttccaaaaaaatatcgttttcacgaacattaatttattcggctacatttgtattcggttttcatctgtgctagaataagtctcattcaaataagtggtaattgcctatataatgtcatgatatggttgacgagtttctacccaaccccgtaaaggttggactataagcaaacgaggtcatcccgtttgccggggtgactttttttataggcaaatcagcttaatcgagagaggaagattgatttgaaggaagtatccgcagcacctaaaattaccaatgttaaggcggccattttagggtttcaacatctgttagctatgtattcgggtgatgtgctcgtgccattattgattggcgcggccttgcatttcagccaagaacaattaacttacctagtctcaatcgacattttcatgtgtgggatcgcaacgttcctacaattaaaacgtacaccactaacaggaatcgggcttcccgtcgtgcttggctgtgccgttcaagccgtcaatccgttgattcaaatcggtaaaacatatgggctggggaccatgtatggctcaatcattggtgctggtatttttatttttctgattgccggcttattttcaaagatcaagaacctctttccaccagtcgttacgggatcgctaatcacaattattggattcacgctgattccggtcgccttccaaaatcttggtggcggcgacaccagtgccaaggatttcggtaacttgcaagcacttggcattggttttctcaccatcgcaattattttattaattagcgtgtttgcacgtggcttcatgaaatccgtttcgattctgattggtattttagttgggactttgattgccggggcaatggggatggtttctttaaaacccgtcgctgaagctagctggttccatttaccgaccctcttttactttgggaccccgcactttgaatggtcatccattttgaccatgatcctcgtctccttaacaacgatggttgaatcgaccggggtcttctttgcccttggcgacattaccggtcgtaaaattgaaggcgacgatttaaaacgtggttaccgggcagaaggaattgccgtcatcctcggtggcttgttcagtaccttcccctattcaacattttctgaaaatgtcggcgtcgttcaattatctggtgtcaagacgcgaaagccaatttacttttccgctgcgttcttagttgtattgggcctactgcctaagattggtgcgctagcgacgattatccccgacccagtacttggtggcgccatggtcgtcatgttcgggatcgttggcattcaagggattcgaatgttagctcaagtcgatttccgcaataacaataatttactcgtggcagccgtttcgattggtcttggtttgggcgtcacggtgcaaaccaatatcttccaattcttacctggtgcacttcaaatcatgttgagcaacggggtggtcgttggtagtgtagccgcagttggccttaacttactcttcaaccgccacgcagccgaaaacacggttgatgatgaatcagtcggtctcaatgaaacagaacaaccttaattatgacgcttaaaagcaacggttcacagtcctaatctggcagtgaaccgctgtttttttgttctgctacttaatagccgctctcattctattgattgctttatactgccattttttgctgaatgtcaaccgtcgtaccggtgaagactttttttaaagtaactttctttcgacttggcataaaacttgcccatgctgccgaagagtcatctaaacctggtccattccaaaaacaagccatcgtgaggcaataaactgattaatcccctgttaccctaaaaatcagtatgttatactagggtccgtcttaaaactacttaagtaagatgcaaattgaggcaatgtagaccgtagccagataaacatgagcgagcttatcataacacgttgcaatcctacgaaagttc

SEQ ID NO: 9 - DNA, 156730 bp, synthetic construct
  source 1..156730: mol_type = other DNA; note = Lactobacillus plantarum PDA6 - Contig 9
ccaccgagggttcaaaggactccaggacaccttggaagcatcatttatttaagttagatacatattatatgtacgaaggcatttcatttacacaagattcttgacactcccctactgttttagtaaataaaacgaccagtactgttcaggttgctgtcaacagtcgggccgttagcgtaccgggtgactgggaagtttactataacgacaaactgactgattcgattgtgtataaagtaccggtttcttatacaacgtattctacggccgttgatacgagtactgtcggtaaatatacaatcacattaacagacgcggccatggcaaccttagctcaactgaatagtagcactgtatttaataataccaatgtcggtgatggtgtggtacttgtcaaagagagcaatgcggtcactatttcacccagtaattatggggctaaagcaagtgttaataacaatgtaacagcagcgtcaattcaaaatgcgcgggataaaggaattaatctattgtatggtcagggcctttacttggtcctaccactccttaatgtcgcacaatccgaaatgacagtggataaccttacagaatatgtcattattccagctggtttcaaagtggcgacgaccggtaatggggacactgttcaggttgcaactgatccggtcggggcgttaacggctgccattgagacgatgatgacaaagaataatgtgacttatcagggattagcggtgacacagttaactgattataatgggcgccaaacgttcaaggttcacctcgaccagacggctgcttacagtaatggtcttttcgagacaatggtgtacacgctcttaccgactatcgcggttcaaagtagtggcgtgactagtggcttaattggcaaccaagtctcaagtcctgattcagcggttatatatgttaccgatgatcctaatgaaaataatggtagttattcgttaaaagatcaaaactatcctaatattgataaggtagctaaagcgctaggagtcgcggatgcggtgactataagtagcagttttactgattacttgtatacctatacactgaaggcagctgaagccgacgatatatatatgttgcaagccccagatggcagttcgttaggtattatcgtagtatccggcaacgtggggacgacttatgttcctagtcgcgaattgcaaacgataacttcttcaggtaacgattattattacttgaatccggactcaataccgcgtacacgaacttacgatagtcctgatcaaaggacctatacgctcacttaccagcgctacgtcacaacgacgactgatactgcggccaagataacgattgcactagcttcaaaagtctatgataacaacgtcacgactgatccaagtcgctatacggtatacttgccgactgaatatacggccccaagcgattggactgctgatagcgcggcgacggctgtggatgggacgacggcgtaccaagtcagtaccgactaccttaacaccactgcaatcgatcaaaacgtgggcacttacgctgtcacgctgaatagcgccgggatggcagccttatccgctgctaatccagatttcttgattgcaggcgatgtgaatgttggtgggactctgacgattactcaacgtccagtgacgattactttgccggatacgattctgtgggccaatggtcaggaacaaaatattacgccggtcattactggtgttgttgcggtgcaaagtttggattacacgttaacgtcagggttaactgatccggacacgacaaccattacggccacgctgacgaatgccgctgctaatagtaattataaattgacgaattcacctagtggtcagttgacggtgggcgccgtaacggttgtctatcagtatgggtaccgcgacaaagcggggacgctacacgtggtaacaacggctaatggaacggcgacgcacgggactgatgttaccgctaaggactatttgagctacaccacgagtgatacgactgctacgcatgccaaaactggttatacgttacagccagaaagtactggctaccaagccgatggtactttagcggacattggtggtcaggtcgtgtacacctatttagcgaacacagaaaagattgcggtcgtttacgtcgatcaagataagaacaacgtgattttatatcaggtccccctcagtgggagctttggcacacacacgaattatacgacggtgcaggacattgcggcgtatgaaaaattaggctacgtgctagcttcggatgaggtcccagcgcagcttgagtttgatcaggatactgaacagacctactacgtatacctgaaacatggcaccatcacggtgacggttgatcagccaggtaacgtggccgttagtgatttgatgaagaccagtcagcgaacgattcattacgtttatgctgataacacacccacggacttagcggatgtgcttcaaacggtcacgtatacgcgcacggcaacggtggatgcggtggatagaacggtcctttcgtacggtaattggacgaccactgtgaatagctatccggccattgagtcgccgaccattactggttacacggcggatcaaacgactatcgcggcggctgtacccgctagcatgggcgagactacggaaacaacggtccgatacagcgttaattctgaaacaatccgggttcaatttgtcgatgggactacggataaccaggtcttaggttatattgatttgaatgggaaatacggtgatgctgccgactatacggtcactgctgacattgcgaagtatgcaaaattaggctatgaaccagttcgctcggatttgcctaatcagctgatttataatcagaatgcccaagtttatacggttatactagcgcatcgtcacatgacggtcagcgttgatcatccgggccaacctggtcaggccatcgatgctgattatccagccggtcctaaatatccggcaggaactggtcgtgattcgttggaacaaacagtgactcggacgattacgtatcaatatgcgtcaggtgaatcagcggctgaaacggttaaccagtcggtcacgttcaatcgcacggcaactttcgacatggcaacgggtaagcagctgacttacggtgactggacagtggcacctggtcagtcagcactattggccgcggtcacgtcaccaacgattacaggttatcaagccagtgttacagaagtcgaagcagcgtcggtcactagtcacgataagccgcacttgattgcaatcacgtacacggccaaatcacagaccgcaaccgttgcgtttgtggatgtaacgagtggtaaaacactacctacgacggtagtaactggtgcttatggcactacgaatgattattcacccgtttcacagattactgcgtatgaaaaactgggctatcgattagtttcgaataatgttccgacgactggcatcatttttgatcaagatgacgtcattaagtcatacacggtcaagctagcgcatcaaatgacgacggtcacgccaactaagcctggtcaaccaggtcaaccaggtcaaccagttgattccgctcatccagaagggcccaagtacccagctggtactgggcttaaagatttaacaactagtgttcagcgagtcattacctatgtttacaatgatggtcaaactgcggcgccaaccgtcacgcaaacggtcagttttgagcgcaaggcgacctttgaccaagtgacaaaggtggtgacgtatatggattggcgtacacctgaatcagcgttgacggaggcatacgcagtcgttgaatcgccaataattgctggctacaccccgaacgcaacccgtgtggctagtgtaactgtcagtgccaaagatactgagtcgcgacaaacggttacttaccaagcaaatctggaaacggcgacggtgacttatgtcgatgccacgacgggccaccgactgggtacaagcgtgacgttaaccggacgattcggtacgcaagcggattatcaaccaacgacaatgattgcgcagtatacccaggcaggctatgtcttgatggggagtgattatccggcaacgggtgttacttttaatcaggcgggcgtcgttcagaagtatacggtgtacttggctcataacaaaatcgtgattacggcaccagatcagctcaccaaaacgatcacgcaaacggttcactatcaggatcaggctgggcacacgcttcaagctgatacgatccgggcgctgacgttcacgcgttctgggatgaaagatgcggtgactggtgtggcaacgtatcgtgattgggcaccgaccgggttgaactttacagccgtgtctgcgccaacgattgcgaaataccatgcgttgacggcgaccactcaggccgtggcaatcacggctgctagtgctgatgatgtccccaaacgctaacatatgcgctggacgtcccaacaccgacgaaaccggtcaaaccgactaagccagccaaaccgactaagccgacaacatcggacgatttaatcaagccaacgacgaaaccaatcacggctgctaaaccaactcaactcactgagccagcaacggttgtgaaggattttcaagccacaactggcaaccagacgccagctaaatcgacaaggacgttggtatcgagtcgcattaaggctgtcaaaacagctccggcatcagcaatcatcaagccgggaagtgaagtaacggagccggctcacaaggctcaagcagatacaacgagtcgattgccacagaccggtgaaacgcggcggtctgaagcagctgctgaaacactagggctcacactagcaacattattgctaggctttggtggtttgaagcgtaagcggcatgaaaagtaatgaatttatttaactgtgcataataaaaaacgcttaacatcctagcattggcaaaaagtcaatggaaatagggtttgttaagtgttttttgttgtgtttaggtatcaatggattgatgttcaaagtagtcgattttagttgccaataactgatcgattgcttccagatgccggatgcgatcccgaatgacttgttggtactgcttgaaagcgactacttttgcttgaccatctagtgctagatgggctggtgtcaatagacttaaatcgagatctaagtcccgaaatattttaatgacttggagtgtttccaagtttttgtgggaatattgacggtaattgtattggtttcgctgaacatcaggcagaatgccaaggtgctcgtaatatcgtaacgcatctttagtcattccagtaatcgtggtgacttccttcgtagtgaagtagtgctgttgttcaggaattttaaacgttaacacgagcgtctccttaatattgagaactgagtcgccataagtcgttggccttagaacgagtgtactgcttagataacggaacttgacgtaggcggtcatcgtagaagtgtccacttgtgtgagtgagttcgggagcagtagctaaccatgcaccaatcggggaatttttacgagagaaactttcacccagtatccgaccagccaaacgactcacccaactaccgccagcaccaaagttagaatctgggacatagccggggtggaaaatgttgattgtcacgttggttgctgttaagcgttcactgagagctaacgttagtagtacgcgcgcagcagtggcctgggctgtgacggtcatggcattgtacttggatgtggccggggcgtcaaagtctggaagactcactttagcatggttaatcacgaatggcagggcaccaaccaatagaatgcgcgcttggtcactgtgctttagcaacggtaacaaggcttgaatggtccaaaaatgggtgaggtaatttaaaactaggttcaaatcataaccatctgccgataaatgtcgctcaggtagcatcacaccaatactattgagtagaatatcgatgtgatccgtcatggctgcaagctgatgagcaaattgttgaacaccagttttggtactcagatcggccaaagccaattggacagcttgattgccagttgcttgactaatatcggcttgagcctgtcgtcctttgtcagcccgactgccaacaataatcacatgatagttttggttggcaaggtcaattgcggtgtgtttaccaacgccagaagtcccaccaataataacagctaattttgattgcatgtcagtcactccttcaattcgatgattatgcacaagtataaactatggggttgacccgatagcaagcattaaattaattatgacgtgcagtagctattggcgatttagaacataatcagcagagttcttctatgctttaaacctatgaatgtgtatttaacataagcatttcacatatatagtgaacgctcgtatactgaatttaacttaataagggagggacgcatcatcaaagcaaagtatttagatcaagattatctgcaaacaattcagccaattgtcgatgctaatcagcgccgcattcaagcgttgaatgtaacccgggaaccaagtgaaattcgtgaacgtcttgcggagataacgggtcaaactatcgatatttcagtcgagattcgcgtgccactgtggacagactatgggcggaatttaaaaatcggcaaacgtgtttttattaatgataatgttcagatcactgatttaggcgggattgaattagcggatgacgtgctgattggtccgggtgcgatgttactatccgttaatcacccgttagatcctgctaagcggcatgcggttgaagttcagccaattcacattgaacgaaatgcctggattggtgctggtgccaaggtattagctggcgtcacagttggtgaaaatgctgttgtgggtgccggcgcagttgtgacaaaatcagtgccagcaaatacggtggtggccggcgtccctgctaaagtgattaaaacaattgagcaagtagattaacggaggttttataaagatgagtattaaaggtaaagtggttgttattacgggtgcgtccagcggtattggtgccgccacggccaagttgttagcggctaaaggcgctaaagttgtattgggggcgcgtcgagaagagcggttacaggccttgagtcaagcgattggtgacaacgcggtctatcaagtaactgatgtaacagatcggcaacaagttcgcgctttgattgacttggccgtttccaagtttgggcgtgtcgatgtgctatataataatgccggtacgatgccccagggtaatctgagtgaccgtgaatacgataagtggcagatgatgttgaacgtgaatattatgggggttttgaatggaattggtgaagtattgccaatcatgcaaaagcaacatgatggtttgattatcgcaacggattcagttgccggacacgttgtttatcccgcatcagcggtgtataacgggactaagtatgcggtccgggccattatggaaggcttgcgacaggaagaaaaggaacacggaattcgttcaaccatcgtgtcgccaggtgcagttcggacggagttggtcaatacaatcggcaatacgcaaattcaggccggtatcagtgagctgatgaatgcggacgatcgtcaaggattggctttaaatccggaagatattgctaacgcggtattatttgcgatcgatcagcctaaacacgtcgccattagtgaagtgttagtacggccagcacaacaggaagtttaatcattaaatcaagtgatttaaatagtcgcggcttatctgtaagataggtcgcgactattttgataggtgctactgattagataagtctacatgtggagtggataataacgttaaatacaacgacatttttagacaagtgtcgctatcgtgaatagtatggatactttgttgctgtctttgcgctgtgatcatcgttaagatagaaggcaacgaaagcctcgaattaggtgtgtcacaagtattgaatattgaggattaattaaaatagtgtagatgagcggagatggttattgatgaaagtgtttataacaggtggtacgggatttgtaggtagtgcggttgtacaagaattagtcgctaatggttttgaggtcgtcggactagctcgttctgagacgagcgctcaaaaactcattagttggggagctcagcctgtacgcggaagtttgactagtttgtcaacgttggcgacggctgctgctcaggcagatgccattattcatttgggctttaacaatgattttcggcatttttttcaggctggtgcaatggatcggcgtgccattgaaactatggggcgtgccattagtgggactaataagccgttggtcgttacgtatgggacgacgggtattagaaagcatgtcgagacggagcatgaagtcgcggatactgggctactcaaatggctcacaccgagaaaatctgagatcgtcgcacgtcagttaatggctcaaaacatcaatgcgtttgtcgtacgcttatcaccggctgttcatggtgcgggtgataagggctttactagaacagtgattgagcgtgctaaaaaaagccaccgtgctgagtactttggcttaggaacacatgcttggagtgctgttcatcggttagatgcggcgcacttgttttatttagtcacgatgtatggccttgagcatccaacaactaacgagcgtgttttcaacgcagttgccgaggaatcgatcacaaccgcggccattgcgcgtacgattagtcgtaagttaaatgttccattaaaggctaagtataatccactgagttttggcgacacagcgatgctttacctaatcaattgtccgacctccagtcagcttacacaacaaatattaggttgggttccagtacaaccagatttattaactgatattagtagttcacggtattaagtgggttactaaaaatattgtccaaggtagccgtatccgtgaatatattataaggcgcattgcccacggttatccataaggtgagtcccttgatacggccaacagctagaaaccggactagtcgttgatcatcgtcaacagtatctttacacagatggattagataattcaggaatgcatcgcgaaaggcgtcatcgttaaattgatgacgcaatgtttcttgaaaacgcgcattgccgaatgagttgagcgtttcaaaaggatgtgtgaagatctggtcaatagttagcttcgattgctgccgcttttgttcaaatagggcttccaataaatcgtactgatcttgaaagtgcttgtaaaaagttgaccgatggactaacgctgcatccgaaatatcttgaacggtgatttttcgaaagggcttgtcactcagcaggttttcatatgccagtagaatcgtggcctgcatccgttgatttctttgattagccattacgaatacctcctcgaaatttaatagaatacgattagtataacctgtccggtgtgccgatacaaagatgtggtgtaagcatttgaaattcagagcgcttataagcatgtgccctgcggcggtatagtcaagggactagaattggtaagccaaccaaatattttaatgattaatcgtaaaaaaacgagtgcaatagttggtatgttcatgcatacgacacgattgcactcgttttaaggtttatttatctccgcactaacaggtaaataaaatatggcgctccaatcaatgcgacgagcacgccggctggcagttcagtggtcgtggtgattagttttcctaaggtatcggcagctagtaataacgtactccctaacagaccagctaacggcagctgatagcgttgtcgggaccccacgattcgtcgtgccaggttgggggtaatcaggccaatgaaactgataccgccactaatggcgacactaacgccggctaacatggcggccatgctaatcaatcccaattgttggcgtttcaagttgattcccaatgtttgggcagtggtcgtaccgagtgtaaaggcgtcgagaacgggtaattgaatgaatagaataccactaccgactgcgagctatggaagcgcccagccgatataagaccaatcagtgccccacaaactaccggccaaccaattcatgacaaattgatagttatcaggtgataattttaatgtcatcaacaccattaaggctgaaaaacagccggacaaggcgacgccgaccagtaacaggcgcttagacgagatccctcgttgacgctgattcgctaataaaaaaatcagggccgtacttaaccacgccccagctaacgcaacgataggtaaactcagcgttaacgaagcgttggtgcctgcaccaataatgagtaacataacggctagtccagcgccgttattaattccgagtagactagggtcggccattggattgttggtgaccgtttgtaagacgttaccggataatgccagggcccagccaaccatgatagcgagcacgatccgtggtaagcgaaagttgactaagactagcatgtcggtcgcattaccgcgaccagttaaaattcccagcagagcgggccagctgatggtcattgtacccgtactaaggttgagaatcgctagtccgagcatgctagcagttaagagcagtgaccaaataattaagcgacgattagggctcatgctttcatcggctcctttcgtgcaaggtagatgaagcacggtaccccgattaaggagataatgatgccaaagggcgtttcatgtggcggattaactagccgtgcaatcaaatccgcaccgaccgtcagtgttgcaccaaggatcaacgttaatggcatgctattgcggtaattagcgcccactaaccaacgcgccatgtggggaatcatcaggccaacaaaagtaatcgtgccaactaatgccactgagatcccggataaaatgacggcacagatgagagctaggcctcgcagtaatgggagacttttccctaaactctgtgcattgtcgtcagtaagataggctaagtttagttgcggtgcgagtagtagggtcagtagcaatcccaagactaatcctggaccgagaaactttaattgtgtccagctgacggcacccaggccaccgaaataccagaacgcgaggtcctgtttgagctgcaacacaagggccagcccttcgctcagagctgttaataggctactgattgcaatcccagcgagtaccagaatcgtgggatcgagttgaacatggcgggcggtgctgatactgaaaatcagtccggcactggctgccgcaccaataatggcccaaccagtcgtttgtaaagttgataactttggaaaaaaggctaaacacagcgttagcattaagcccgctcccgcgttaatccccagtaagcctgaatccgctaacgggttacgcgtcactgcttgcattagggcgccgctaccagcaagagctgccccaatcaacgccgctccaaggacgcggggcacacgaatgtgccggataatttgttgatcaagattgccagtgtgtgtggtcgtcagggcgtgccagacggtggccgtacgcatctggtcagcgccaaatcgcaaactgagccccatgacgagaatgagtacgccggtactaagtgccagccacccccaatatctggacgttgacttcatgcgggggccacttcctgacagccgttataggtcaaaatcagtggggtaccgtggtagtcaacgagggtggcatcaatattgaaaattgtttttaaattagcggccgtcatgacggtggacacgggaccgtgggccaaaacgtgaccgtccttgagcgcgattaattggtcagagatgcgagccgcgtggttcaagtcgtgtaatgccataatgatagttcggtgggcctgttcgttgagctttttgacgagttgcatcacttctaattggtgagtcaaatctaagtaggtggtgggttcatccagaataatcgtgtcagtatcttgagcaacggccatggcgatccatgcccgttgacgttgtccgccagaaagggtgcttaggggccgttggcgtaaatcttggaggctggcctgagtgagcgcccattcgattttttgatggtcagttgtggtgagcccacttaacggccgccgataaggtaagcggccaaaactcaccagttcttctacggtgagatcgttagccgtttggttcgtctgtggtaagactgcaatctttttcgcaaaagttttgcttttgatttgttgaatgttttgatgatccagtagaataacgccggttgttggtggcaataggtgggcgatggcacgaatgagggtcgatttaccgctaccattcgggccaatcagcgtagtgatctgaccatgcggaatcgtaattgatagctgatcgacgataaccttgtcgccatagccaatactaatattttgggcttcaatggtattcacaaataggattcctttcttaaagttaagcgttcaaggaggttcgcttaataagttaactaattttgtttagttgtgcacaatcttattttgctagcttgtttgttgggaaatgcgattaaaacaactgctaactaataattagtgttcaattgatagtcttatcttaaatgtttttattgacaattgatagtgttttcactaataattttggtagcgcttgaaaggtggagacagttgtgacaaaacggtggcaaattgtaaaattgggattagtattggggttaacgggaagcctactattaggtgcgtgcggtgcgaagcagccgacaagcacgacagttacacgaaccgattatttgaagcataaggtcaaggtgccgaagcatccgaaacgggttgtggcgagttatttggaagatgatttagtggctttaggcattaaaccggtcgtgcagtggtcggtcaaaaatggtagtggtacgcaggcttatttgaaaaagcagttgaaaggggtgccgctaattgactattcgttaccatatgaagcggtgaccaaggccaaaccggacttgattctgatggggacgagtagtgcggtcgccaatggcaagtatgcgcaatataataaaatcgccccgacctacgtggtcaaaaatgggactacggtaacgtggcgccaaactttccttgatgtggctaaggtggttaatcgccaggctaaggccaaaaaagtccttgctaagtatgacgagcaggtccaaacgacgcgacaagcgttgaaaaagtctggtcagcataaagtggcggtgttgtgggtcaccaataataccgcctacatggtcaatgacaattcagccagtggggccttactgtatcaagatttacaattgggtgaaccaagtttagttaaacaagtgtctaagtcggccacggcggattggtcggcggtctcgttagaaaagctagctaagttagatgcggatgatattttcttagtgaatagtcaaaagagtgcgtcgctatttaaggacccgctgtggaaaaatatcaaggccgtgaaaaacaaccatctgtaccagtatggtgacagtagcagttggcagtattcgggaccaattgcttattcacaaatgattgatatggtgaagacggacttgttgaaataatagttagtcaatcattataacgaaaaataataggattgagataaaaatttaaaacgcgtaaattactcacagtaaaataagtaatttacgcgttttattgtctatagacagcggtaatcatcagcccaacgcgtgttgataggcggggactaataaatcatcgacaagtagatgaagggtggcatcagtaatcggttcattagcaaaagcacggtagcgaagccagtcgaatggcatcagttgtaagtcgcacgataaagttcccgtacgcagttccccacgttgctgtgcacgctgacacacgcgttcaatcgcatgggcatcaatctttttcacagcattgagcaagtccttaacttctggatttgcttgttgatctaggtggtgaaaccaagtgataaccaaagcttgattgaatgtattaatactgacagtgaagcgcttgagtacttggaataaatcttcagaaagtgtctgaccggtcaagttcacttcgtctagttgaccatggttttccgtaatgatttggtcctggatagccgcaattgcaagctctagtggtgaacgccagcgtcggtaaatgacaggcttactggtgccggcctgttccgcgacgttagcgaacgtcaattgttcaagaccatcttgatttaagatgtcacgggcggcttgatagatggcgttttcgagttcagcgccacgacgacgtgttttagtcatgtaatccctctttttaaataagatactttaagtttcttattgactttttctttatatagcgtattataccagttatgcaaataagacacttttagtttcttaattaggaggataatatgcaagcaaaagcaaaaatttcaaaagcaactatgacgattgcctgggtcgtagtgtttggtgcgatggcaccattattagattcaaccatgataaacattgccattaacaacttagtgactagttttcatagtagcgtgacgacggtccagtgggcagttacaggttatttactggcaacgggggtcgcggtgccattttccagttggttactcaatcgatttgatggtaaagcagtctttgtggctggtgagattttgtttggtcttggctcgatatttgcagccgtagcaccgaatattcaactattgattatcgctcggttagttcaaggttttgcgggtggcttgattatgccactcttgacgaccttgcttgtgcaaactgcgggtgcagcagtgatgggccagatgatggcaacagttgggctacccatgattttaggaccattaatcggaccggtcattggcggaatcattatcaaatttgcatcgtggcattggattttttggatcaatgtcccagtagtcttgatttcaatcgctttgattttgtggaagatgccgaattatccggcacaaaatcgaacagcgaaaatggactttattggtatcttgctactaattgtgtcctcaagtgctatcatttatagtttggttaatgccgcgcatactgaccgttttaataacgcgacaagtattgagatgttaattctaggggcgatagcgttgattagttatgtcgtatgggccgcttggcaaaaagaacgggcggtagtgccactgcacttatttaagtttgcatcatttgatggtgctggcttaggattgtttatcgctgggacggtattgaacggcgcaatgttgttactaccactctattttcaaaacgttcggggaatgagcgtgattaacgccgctctagcgctattacctcagggagcgggaatgctagtttcgcggacgttaacgggaaggctaacagatcaaataggcgctaagtacgtggttctgggaagtgtcgtcatcacgtttgtcggtaccttaccgttttattggtttggtcaacagacgtcttactggattttggcacttattttatttgtgcggggaattggtgctggtggtattttaatgccgttaatggccgatgcttatacaggaatgcaacctggacaagtgccagctgcaacaattgggaccagaattatccaaaatattggaagtgcgtttggatccgctttgattacgacgattgtaacggcgtattccacacaccaagtgaatgtgtttgaacgacacctaaaagcaggaacgtatcacgtcgacgcagctcacttacaagtctttacaacaagccatttgcaagcaattcgcttagcagcgtttcaacaaggctttctagtgattgcaattgccgcaatagttattattttgccaaccttattgctgactaacaaattgaaggcggcgaagtaacaagctaggagaaaaaataattaaatctgcttgacttatagtcggctctaacaactattattagtctcgttgacagatgtttttaactttaattcatcgaaaaggggataacaattatgaagacaattcaaattggcgctagtcagctcaaagcgtctgcggttgcgctgggtattatgcggatggttcgtttagataccgatgcggcagcgaacgtcttagagatcgttcatgaccggggcgttaactttattgattcagcggatatttatggtaacggtgattcggaacggattttcgggcaggcattaaaacaatcgagtttaaagcgggaagacttttttattcaatccaaaggtggcattgtgcttgatcctgagaagagttctggtgaactagtcttcgggcaacgctatgacttttctaagcagcatttgattgcaacggtcgataagatcttgcaacggatgcagctggactacctagattcgtttctattacaccggcccgatccgctgatggatcccgccgaagtcgctgcggcgtttgatgaattgcaagctgctggtaaggtgcgccacttcggtgtttccaactttaacccgatgcaagtcgagatgctacaagcggcaatcagtcagaaattgatgatcaaccaattgcaatttggtgtcatgcacaccggcccaattcagtttgggttgcacacgaatatgcaggatacggccagcctcaatcatgatggcgaaattatcgaatattcacggctacaccacatgacgatccaagcttggtcaccctatcaatacggcatgtttgctgggacctttattgataatccgaagtttccagaattgaatgcgaaattacaggaattagctgatcaatatcatgtgactaaaaatgcgattgcgacggcttggattttacgtcacccggccaatatgcaggtcattttaggttcaatgaatccgcaacaccttgatgagagcattgcggggaccgatgtgacgttgacacgccaggaatggtatgacgtttactttgcagcgggcaatgatttaccttaatttgaatagtccttgtgatgattaattaatcataataggtttaggttctttcgaaacggttactagtctcgaaagaacttttttgtgtgatgcaattgtggttgttataacttggtgtattgatcaattgctgaataaagtcagaattgactttattggtagttaagcggtattaatcataaaattgagtaatgatagattataaggaggaacgattatttgaacaaggcaagattagaggcgtttacagatgcgattatcgcgattgttttaacgttattagtattagacttaccgcggcctcaaactccttcagtgcgggcactctttgcggaatggcaaagtatttatgtttatatcattacatttacactattgatttcaatttggcttaatcatcacgatttattcgtgcaggtcaaaaaaatcgatcgggttgttttttgggcgaatagtttctggttgctatgtcagtcttttattccattcatggcctcatggattactaaatttccgcattcaaaatggcccgcagtattttatattcttacgggttttgtttggatgttggcttatcagttactagtagccgccgttagaagattaaatccacacattcatcgtatgagtagtccggcattaagtgttgtttttggtggctttttagtggttctaacagtcgcgttaattaatcccgatgtgggcttgttcctaatccccgttcacgcatttgctagtgttattttggcgactaaacgtaagtggcatttacgcaagtatttttaatataaagatgaaattaaaaagtaggctcatatctggtttaggctagtatcgcaatgataacgaacgacaacgcccgcaaggttgaatactgagtccaatcttgcgggcgttgccggttagtatttagttggtgttagtaggagtatgcttatggtttggtgacgattcctaggtcaatcatagattgggcggttgcaataatcgattccgcagcgggacggggatgccaatccaacaatgtttgggctttatgattgctcgtttccgcgtaggtgccaactagtgaggcgaccattcgcaattctggtcgggccttagcggctagcttaactgctgcattggggatggttttggttggtagctgactggcaaaagctggaaaggcctgtcttaagacatttgcaacgtcaagcatggatagcgtctcacccgttgtggctagaaaacgttcgccgttagcttgcggtgcggtcatggcaagcaagtgcagactagccacgtcacgaacatcaacataaccggaatcaacgtttggaacggctttaacttggccttctaagaattgttggatttgaatattggaatgtgaatatttggcggacaacaccggacccatgacggcaacgggattgaccgttgttaattctaacccgcggccctcatggttaataaagtcccaagctgctaattcagcacgtgtcttggattcttgataaggatggatcgctttccagttgagatcagaccagtcagcttcagtgtagggggtcgtacgatttttgtgaccagcaaagatggccccgtacgcagacgttaacacgactcgtttaacgcccgcatcacgactagcagttagaacccgccgaacaccgtcaacggctggtcggatcatttcagctttgtttttgaagttgagctttggggttggggaagcgacgtcgatcgcataagtggctccggccatcgcttccgaccagtgttcatcatgcgccaggtcggccacaacaatttcgagagctgataagttggtgataccaccattggtcagcatttctttaataacgggtgctttggctaatgagcgcaccgttgtgcggacggcgtagccttgttgtaataattgacgaatgatatgaatggcgataaaaccgctaccaccagtgacgacgactaattgtttttgcatgggactacctccaaatgaatttatgaattgctgttacacttgtaacgtctgtgccagtatcttacaatggggtcacgacgaatacaaggtaatcacgagcatctgtgacagaatggaggaattgttatggcagcgaccaatcacgcgcaagcaatcaaaaaggattcacaaacttatttaaccacggccttattacaattattaaggactcatgatttagatacgattacggtgacgcaagttgtcaaacgagctggggtcagccggatggccttttaccgtaactttacgacactcgaagatcttttgagcacgtatttcgccccggcgattgcagcgcggtttcaggacgtcttgcagcatgtaccggccaatcagaagttattagcgatgggtcaatttttcagtgattttgcgccgacgttacgactggctgagcaacgtggttttgaaaatattattcaacaactttttaacgctaatatgactaattattaccaagcaacgatgactaatggaatgctcacggcggtgcagcttaagtattggacaagattcatgagtgccggggtatacgcaatttggcgcgaatggctacttggcggacagttggagtccttaacaacgattcatgaaatactagcaactttgcagacggcaacgatgcaggcgctgactcaggctcaaaaatgagcagtggaagaatgatcctaaattagcggtgtgaggaggtcgaaacgccgattttagcgtgttgattgggtacttatgagcaattgtaaaagccacctagccatgcaccggcagagctcggtgcggttaggtggcttttttaatcaaatgagctgagattaagcatcttgggccgtggcagcaatgtcaacttcacggatattgacattttgcggcatgtcatacatgaacttgaccgtggcagctacgtgcttggggtccaaagtcaggccacccatggaagctttccatgcttcgtaatcggacagtgccgacttgctagtaacgtgggttaacagctcagtttcggctgcaccgggggctaccagcatgacgcgcacgttcttcggcgcattttcttcacggagtgtctcggatagcccgtggacgccaaacttggatgcaacgtaagcggcgtgattgacgaacgttttcttgccagctaacgatgacatattgagaatcgttccatgttcccggtcacgcatgtcatttaggacaatttgagtgccgtttaaaacacccatcacgttcgtattaagcatggtttgccactcttgtgggtcctgattttgaacatttcctagtaacattaatcccgcattattaactagtaagtcggtcttgccatacttggcttcggccttgcgaacggcagtttcgaattggtgatagttggtcacatcgactgtgtcgatcatggcattttcaaagttcgcagataaggcggctaactttgcttggcgacgccctaatagtaacagtgggtagttgtcagcggcgaataacttggcaatctcggcaccaaagccagaactggctccagtaatgacgactaatggtttcattttgtaattcctccgtaattttggataatggttttcgtttgaattttcaacgatttacagtatacttggctagattaaacgcgacaagtacgcacttttaggtaaccaccaattgagagcagggagttaataatgttaaaagaacgggtaactgcgcaaccacgctaccgaaatgaatttgatgccacgatgcagttgattcgtggtaagtggaaaatcatgattttgtttgaactggccgaggttaaagtcagccgttttgctgacttgcaacaccatattcaagcggtatcgcataaaacactggcgagtcaattgaaggaattggaacaagatgagttgatcgaacggcatgattttaagaccgctcagccgcatgtcgaataccggttgaccgctaaggggcagagcttgattcccatcctagatgcgatttgtacctggggtgatcaacatgttgatccagctttgattgaacgttcactgtgtgacgaataggctagtctaaacgggagcgtgggctttgtacggcgccatgggaaaagtacgttgtcagtcaaaagcaactagcggcgctgttttgatgaccattatttgttattcaattaactcgtgctgtttgaaagctgacagccagctatacgggctgttttataagatgaaccaactattgccgccgggatgggggtgggtcgttatcatagacgagtacaacgcggaatcgatgatttgaattaatcgattgccgttacggtgacagcgacgacatcgccaatgcttttgtggagttttgcacgaatatccttacgaatacctaagatataacaaatactaccatcaaggtttttaacacccatattaacgatagaaccgttgtaagggacctcatcgaaagtggcatggactttgacgcgccccttaccgaaaaggtcgcgaatatcgaagggacaggccacgtaagccccacctttgccaattgttgcggcttgaatcggtgcgtcaaattgataagtcttcattaattatatgacctccgcctaagcgtaattatggaacggcttcatttttataatcagatttccatattatcatagcaaattagcaattgttggtgaactaagtggtcactcacaactaattataattaaggtgaaccgctatttgcgtgaaatattaaccgggtatatcgttggtatcaaaaatatttatcgaaaagtacaattattatactaaatccccttgcgagcggggcaatcaaccgcttataattaaactgctttaagtaaattaaaaaagggtgttcacataaattttaaatcacaaaatccaattgatgcaagtcagtcggaaagattcaagctttataagtcggggaaactttggctggttgctggattaactttcttctcatttttaggaggttccgttcttaacaatacaaacgtgcacgctgatgctacaaatgcaacgacaacatcgtcttcagctgcaagcacggcctctagtgcaagtgttgcaacgagctctgctgctagcgatgcgacgactaaagcgacctcagtttcgtcaagtgctgcgactcaagtaacgagtgcggcaacaactaagacgaccagtcaagcagcgacggcatcgtcgagtgcggccactagccaatcgaccagtacagcatctagctcgactagtcaagcaactaagacggcttcgagtgcagccactagtacttctgcaacggctacaagccaagcaaccagtgtcgcttctagtacggcaaccactactcaagtaagtcataccgcaagcagtactgctgccagtgctgcttcaagtactgcaacggtcaaggctgttaaggccgcttcaagtacggtaagtagtgcggcgacgaccgctactaaagccacagctaaagttgctgccgttgcttataccgcggcaacgacgtcttcaacggatgtctggacgattggggatacgactcggccacgcgttgatgttgttgacgtggcgtcatatcaaagtaccatgacgcaatctgatttcaataagttaaaggctgcgggtgttaagacggtcatcgttaagtcgactgaaggcactgattacacgaacccagctgcactgaactaagcaaagatggctaacaaagctggcttgaacgttgatttctaccactatgcaacgtttagcacggctgatgcagctaaatctgaagcgactaacatggctggtttcttagttaagaacaatgtttcaaccaaagttctcttgttcgctgacatggaagattcatcttcatactcagttaacgcaacggcgaacttgaacgcgttctggtcaacgttagattcctttggttacaagaatcacggcgtttatacgtccaactcatacttatatcgggatgctgttgttaagacagttggtcaatcacgtgtatggcgggcccaatacccatacacgccttctgctaataacctttggaacaccaatgatggtgcatggcaattctccgatacggcactcttaccatctggttcagattataccggttacattgatgtcagcatcgattacaatggtttaactgaagatagtgccgggaccaatacattcgtaacgacaactagtagcaatgatacgacgactagtgaagtaacgactgacactagtgctacgaccaatacgtcaactagttcaacgactaagaaggcctctggttggtatacctttaccaagaacacagccatcaagagcgctgccagtgacagtgctaaaacagttggaacttatagcaagggtaaccgcgtttactataatgctgaaattacaactaatggtgaaacttggttacgttacttaagttacagtggtagcgaacattttgttaagattgccgcagctaaaacgaccacgactaagccagccgcaagcactagcaagacggttaccaagaatgaaactggcacttacaagtttactaaaacgacagctatcaagggttcagttagtgactcagctaagactttagggacttactacaaaggtgacacggtttattacaatgccaaggttactaagaatggtgaaacttggctccgttacctgagttacagtggtgcgcaacactacgttaagatcagtggtgcagctacgtcaacgactaccaccaagccagccactagttctagcaagacggtcactaaggctgaaactgggacttacaagtttactggcaccacggccatcaagggttcagttaatgattcagccaagactttagggacttactacaagggtgatacggtttattacaacgccaaagtcactaagaacggccaaacttggcttcgttacctgagttacagtggtgcgcaacactacgttaagattagtggtgcaaccacaacaacgacgacgtcaagcaagtcaacggctacggctagtgctaagacagttgcgcaaaccgggacttacaagtttgctaagacgactgccatcaagtcttcagcaagtgatgccgcttcaactgttgggacttactacaaaggcaatacggtcaactacaacgccaaagtaacgactaacggtcaaacttggttacgttacacgagttacagtggtgcgcaacactacgttaaggtcagtggcggtgccgcaacgaccacgtcatcttcagcaagtaagacgacggcggctgctggtacgtacacgtttaagaccacaacgaatattcggaccgctgctagtctaaatgcctcagttgttggccaatactccgcgggcgaatccgtttattatattggaacggtttctgcggatggctatcaatggctgaagtacttatctaactctggtgcttaccattacgttgctaagattggctaacaattagttaccaattactagtgcaataacaaaacaggctttgagatcacgtcaagcgacgcgatttcaaagcctgttttgttgtgtgattgagttagtggcctgttcatcttattttgacaaaagtcggcatagacgcacttgacaaaaagtttatactgattcgaacttctttcagtgggcctaagctggtagcttttgacactaaaagtttgaaacatgcttcgtattcaagcacgtgtaatcggtgttgtagtgaggggctaatgtttataaaacaactaagccgccagcaccgttgtcgtagtcaggtttctgagcagtgacaaccagtttttcgttaacaaaggccattaagcccaggctgcttaactcgcgaccgtagccggagcccttgacgccaccaaatggtagttctggtaaggaactgaggaaggtgttaacgaagaccatcccagtttcaatttgttgggcaaccgctttgccatgcgccgcagttccggcgaagacgatgccacctaagcccagttcagagttgttggctaaatcgatagctgcttgttcagaatcaactttgaagacttgggcaactggaccgaacatttcttcgtaaaagagggggttgtcttgatcgatgtccgttaagatggttggttggaagaattggccaggtaagtcgattggttcgttgccataagcaacggttgcaccaccggcaatggcccggtcaacttggtcttgtagcttttccttagcgcgtttggaattcatcggtgccagggtagtttgtgggtccataggatcgccagggactaatttggcaaaacgttccttcaactttgctaagaaatcatcgtacacatccgcagcgacaataaagcgttttgatgaggtgcagacttgcccagcgttgtataaccggacccgccatgctaagttgactgcttcgtcaatatcagcatccgctaagacgacgaaagcgtccgaaccacctaattccatagaactcttcttcaagtttgcaccggccgctttggcaaccgcttgtccaccacgcttagaaccagtcagtgcgacgccctggatgcgggggtcggcaataatatcgttaacttgatcatagtttaagaagaggtttgttagactaccagcgggagcaccagcttcttcgacaatcttggcgaaggccgcagccgatcccggtgtattagaggcgtgctttaaaatcattggattaccgaccatgtagttcggtgcgaagacccgcatgatttggtagtatgggaagttccaaggttcgaccaacatcaggacaccggttgcttgtttttcaatttcggcatcgcccgttgcttgagtgctgattggggtcggtgccaataattcagcaccgtgatcagcatagtaatcagcaatcatggcgcatagttcgacttcaccttgagattcactcagtaatttacccatgtcgattgttgcaattttagctaattcatctttatgttcacgtaacagtgcggcaatcttatggaggctggctgcacgggaactaacgggttcatgacgccattggtgataaagggcgtcgccggtagttaaggcctgttcgatttggtcagtggttgcgttgtcgtaagttttaacaacttcattggtatatggattaattgtttgataagccatagtaaactcctcctataaatgttcaggtgttgtaaacggttaatctgcgattgtatgggactggtaaccgccttcactattgtacgctaccacaaaagtacggacaaagtcagctaatttgacttgaccagcgctagtgtcagaagcatttaggtctgcataaagtccttcaggttcgcgctgataacgactagtttggactaatgaagcggcaattttaacgggaacaccgtggttcgtcaagttagcttgatattgttcatctgagatttgtacccattgtagatcgggcatgtttaaggcgtcgcgcagatcagcaacgaattggtcaccggtgaacgtatcactgaaggcatacttgacggtgataccggctggcgtgtgatcaattaggggataaacgacactggcaatgtcctcgggcgcaacgtatttttgtgctgaagcagcaggcgtgctggaataaattttatgttcagccttgattgttgctaagttaccgaacaagttagcataaaatccggttggacggacaaaagccaggttaaccccgtcaagttgtcgtaattcatgttcaattaagttgtaagcatgcagcgagccagccacttcatcggcatctgcgccgatgctactgaggttgacgacgttggtgacgccggcattttcaattgcctgtttccaaattttagcctgagccacggccccttcgaagggatcatcaccgataccaccagaaagcatgaggtaaaccacatctttgccagtaaaagtggtggataagaaatcaacatcagtcattgtaccgatagcggcatgggcgccgacagcttcaattgaagcttggcgcttaggactagttgagataacggtgacgtcatgaccggcttggacgagcttaggaacaacgatccgattaatatttcctaatgaacctaacattgcaattttcataattatagaacctctttaaaatttgatttttatttttaaaagatagatttatctttaaacgattgctagtttaaaagataaatctatctttgtcaagcttgaaaaagatatttttatcttttatactgaagacatgaagaaaaaagatatgaacaaacaagttaagattcaagatgcggttgcggcaatcattctcgctgagggtccagccggggtttcaacgactaaggtggctaagcgcgtcggcattgcacaatccaatgtttatctctactttaagaataaacaggctctgatcgatagtgtctatgcgcgtgagacgaaccgaattcttagtactaccgacttagaccgattaagtgcttcaacaatcgatgtgacgactcggattcgattatatgtacagcaggtgtatgactattcgttagccaatccagatagcttgacgatcattcaacagatcaaggcattgaatggacaggggatgacgatttcggcggcggatgccgatccgaataatattgtcgctaacttattaacggcggctatcgatgctaaggtgattaagcagttaccggttagtttgcatatgggggtcgtgttttcaactattcatacgcatacgacgaatatcagtaaggaacggtatgctcaggaccaatatacatttgatgatattttccaaatgatttgggacgcgatgaaacaagattaggaggtttaatgacaaaagacgcgacttaattgataggcacgagtggatatcaattaggtcgcgtctttttttgcgttcatgtagcgactagtcgtcttgaaatgacggtttagtatcttaaaggctggttgaataattcggttcattgtgtattcttttcaagtgtcggtgagtgttttaaactgtaggtaccagtttgagcaaccaatatgtaagggggactttgatggtacagtgggcaaaacgattcagtgaaacgaaggaaccggttgtattgattagtcataatcaaaataggtgtgccggcaaaatagtggcgttaatgatgagtaggctggagttgtggggtagctgatgaagattatttttgtgcaaacgctgttcctattcttgtttgttaaggtgcttttgcgtgattggcgggtacttagtatttgggatatcagttatgcggtggtcagtagcctagtgagcggctggattttttcagtaatcgggcaatatgcagcattgccattattgggactggtggtgctgtttacttggtggcatacacatagcttcagtgagtcattatttgttagcctacaggtgattatctggtcaattgtcgtcgatcatatcagttcacttttaacgtatatgttgaaattagatgacgggtatcttttgatttttatgggattacagctggttggtttaatcacattgaatctgattttaatgaatacgcatatccagacgacgttcaatcgtcccagactgaaccgggttacggccttgctgctactcgccatctatttatacattattgtcagcgagggactcgacagtgaattgagaatggtcgtcagtaacttagttgtgttgttggtcgttatggggctcgcgattgccatctatgatgagtatcgggttacgattcgggccaagtaccaggttcaacaacaacgcctgcaaatcaaaaatgatacacggtacatgcatgaaatcgaaacgcattataatgaattgcgccggtttcgtcatgattatcagaatataatgttgtcgattaatgagtatttgaaaacggatgatttggcaggcttacagcaatattatcaacaaaatattgccccagtgaccaagcgcgtttcggatgagcagtataatctcgaagatttaagtcgtgttcaggtcaaatcggtcaagagtattctatttagcaaactcagctatgcgcaatcacagggagttaaagttcaatttgacttgaagcaagtgcttaatggggtaacgacgaatgaattagacttggcaattgcgctaggtattattttagataacgcgattgaagccacggccggtcactatcatggtgagctgatgagcgccatttttgttacggcccacagtacggtgttcttagttcaaaataacgtttttgattccttgccacctttatggcagctaaaggaagcggggtattcgactaagggacaagagcggggcttaggcttgagtcagctcagcgcaattgttaatcgaaatgaaaatatgatattggaaacgcggttattggcctcagcctttgttcagcgtttaacggtaaagcgggaatgataaaatgatcaaagtatatatttgtgaagatgatactaaacagttacaaaccttgcagcaactggtcagtaaagtgattattgagcgtcaattggatatgggatttggcctaacgagtgccgatctgcatgaaatattagcgcatgtcaaaagtcagcaaccaactcaagccgtctttcttttagatattgcgttgaattcggatattaatggcattcagcttgccagtcaaattcgtgatttaggcatccgaagtaagattatctttgtgacgacgcatacggagctatcattgacggtgtttcagtatcaagtggaagccctggattttatcttgaaggattttccggatcgcttatacgagcgattaaataccgtcttacgcgtggcacaggagcgtttcaaagctgaagacaatgatcaaaatagttatatccagatcaaaattggcgagacgattcgatcgttggacgtgcaacacgtgttattttttgaaagttcaatgagtccacataagattatcgttcatttagatgatggtgaacttgaatattacggtttattaaaggatgtgccggatttgaattctgatttttatcgttgtcataagtcatatgtcgttaatctgacccgcattcggtcattggataaacggtatcgtcgactaacgatggctaacggtgaaactgtcctgtgctccgcagcggccagtcgctacttagtacggcagattggcaaaagcaatcgctgattgaaatcttagtcgatttatattgacggcagtaaaattgcagattgcaagattcggtttgctgactggtaaaataatcgtttcagcaatttgatttccctgaaacggttatttttttacgctttattcaggtgtattgaattatgaacctgagctgggccgttccaatcaattcgcttgcgtttattttgaacttatcttcaatgggccaaataaggtcttaatgtagtgtaatggttagtccgcctgtcttaaaacggccgttgcgccgggctacactaaattataattagaggcaaccagtttgaatcaagtgggttatgttcgccacaagtacggctgttaattatgatcaaggttggcttgccattatttcgcaggtcaaatcgtcgtactggacatgggttgtctgtgatttgagcgtgacttgtgattggtcactaacgataatattggtgattagtcgtaataacttaagtgtgggagtgaatagaatgtgtggattggttgggtgcttaacggatcggcgaaaagttgataatgccgcgtatgatcaggttgtgcgggaaatgactaaaatgattgtgcatcggggtccggatgatgaggggtactttgcggatgataatatcacgatggggtttcgccgattaagtattattgatttggcaggtggtcatcaaccgctgtcatatgataatgaacgttattggctaacgtttaacggtgagatttataactatgttgagctacgtgaacagttaattcaagaaggctacacgtttaagacggattccgattcggaagtgatcttagggatgtacgcaaaataccaggccaagttgacgacctatctgcggggaatgtttgcctttgtgatctgggataagcaggaaaaaacgttattcgcggcgcgtgaccaatttggaatcaaaccgttttattatgcgattgccggggatgatttttactatgcgtctgagagtaaggcgatttataagattttaaaagataagcattttgatcaagaggcgttacaagattatttgacgttccaatatgtgccggaaactgagaccctgacaaaggaaatcaagatgctggcgccgggctgttcattaacaaaacagttgggacacgcgccgcaaatcaagcgttattatcatcgggagtttcatccagtcgtccgttctgaacaggactacgcgacacggcttaaggggacgttgattgattcggttaagatccatatgcgttccgatgtcccagttggggcgttcttatcgggcgggattgattcgtcaattgtggtggcgattgccaagcagttcaatccaaatctcaagacaatctcagtgggctttgaacgacctggctatagtgaattagacgtcgcacaggaaacggctgctaagttgaatgtcgataacgtccaaatgaccatcacgccggaagcattcatggcagcctttccacattttgtctggagcatggatgatccgttagctgatccggctgctgtcccgcagtatttcttgactaaggaagccgtcaaacacgttaaagtttgtctcaccggtgaaggggctgatgaactttttggcgggtatacgatttatcatgagcccgaatccttgaaagcctttcggtatacgaagccaatcaatggggcccttcaacggatagccgcgatgatgccagcaggaatgcggggtcgttcgttgcttatgcgggggacgaccccgttagagaagcggtacgttggcaatgcgtttatcttcaatgaaactgagaagcaacagttcatgaagcactacaatcgtgaccattcgtttcaacagacaacccgggtcttttacgatgaagccaagcactatgatttaatctctaagatgcaatttatcgatatgcacacgtggttaaatggggatttgttgcataatgcggaccggacggcgttagcccacagccttgaattgcggacaccctttgttgaccgggacgtgttcaatctggcagcggaaattccagccaacttgcgaattagccacggtacgacgaagtacattttacgaaaagcggttgaagatattgtacccgcgcacgtgttatatcgcaaaaagcttggtttcccagtaccgattcggttgtggctcaaagatgagatgtacgattgggctaaaaatattattgtgacgtcgcaaaccgatcagtattttgacaagacatatttcttaaaactattggatgaccatcgagcgggtgttcgtgataattcgcgtcaattgtggaccgtgctgaccttcatgatgtggcataagttatacgtggaagctgatatgttaatggatagtgtaacggccaatcatcttgctgagcaagtcgaaatcggttaagctgttcatattaaagctaaataagaactcgttcaacgtgccaatgagaataaaaatcatccagcgacctgattgtcttaatacaaataggttgctggatgatttattttggtggttttgtagttgtttcgttagtcgatgacgactttagtgccatacttgatgttgttatagacccacttggaatctgcaacgctcagatgaatgcaaccgtgtgaagacggtcgcttgccaagatcagcagcgtctgatttgataaagtgaccttgggcatctacgggtgtggagtggaacaaatattcaccatggttgagccatgagacccagtaataggcaccttcatcaacactagcgctataaaaatattttccccgttcggcttgcacatgataggtgccacggggtgttttgcggtcagcagttggcacgccactggatgcatacattgtatagagaacgtggtgatggttcatcaagtatagccgttgtttagccaacgatacgtgaatccataagtccggatagcggttgacattgggatacgcgactgtttcggatgattgacgccagttgattggtgtgcgcatgaccgttgatttagccgtggttttggctttcgtttttgacacgactttttttgtggttaccgttgattggctaggtctgtgggcatcaccaacaactttgacagtgccgaccgccagtaagccgataactaaagtgatgctagttaataaaattaatgttgatttgcgttgcatgttgcgcccccatagttggttggttctgtctggctctgacttgatagttagtggtaatagtcaatactgaccattcaatcaagaccttctcagtaaaagtggaaaccaatcgtatattaccgttatagctttctgaaagtgaaaatgcaacccagtcgaatgctgggtaagtcggttttacgaacaaatcggggtcgcgatagtgtaaagcgggcatattcgggctttaagtcaattaacacagcctaaaatgacaataattggtcttcaaataacactgaaaataaacaataaattccaactaaaagtaggaaggccgccggtgaaaatcgggacgattcattgctagcactctgagtcgcctattaatgaggttcctgaactagtgacggttaagtggatttaaaagatagtgacataaagaaaaacactcagcctagcgataggacaaccgaattggtggtcattgttaagccgctaagcttagtgttttcgatgaccgtttaagacgactacgggtcatttagttattaattttgaacgcaatgccggtcggtgctttttgcgggccgcgctaaccaaattagacctaacaataggactaagctaacagcaaccatgatggcaccaaagatcggtgtccagcctaagccaaggttggtcgtgacttgaccaccaataccggagccgagtgcgataccgacgttaaaagcggaaatatttaacgctgaggccatcgtaatatcgtgtggtgtattctgttcagctaactgaacaatatagagttggagcccagggacgttcatgaaggcaaagattcccatcagtaggacggtcaatagtcctaaccagtgactgtacccggtgacacttagaatgagtaaggtgatgagtaacccactgaacatcttgaatagtgcaattaagggccgtgcattggcccaacgaccacccagtgtattaccaagggcgaccattaagccgtaaacgactagaatcaaaacgacagcgctcgctgaccaatgcatctgctgttctagtagtggtgataggtaggtgtaaactacgaaggtaccaccgtatcccagcgccgtgacgagtaaggcgaacagtagttgtggattagtgagtacgcggataatcccccggaccgtggctttactgggtaacggcagattacgtggaattaaccagtaatcagctaacaaaccaatgacaccaatcatgctaataaagataaaggaccagcgccaaccgcctaattgaccaatcatcgttcccaacggaacaccagtaaccgttgcgacagtcagtcctgtaaacatgatggcaatcgccgaggcccgtttggcaggtgcgaccacgtcagcggcaattactgaggcgacggtcataaaaataccgtgagccaaagcggccacgacccggcctgcaagtaagacaccaaaggttggggcacttgctgcgagtaagttaccaataataaataaaatcataattaacatcatcaagcggtgacggttaagccgaccggtgagtaatgtcatgacgggcgcgccaatcatgataccaatggcatagatcgagacggtcagcccagcttgcgccaagttgatgtgaaagttgctaacgagtagtggcattaaaccaacactaataaattccgttgacccaatggcgaaggcactgattgcgagtgcaaaaagtgtccaactgggattaaactgttttgtcataagataagcctcctgctattgctaagttgataaataatgattatactagcaagtgaattttagacaagtaccgactttaaagtgggatacccactaaaaagtaagtatggaatggagggacaattattggaaaccaaaacgtatcatattggggtcgaggccacaatggaaattattgggggtaagtggaaatcaattattctgtgccatctgcgtactcagacgatgcggacgagcgaattggaacgcgcgattccacaaatctcgcagaaaatgttagtacaacaacttagagagttggaagccgctaatattgtgacgcgcaaagtgtaccaacaagtgccaccgcgcgtggaatacggactaagtgattatggccggagtttgtccgttgtcttacatgagctgtgcgtgtggggtgaggataatattgatcgccgccgagctgcgggtgaagagattgccttgttacatcgagacgatttatagacaatgagtttaaattaaaaatggtgcgtcaagaatgaaaatattctggcgcaccatttttgattagggggagttaatgttgggtcggttgacgactaaataaacaacaaatcagtggagttaacttattgctactagctattgtgtagggatttggctaggagttcatctgcgaaactcactgggttgttactaaagaactgcgggggtattttactatgcttactaaatatatagaaattcgcacaaattctgtactaaccagatttagttttgaaacttaatattagtagtaatgactccgcttacatttttaaatggttatgataagcttagattattgacgataaatagactggagttggtgagtatgacgaaggcagttatttttgatttagatggattattgattgatagcgaggttatttcattaaagatgtatcaacgaatcgtacaggattatgggcagacgctttccatggcgacttatgcacaggaatacagtggtaagtcggcggtgacgaatatgcaacacttgattgaacgttttgacttgccgtttaatgttgatactggattaaagcgggcgttaacgttggaaaagacgtttatgcaggatggcgttgagctcaaaccgggagcacgggtgttgttacagtttttacaccggaatcattattcagtggccttagcttcatctagtatcaagtcgcgggcattagacattttgacgtcccatgatgtggcgcaatatttcgaccagtttaccttcggaccggatgtcgatcgtggtaagccatatccagatatatttttgatggcatgcgccaaactccaacaacaacctgcagattgtttggttctggaagacagtgaagctggcattcaagcggcgacgtccgcgaagattccggtaatttgtgtgccggatatgaaacggcctaaccagccctatgctgatcaggcgactgcgattgtaccgtcgttaacggatgtgataacgcatttaaaatcagttcgataagattcagttgtaattaaagcataaagattattaaattattaataaggagcggttgtccgatagaaaaactgctatactacgaggcgtaaataaatcgctgacaagttagccagtggaacgaaggagtcttgatcaatgaagaaattgatgattgctgtaactggtttagccatggtggcaacgctgggagcagcggtacccgttacagggattacagcgaatgcggcgactaagaagacaacggctacgaagaatgtcgcaccaagtttgaaggtcaatgcaatttacaataatacgacgcaaattacaggtacggcaaccaagggcgctaagatcaccgtaaaaagtacggccaacgccaagaaaaatcttggaactgcaacggcctctaaaacgacgggaaagtacacggttaaattagccaagacattgaaggcgcaaagcaatgtttatgtgtacgccacgaatccaacgactaaggcttatttctaccgcgtcatccgtgttcagactgccaaaactactgcctcttcaactaagaagacgactaacaagacaaccacgactaagaaagtggcaactaaatcgacggcggccacttcgtcatccaagaagacgactaaatcgtttaaagtcaacgcgccagcgggtacttggaagtcgaatacgactaacaagtactcccaaatcttaacgtttagcgctaagaatggatttaatcagacgctttataagaatggcaaacaagttaaaaagctggtctcgtatgcgagttatagcatgactgccaagacgccaacgttctggaaagtcagctataagtcaggctcgactactaagaccctatatttacgctatacagcaactaataagtttacggtcgttaatgctaaaaatcagatcgttaaagttaaggttggcaatgccccagcagctgtttggacgtttaccaagaagtgacgggtcgttaaatatcttaagtacgaacaattcctcggtattttggggaattgtttttttgttgcttgctgatcaattagattgaacgtggcctagtgaatattaaaataattgaaaaaacgcagatagcttatcgtcattagcaggttaggtgagcgcatataaattggccaatttgggctgttcatagtgaccatgatggaaaaggcactacagcgttggtaagtcatctagttcgctcgaaaaatgacttggtcgtgagtcacttcaaaaatgaccatcgtgcagttgtatccatgaagaatactgaataaacaagtaaatgaaaatgggtgttcgttagctgatacttatcatttaattacggttattaacacaaataatatcacggtgataaaaatttaatattcggatatctgtaaaattgtaagtctttttctgaacgtcacaaactgaaaataatgtaagataattaacgtcaagagatgttaaaatactatctatgtgaagggagcgataggcatgcaacaccggcaattatggtatcggggcggcctgggactggcactagcgctagttgtggttggatatcgtggatcacggacagttattcgggcggttccccgcgcacaattgagtgttgatcaaaaaatgccatcgactagcagtgttttttctgcttcgaaattgacgttgcaagatgaggcaaacaactcggcaccacaagtgtcacctgaggcccaggaaagttcgggacctgacaagcagtcggatttaacatcaggcagtagtaccagtagcagtggtatcagcagtggtatcagtagtggcaatagcagtggcagtacaatactggaaaacgctaaaaataatcaaacatcagaaacggcgacgaccaaagcggcagaaatggtcaatgggacggttaaaatgaccttagatactaatggcacattgcatttgagtggtgggtcatttggtgcatcgctagggtcagccacggggagttggattgtaaaaaccttgacggctaacggctatcaaccgacccaagtttcaaagatcgtcatcgacggtaagataacggcaactgctatgactaattattcatatctgtttgctaacttacctaatgttacggcgattgatgggctagccaaccttaatttaactggcgtaacggatatctcgtggctatttttgaactgttcacagttaggcgcgttggacttgaatagttgggatgtcagcagcgtcatcagaatggagggaacgtttcaaaattgtgccaagttagttacgttgaatgttgccaattggaacacggattcattacagtatctaattgacactttcaatggtgacagttcattaacgtcgttaccagttggcaagtggaataccagtaaagtggcgacgatgatgcgaacatttacggattgttcttcgctgacgtcattagacatcgctaattgggacacccgtgtcgtaacgaacatgtccgcgatttttagaggaatgtcgaaggttaagagtttacccattgataagtggcaaacgggacgcgtggttaatatgcagttagtcttttcaggtgatactagcttggaaagtattaacgtcgctaattgggatacgagtcgggccactgcgttggatgggacttttgctaagcttcctaatatcaagtccctgccactcgacaactggaatacaagtaacgttcaaacgatacggagcacattttatggcgatactaacttgacccagctgccgattgacaactggaatgtcggcaaagtctttgattttaattcaaccttcagtggctgtgccagtttaacaactgcaccggttgcgaattggaacacccagagtgccaccaatcttggttatacttttgagggcatgactagtctcacctcgttaccagtagataattggcagactggtactgtcacgaatatggccggaactttttctagagttagtcagttaaagagtctcccgattagtaagtggaatacgaagaatgtacaaaatatggcggggactttttctgaaatgagtagtgtcacggcattatcagtagataattggcagactggtaatgtgacgacaatgaggggcatctttaccaaagttagccaagttaagaatttgccagttggtaagtggaatacggcgaaggtcgttgacatgggacaagtattttacggcaacctccagttaactagtctgcccattgaaaactggaatacaagttcagccacggatttttcacagctatttgcggaagattcgggtttacaaaccttgagtctaggtgcttggaatacgaccaaagtgactaactttgaatcagttttccaaaataccagtctagacaaattagatttgactggctggaataccaacagtgcgcaaacttataccaacgctttcagttcgaagttgccgcctaaacgtctattgttgggccccagttttaacttttttaagagtgaaagttggcacttgccaaatcctagtagtgaggcaccttatattgggaaatggcgtagtttaaataataaaaaagtttatacgtcagctgatttgatgactaaatacgatggcaaaaccattgttggagaattcgaatgggccactggcaacacgattacagtgaagtatgtggacgctgctggcaagtccttggcacccgacacgaaaatcagtggtgcaactggtgatgcctatcatattaaaccaattgagattcaagggtacgtgccagatcaaccagatggggttcaaggaaactttaccgtcaaagatgaaacgattacgttaatgtacaatcctggaggactaatgtttgtctcagcaccgcagaccattaattttggtcagaatccgattactggtaaatcagaaaattacggtgcctcctatgatactgggctagttattcaagatggccggtcaataggttcaacgtggtcgctcaatgcaacgctctcagcatcaggcttcactagtaagcagtcggcacgaccattagcggctgtgctcagttataaggatcaacaaacgggtggcgagtcaattcttacgccaggtgtggcacggttgatcgtcaataaccatcaaactgtttcgaaccaaggcgtcaatatcctcggtcagaaaacggcacttggggcactatcgttacaagtgccaaccgatcgtgccttgacggatacgtatcaggcgacggtcacttggacgcttaatcaaggggttcctaatcgatgatgaaaaaaataatgattaggtaacataaaatttgtaagactgcttgattgttgttagcgagttagttatgtatatttacaatgtaccataataactattccagcttaatgattggtttcggccagggttggctttagttataccgcaaataatgatacagaggaggagtggtgttgatgaagcgtttggggttcatcacaattgccatcagtaccctactttgttgggggtggttgtcagcaccgattattggtgtggctagtacggctgagagcccagcaacgattcgcttcgacggccaggctgagtcatcgaactcagacactggcgctaatcagttacaggtgactgaagcgtcaaagtcgagtcattcgattgtgcatcagccgaatgctagtcaagctgttcatcatcagaacccggggtggttaccacaaacgagtgaacaatggtggctgagtgctttcattggtggtattgggttattggtcgttttaattggttggcaattggttaactatctaaaaaaaaggagttcattatcatgaaaaaaacattattaggacttttattctcagcagcattgattgcaacatcaggtttgaccgcgagtgcggccgatacgccacaaacgtctaatgggacagttggtttcactgggggcgacatcactattgataatggtgatacggacttagctggtgctagtcttgactttggtaccaaccaaatcaccgcagctaccaaagacgataactatgacaacacgaataagtcagcggcggtatccgttgtggacttacggggaacggctgctggttgggatttacgtgtgaagcaaaatgacgtttttaaaaacgacaaagcggttgctaataaagaattgacgggtgcgattccaacattgaatggtgttttggattcaaatgcatcgacgactggtgcggacgcaacggccaataccggtgttgcgctagatacactcaatagtgacaaggttttgatgaccgccgctgtgggtaaggggaatggtaagaacgtggctgatattgctaagtcacaactaatggttcccaagactacggcacgagctacgggaagttatagtacaacgttaacttggagcttgaatactgcaccagcgaatagctaataagtattgatcggaaaaataatggctagtaggggttaatgtcatttttccgaatcatgattagggggagaaatgatgttaacaaagagatggtggcagttaggaattggtttgctagtcggattagttagtctaagctggggacgaacgggttcggctaacacagtcggttttgaggtcgcaccggtggcttccaaatatcaaatcgataaggctgtttcatactatgatctgaaactaaagcctagccaaacaaccactttggcagtgaaagtgacgaacacaagtactcaggaaatcaccgtgcatacggcaattgtaccggcgacaactaatcccaatggggtggttgagtatcaggcaacggctgatggcaagaacattgatttgccagctgatgctagtcaactgattacgacggcggcgaataagattacccttgctaagggaaccagtaagatcgtgacttttaaggtgaaaatgccggctcagaagtatgatggtgttgtcgttggtggactgagtttcttaaaaaaggccgccaaacaacagagtaagagcgcaatggcgattaagaatcaatacgcttactcagtggcggtcgtattgcatggtgaccacgcgctcaccaagaacaagttgacattgggtaagattgatgcgacgcaaaataacgggtataaccaaattagtttacccctacaaaatcgaacggccgctttcttgaatcaagtcaaaactgatgtccaaatctatcgtcgtggtagtaacaaagtgcgctacaagcaggtcaatgaacatggtcagatggcacctaattcagtttatgccttaccgttacgggttggccgggatgcgttgaaacccggccaatataccgctaagttggccgtgaagtccaaaaagcaacattggacgttcaccaaagattttgaaatcacgcgtgatcgtgcgaaccaactcaacaaaaccgccgtgattgaacatcatactaactgggggttgtggatcagcctcggtctgctagtcatcttgttgttactgattgcttggtacattcatcgcaagcagctaaagatcaagtgattagaagaacggcttaaagataaatcataaattcatagccattagtactgttataaacggactcggtcaggttggccgagtcttttttgtgggttcggtggcaatgaatacaaatttacctttgctaacttactcattatctttttgcaggcaatgcgcagcggcttgtttctaagtataatgaaagtgtagttaacttaaaggatgtgaatgaagatgaagtatgaatggcgtaaacaagaaaaaacaacctatgctactaagaagcaaccccaactgttgacgattccagcccaaacttttatgagtatccatggaacggggaatcccaatggcccagagtttcagacgcacctgcaaacgttatatccagctgcttatgggctcaagcatgcgtataagcagtatgcgcaaacacaggcgtgtgaatttgatgattacgttgtttttccgcttgaaggggtctggtcattgacgattaagggacagcaacttgaccatcttgacaaagatgagttcagttatgacattatgattcgggtcccagactttgttcccaatgaactgattgcaccggctttggcagcggttaaagctaagaaacaactgccaactgaacaaattaacgtgcagcagttcgacgcaatgcaagtggcacagattctgcacctgggtgcttatgacgatgaacccgcgagttttgccaagatagatgaactggtcgccaatcaggggatgcatcgtactagcaagattcatcgagaaatttatttatccgatgcacggcgggtggcacctgataaactgaaaaccattctccgatatcgagtggcgtcgaattaatgcgaaaacttttgactggcattgggcgtgaagcacgaatataatttaattatattttaactcatataaaattataattaaggggtgctgatagtatgacgcaaatagagattagtgatcggctgaaagctttattggttgcgaagggctttgataagaagcaattggttttggtgacggatgatggtggtggcaagtactctttgcacgggggtgcttgcagtattggaactaaatttacgataatcgtacttgaccagccggaccccgaatacaacgtaacggtggtgaatgatcaaggcctcgcgctttggacctccacatacgatctcattttctttaacgatggtattaagatggattacgatcaggggcggatcgctattaaggacaatgctcatatgctggacaatgccgttcaaatcgctaaaggagcggaagttttagctgcttttgaacagggcgtcccagccgataacctaacttgttaattgcgatatgaagaaggcataataatgaagtcagttatttttgacgattttggtagtcccgatgtattgcgcattgctgacgtgcaacggccggtggcgacaactgcgaccgtcttagtgaaggtcatggcggtggccgttaatcatgttgatacgtttgttcggagtggggcgtttaagacggccctggcagcaccacacgtggcgggacgtgatttagtcggtgaggtcgtagccagttcgcaaccgaactttcaaatcggtgaccaagtctggacgaactcaatgggctatgaaggccgaatgggcgcaacagccgagtatgtggcggtgccaactgatcgcttgtatcacgttcctgatggcgtggcgcccatgccactcgtcgcggcggtccattcagctgcaacagccgccatcgtacttaacgacgtcatggaaattcgtcgcggccagacactcctaattgaaggtgccgcgggcaacgttggccgcaagctgattcaacttgcgcatcaaatgggcgtgacggctgtgataaccgcatcaccacgagattttgcacggtgtcagcagctaggcagtaccgcctgttatgattatcacgcggggtttgcggaccagttaacgacggatcagtggacttttgaccatgtgattgatacctcgggacgcgtaccactggcgattaatttagcgttattacgattaggtggtcaggtgacattgattacggcaccgcaggataaccaatttgagttccctgttcgccagttttacatgtctcaacaacgaatcactggttttgtgattagccatgcaacggttgaccagttagcacaagcggccagtcgtttaaaccgagcttttagcgccggactgctattggatgatcaggtcagccagcgatattttaaggatgccgctcagtgtcacgctcaattggaagcaggcacggatcatcaccagcgctttgtgttattaccgagttgattcagcataacgattgaaagcctgattaattaatcagtaatactatgtcaacaatagtattgtaattttggtgatttaaagtgattacttggcaggaggactggacagtcggctcccgcgcgtctaaagttgcgaccaatattatctgtgaaaggaccggcgtgctaacaatccgaaaggtgatcgatacggcgatctttactaatgttaatggcattcctccgtggtaatacgcagacttgaaaagaatatcgatgacgaaagtccaacacttgtcagcaagggttggactttttgtggtgcagcaccagaagcaatggcagaaaaataattaatttactacctatactagattgttgatatgaatttatttattcggatagccatcgattgttggtgaacggctttaaaggaagttcgcctaattatctcaagcaacccacgcttgataacggttacacgaacaatccgggtttgtaaatatagttaacgttatacattattagcgctgttactgaccaaccaatataatgaaaatgtggtcaaaggagtcggcatttaaattaattaatcaatcgtacaaggttattgggggaggtcacaagtgatttagtgccagtaatttatgaattgttatgagagcaatcattgttgataatgaccaccgttcttagttgatgaaagctaaacaagcgctggtaaatgaaaaagggggatttataccatgaagccaatgttaggacacttattaatggcaggaactttattattagcgggtagtacaccgattgttgccaatgctgcagaaaatcgtagtgggaatacagatatcaaagcggaatttacgaagagtacgtccacggtgacgccagttgatccatcaaatcctgatgtgccaagtactgatggcgatggtgacaacggggcggcagcaggtggcgacctgtcgctgatttttgtgtctaaatcgttaggatacgggacgcatgagctggacgttttaaatgatcaacaatataaggttgacccaactagttcatatactttgctatggcaggataagatggttgtagaagtttctgatgttcggggaaccaatgccggctggaaattaacggttaccggctccaatttaacaggaacggatggtacggctgcaaagggcgcaacgctcagtttaccaaaaggtgacgtggtcaacagcggctcggaggccaatggtgcggttgctacggcttccgaagttgctttaaatggtacggtgggatcaagtgccgtcttaaatgccgataagggcggtggttctggggtaactgttagtcgcttagatccaaaggcgttgacactgaatattaaggctaatacggttaaggcgcaggcctatagcgctaacctgaattggacattgagtgatttaccaacaaattaagcgtcatcggggcgaacggcgccccaagtacatatgtgagtaatgggggcgagaagatgcaattattgaagcgaatcatggttattgtggggacgttaattttaggcctgcaagttagcagcgttagtggattggcagccagtaacgcaagtagcagtagcagtaaaaccacgcaaagcaatgacatcgggtttagcgtggccgcgaagattccgaataatcagattgatcaacataattcctattttgatttaaaaatgacgcgtggccgacagcaacagattcagacgacgatttataacgtcaccaacgctgacatcaaggttcaaacggcgattcatacggcttatacgaacggcaatggcattatcgagtacgtgacaccaactaaaagttatgatccttctttgaagtatcgaatggaccaaatcaccaaaatacagggaccaacgaccatcacgatacccgcaaacgggtcgaaagtggtaacggcgacggttacgatgcctaagcaagcggtgaacggtgtgattttaggcggctggtattttaaacgggtcgccaataaagtcaccggaagtgttaagggttccatgaatattgccaatcagtattcgtatgtgattggactgaaatatactgctggtatagtgccacaaccacaattgaagctcgatacgattacggcgggcatgcagaattatcggcgaggggtgtttccacaattacgcaacgttactgcggtgatcgtccccaaactaacgattacggctaggttaacgagtaagaatagtggcaaggtcatcaagaactttacacagaagaatgtgcaattagcacctaactcagtttataaagtaccaattttgacagggaccaatcgtttgcaggctggttcgtatcatgtccggctagttgctaaaaataccgatcatcgatgggtgtttgataaagattttgtcatcagtacggccgcggcagataagtataatcaggcttccgttgatgattcgggaatgagcgttggctggtttattctattcggagcgttaggcatgttaattattggattaatcggtctattaatctttttctggatcaaaaagcggcggcgtgcttagttcggtcagtgaaatgggggaaggaccatgccgaataaatggtggcgattaatattaggggtaatgctcgtgctgagctgggcaataccagtgcgggcggcaacacacggtcgcactgagatcagtgtggggttttatgagactaagtatagtgctgaccggattattcccgcccgtgtgattcctgatggtggtcacccgtacgttattagaccagctgacccgggtacccagggtcagagaaatcagtcagagcgcaagccaatccgccgacaactaattatcgatggctggttgcgtgggcaatcacgcaatggtcaacaattgccccaaacgagtgagcggcttgtcattggcagtatccttggtgggatggggttgttagctagtgttttagcaggcgcgttgtaccgaatattaaaacggcaagatgggggtgaacggaatgcgtaacagacgagtaaaatggttactaattcttgtattcggtatactcggcttgctgaatttgctgtccttagagggtaacgctgcgactttgacgagcaagatgacggacgtgaaagctaatgctgcttttcaggccgtaccgggtggtaattcggttggtagtagtgttgataacggtttgcaagcgtatccagcattaggcaatgtgtccgctaactatgcggataatggtcgaattacgaggcagacgacccaaattacaatgacgatgacgggttcgattaccttaaaatctagtaactcgatgtcaaaagcttattttgatattatggctggtccggcaagtgggagctacaccggggcgacattagttacggctacacctactagtcttggcagtggcaattcgattatgattagttcttcaaaacagacgcagacgttatcggtcaattttcaaaatattaaaagtgagttgccaatctatattggcttccgaatcacagtgaatggtgaggaaggtacctatcagctggggcgtttcaacgcgcagacattatctcctaaaattacggggacactttattcgactgatacgacgatcaaaggaaccgggacacccggcaatacgatcagtagtaatgttaatggtgtgacgacgacggtcggaagcgatggaacgtacacgctgaatcttgggactgcactcggtactttaagtaacgtcaccgtcactgaggtcgatgagattaccggtgataaggggacggcgaccgcagcggtgaccctcaaaaaactaaatattactagttcaaagacggcagtcgatctatatcctggtgacttagattcactgacaagtgatagcgcggtcgtcgcctggttagttaagcaagctggcatcgttgcgacaaatccggatagtgcgactgacacaattacttacgcggccgacgagactagtttagcgagcaagttgagtagtttagccgttggtagcagcaccacgatcaatatttatgggaaaggcagttctgggctgaagtcggatgctaaggcaattactgtgacgatgcgggatggaacgttgagtctgggcacattaccagcaagtttgacgtttggcaccctgacgattccgtttaaagaaacactatatcagccgacaaatgcttggaacatcactgttaatgacacacggaagaccggttcacagtggtacttacgggcgacagcaactgccatgaaatccagtacgcggaccatgagtggcaacctgatttatctgaacgcggggaacaaacaggtgctgacgaatacttcggtaacagtcagttctggcaagaaaatcgcgggtacgacgagcactaatgctgcaagtggttggtcgagcagtcagggtattttattggatgtccagcctagtgtgcaaattgacagttacagtgggacgattaattggaccttacaggatacaccttaaaaattaatataagtggttaaaagatattgcaaaagtatgtcgatttgcaatgtctttttttatgaataattaataataagattgtaagggctttattatagtttaatgcaaatttatgtttacaatatagagtaaagggtttaatgaagccgtatttctgatatagtaaagtgaactaacaaatgtattaatatgatgaggtggttggcgtgtcagcagtacttttagcgctgtcgttgatttctggcggttatgaaatgttgtttttaatgattggttttagagaatatgtcacttggcggattgccatcatttggctaagtctggttattattacgatgagcctgggggaagtggcttcaaacttatggccccaagtccctctggcttatttttggatcatcccgattgtttgtgtgaccacctttatgagttctcggttgttgtacacccagtggattttaatgttaccggtggcaatctttttgaatgcgcttaagcgattagtaggggcgatcatgggtgtcattgccaaggctgtagcccaatctgcatcgccaatgttattacggcaagcgataggtctacattcgacagcggatattaatctctttttagcgtcgattatgatgctgccggtcattattattttagggatgttagcgcatcgctggttagtacaagtgtcggccgccgatttcttgcaacgggcgcgtgttaatattagcgattacttattagttattttgttttttgctatttatattattgcgtatgtttttgcgatggaatggtcagtcaatgcgcaaacgtatatggcaattgcggctatcgtgacgtttggcattatcgggtcgtatttaattagtaataaaaacagtcacttgaatgatgcgcagctattgctacaagtctcaaattacaacgaattattaagccaccataatcgtgatttacatttgtttaaacatgattatgagaatattcttttgagcatgtcggcatttattcagaacaatgatatggccggcttaaagcgttattttacaacggaagtaatgcctgccagagtaacccttaatcgtcagtcgggactgagtgatttgagtcgcttggataagccgacggtcagtggtctaatttatgcaaaatatgaggcagccaacggtcagaacgttcatttagtggtgacaatcttagagaaagtcacgttagcggatattccacagataaaagtagtgcggattttgggtaacttgctggataatgcgacggatgctgctgcccgagcgaatcatcaagtggcgctaactgttaaaaatcgggatgctcacacaacggtattttcgattacaaatcaaattccaacgcatgaagcggtagatttatcagttatcaagaaaagtcgatttacaactaaaccaggacatttgggttatggattgagtagtattgaacaattaactacagatcaattagttgttaattattgtattgaagagggcaactttattgcagagctcattatcaaacattaaactatgattatgaatcgaaaggatctgaatttggtggcattactaacaacattacctaatattgggccaacattagccaaacaattgcaagccgttgcgattacgacacccgaacagctaaagtcaacgggtagcaaagtcgcttttactgccataaaaaaggccaacccccacgcttgtattcaattattgtattcgttacaaggcgcaattgagaattgcgcttacccacagttatcaccggcaactcgcgaagatttaaaacaattttttagatcattgctataactcatgaatggcaatgtgagcgctggtcggagaatttaacgataagcttttagataattaagaccatacttttttcactttatgtgaattggttaacataaaaatgattgctttaaagcggttatcccagattacgagggataaccgcttttgtgtattgattgttaaataaaaaatatttgttagaatcattagtgtacagcgggattagttagcattgtaaattgtcagatggcaaatgtaaatagtattactgctagacatctgttaaaatgagcattatttttgggttaacaaattttgaccaataacgtaaaggagttacagattatggggacagaactacaatttgtacaatatttacatcaaatgcgtgattataatgatcagcacccaaccaccaaggggctgatcttattaggttacttagaacgagattttattcgattctaccgggccggaaagattgaagaaggcattcaatttgctaagaagaatctgacccgttcgcgcgatttattaaataaattatcgagtgaggaaaaacagctgcaactcagtgcgctggttgatgtcttagcttttgagggaatccaaaatcatgctgatatttatgaatttgttaagctacgtaatgattatcaccgttggttagttaaattacccgtgacgacggaacgttaccagccactagttgtgcagattattcgtgattttgccgcaattgccaaaccgaacgcattagcttataacgcacatttagagtcaacgctcgatgtgatgtactataccaatgctcacctgcatgatcaattatcggtgaaaaaggtattggcccacgtcaatgcgcggtgcaatcctgagtcagtgcggcggtcgtttagtcaagagatgcatatgtcgattcgtgattacatcaatgccaagaaaattcaggaagctgagcatatgttgttggcaacggatttaaccattcgagccattgctgctgaactctgtttctacgatgccgccgatttttcaaaacgattcaagaaggagaccggtcaaacgcccttagaatttcgacaacttaatacacgaactgattagtacttgtatttttaaagataacctttttcgcgtaaatacaaacccccgttttactcgcataaaagcaggtatactatgtctcaaaattcaaaatatgtcgatatttgactaaaattaacagaggcaaattactatgcgatatacacggggcaaatggcgcgtaaccaatcccaaggtttggttgttttctagtgttttaattttaggttggagaattgtgccgacagtggctcaagcaagtgaagctgagacggttaccatgtcgagtcattcggtgcagttagaaacggataatcaagaccaattaacagaagtagcacggatttcaaaaactgcggtaactcgtgatagccacagtgtgaccgcccagtccagcaagtcagctgacaggactagttcggagcaacctgctacgactggcactgttgaggcggtcagtccaacgactagtgaagcccaacagcggtcaacacagcaagataaaacagctgttgatcaacgggcaagtgactcaacagcagcttctgcgggtgccagtactaatcaggcgtcagccgcaacaagttctgatcaggcgccagcagccaactcaactggcactcatcatgcgattgatatggccagttcagctagcgcactaggtgctgacagtggggcccattctgaaagtttatctgaggcgcaacactcaggcgggcaaggtaagacgatcgattcagatttatctgggactgttcattcacagtcatcagtgagtactgtgacgacagctacccctgtgaactcaaattcaagcctagaaagcgacaagtttacttccacacggagccgagctgtagcggtaactgatcaaatgagtagcagggttgaaaaaagggcattgaataaaacaaatgtcactaagtcaataaacatatcagttgcaacaaagcagccgagcaagcaacggacagtcaccgcttcgtcgtttttgacaatagtaaagaacttagccgataagaactatcttgatcagtataccaaacagcatgggcaagcggctttgattgctttgatccaagattggttgtccacgtatcgaattattgcacttacaggaattacgattgtgaatagttcgtttgatggtagtgtggctacgattagtggtggtctgcacgttatcaatacgggggcgacaattcgttctggccaggatgatgaatgggagaccatcataaacggtggtttgtcagtgacaaacaatacaatcacgtttacaactaccaatggattggtggaccgtcccgtagctaatcaggatatggattttacaaagcctcggccaacgggaaatggtgcaatcaaaggtttaccaagcgttacggttgattcttcgttaatcaatgcgcaagaatttagtcaagctcagatcaatattagtgacttttatgatcaactagttactgcagggactattttatcggcaactaatggtggcacgttgagtaagatgctgattggtgagtctggaactgctgatttgggctcttatcaaggacaccattattatgccgtgaatattgatttgaatgactggcacagtggtattcggaccactggttttaataatgatgatgtggttatttataacgtcgtcacggcagcaccagcgttaaccattggtggcggtttttctagtagtacaccgaatctagtctggaacttcaatcatgacatgcgtattcagaataccacgatgataactggtaaaatcgtggcaccacatgctgtctttacaactaatcaaaatgttgattcagcggccgttttacaatatggatatggcgatggtgacagtgctattcgagagacgattacgagccaaaacgagcataattatggttttggtcaagtggttactgatgacccgttggattacttaattgcagtgattaagtcggatggtacgagcattgatactttagctggttttcgccatctactagcaaccgggcaactgaagatcacgattacagatgcggctgggacacgtttatcagggttgaatgcagttgatacacatattgcgggccagcatcgctatctaattacttaccaatttggcgatcagactgcaacgacttggttgaacgtccaaccatcgcatgagcccataatacctatcagccggataccggaatattcagcgataacgcggacgatcaattaccaagatgagcgaactggggcggtgcttgctggcccagttatacaaaatgtacgggtcgtgcgatttgccatttttaatgctaaaactcatgaattgctcggctatgatacaaacggcgacggaattgttgatactagtgatgggacaattgcatggctgttagtaccgccaacggatcaagattgggtacaggttgtctcaccagacttatctgcgcagggttatcaagctcctgatattccggtagttgcggggcaaacagtgatcattaatggtggtgatagaacgatgaatacaaatgtaattgtcaagtatcagcaacaaacgcatattgcaacgacgcagcgaacggttacccggacgattaactatatcgatggtggaacactgcaacccatcgcgtcactacatgctgttgttcaaacggttaagtatcaattattagctgtggttgctcatgacggaacgatacttggctacgataccaacggggacggacagattgagacacaattggcagatgaagcatggttgattgttggttcagggccgtggtttggcgcggttaagtcgccagatctgagccatgagggctacgcagcgccggacctaaaagtagtgccggagcagatggttgctggggtcgatgataaagatgttacgatcaatgtttattaccgactagcaactcaggccgttacggtgtatcaaaataaacggcgcgttatcagctatattgatcgacagacccatcaatcgattgccacgaccgtccagcaattggttatttaccaacgaacagcaattattgaaaaaaagactggcaaatgtttaggctatgatttaaacggtgatggattagttgatacgagtcaagctgattatgcgtggattttagttggcagtggtcaatttgccgcggtaacgtcaccaacgctagtcgtccaaggctatactgatccggacataaggactgtagcggctcaaacggtcgcgattactgatccggacctgatgacgacaatcgtgacttatgaccatcgtattattacggtaacaccaggcaatcctgctcgaccaggacagccagttgatcctgacaatccgaatatcttgtttccagatgagtgtggcgacaccgatttaacgcacaccgttactagaatcattcactatgtttatgaggatggcacgacagccgcagcctcggtcctacaaaccgtccaatttcaacgcaatgcgatgattgatttagtgacgggcgaagtgacataccaagaatgggtaccagtctcggtaacggaaatggcgggcgttatttcaccaattgtagcgggtgccacgaccacattaacagaagtggcagcccagcaggtgagtgtcacaactgccgatcaggttgtagtggttacttacaagaaatcggcaatcaaaccggaagaaccgggtcaacctgagcaaccaagtcaaccggaagaaccgggtcaacctgagcaaccaagtcaaccagaagagccggggcaccctgagcaaccaagtcaaccggaagaacggggtcaacctgagcaaccaagtcaaccggaagaaccggggcaccctgagcaaccaagtcaaccagaagagccggggcaacacgagcaaccgagtcaaccggaagaaccgggtcaatccgaaaaaccaggagaactgcaaaaaccgagtcagccagctgattctgagcaaccagatggattaagtgatcaagccaatttgagtcgtaatcaggctgaacaatcacggacgtcacagccatcacaagcagagtcagatcaaagcgttgtgcagacgaatcagcagaaaacagctgcgtccgtttcaggtattggttgggttagtgcaccggcggtatcaaaacgtatcactaagcatcatcggatgacgacccttccccagacggacgagcagaatacgcaattatcactcttggggatgattggattagcattgagttcaattttaggttggctgaagattaagtcccgcgattaacagttgtgatatgatacccgttgtgagttgcggatctttaggaaccgggattgacggggttaacgttcctttgagggacagctagttttgaatgattaatataggcaatcactgacgtttcttattaaacggtagtgattgccttttatgatatcgtcgttggtacttttgatgcggtcagttgaccggtcgaaatggcgactaataactgagcaaaggaacgtacgcggcactttttgtagtgacactaaatgtcagacatatgatagtagcaactgggtggggcgtttaaaaaattaagggttatgcctaaaaataacatttatcgttgacaattgtaaacgaagggattaatatacacatatagattacaagtgtaaacgataatgagaaagggacgaataaaatgatgattaaagtattagtcttattaattggtgggttagcaattgggtttattctgtggtggttcttcgggaagcatgctacgacaacggtcaccgcgagtgcggttgatgatttacagcaggttgatgtggaggttaagggtggctattcgccagaacaaatcgtgttgaaaaaaggggttccggcggtacttaattttacgcgcaaagatgcatctggttgtctggatcacgtggtgttcagtgatttcggtatcaatcaggaattgccacaaaatcaagttgaagcaattacgattgatacgagtaagtctggcgaatatcaatgggcctgtgggatggacatgtttcatggaaaattaatcattaaatagtgggaggaaaatcaaatgagcgcacgacaacaaatcaatattacagtagacggccattatgacccagcagaagtaacgttacaacaaggtgtaccggcccaattaacgtttacgcgcacgagtacgcaggggtgcttagagcaagtacattcaaccgacttgcactttacgactgagttaccccttgaccaaccgcaaacggtgacggtaccaactgatcgagccggtgaatttcactttagttgtgggatggacatggtgagtggcaaggtggtgattgcgtgatgagcacgacgaaacggttttggatttcattaatattttccctgccactactggctaatatgattttgatgccctttggctggatgcttccgggtggtgattggacgcagttgattctgacgaccatcattatggctgtttcggctcggccgttcttgcaaagttcgtgggcgtcctttactaagcaccatgccaatatggatactttggtggcgattggcaccgcgacggcttatttttacagcttatacgcaatggcaacggggcaagcagtcttctttgaaagtgccgcacttgtgaccactttcgttttgctcggccaagtctttgaagaacgaatgcggcacaacgcgtccagtgcggtcgcaaagctagtgggcttacaagccaaggaagcggaagtgttacgcaatcaagaatttgtaaaagtaccgttggatcaagtagtggtcggcgacattattcgggtcaagccaggcgaaaaaattcccgttgatggtgtaattacaactggccgctcaacggttgatgagtcaatggtgacgggagaaagtatgccggttcaaaaaacggtggcggacgctgtcattggttcaacgattaatagtaatgggacctttcagttcaaagctagcaaggtcggtgaccagacaatgctggctcaaatcgttgagctcgttaaaaaagcacaaaacagtcacgcaccgattcaaaagctgaccgataaagtttctgatatctttgtgccgattgtgctaattattgctatcgttaccttcttgacctggtatgttttcttgaatgctagtctcgcgaatgccttgatttttgcggtcgctgtggtcgtgattgcctgcccgtgtgcgctaggtttagctacgccgaccgcactaatggtcggtaccggccgtggtgccaagatggggatcctgattaaaaatggtgaggtcttggaagctgtcaatgacgttaaaacggtgatctttgataagacgggaacgattacggttggtcacccacaagtgaccgatgttatcggcgacgaagcccaagtactgcgcgttgccactagcttagaggcggcttcggaacatcctttagctgcggcaatattaaaacgcggcacggcccgtggtattcaagcaccaaccgccacgaacttccaagccatcgagggtaaaggtgtgactgctcaagttgagggccaattagcggtggtcggtaatcataaattattaactgatgagccgattagtgctgaattacaacgccaagccactgagcttcaggacgcggcgaaaacggtcgtgtacgtgggcttaaatcacgaaatcattggattgattgccattcaagacgtcgccaaatcgacgtctgaggtagccattgcgagtttgaaagcacgtggcttgaagacggtcatgttaaccggcgataacgaacgggtcgcacaagctgtggcggatcaagtcggtattgatgaagtgattgctgatgtgctgccaggtgataaggctgatcacgttcacgcgttccagaaggctggcaaggtggcctttgtcggcgatggtattaatgacgcccccgcgttgacgacggcggatgttgggattgccatgggttccggaactgatattgcaatcgatgctggtggcatcgtgctcgttaagaacgatctgcgtgatgttgaccgggcgttggcattgagtaagaagacgtttaaccgtatcaaacttaatctgttctgggctttcgtgtacaacgtgctcgggattccagtcgcggcgggcctcttctttgccattgggctgacgcttagccccgaattggccggattagcaatggcctttagttcattgtccgtagtcacgagttcggtattgctaaataaagctaagatcagttcgaacgcccaacctgcgtagacgatgagcagatagcgtcggatgaaatcgggcttgttaaacaagcagaaatgtgtgttaatggtacaaaatatgcgggtgtctaacgccagttcacgttgttgagctggcgttagacacccgctttttgagtcgacaatttaaggaagaaaactggctataaattcctcacaatcagtaaaaaaaagagtattagatttacactaattaagtatcatatcgttagtgtaaaattagaagaatgcccatttaacggagataagtgtggtgttaaatgcttttgtaagcgcttgaatcaaattgtgtattgtgtaacaatattaattgtaagcggtttacatactatttgaaacgagggtttgaacatgaaaattaaagcagcagtggttgataaagtaaacgatccatttgtcattaaagatgatattgaattagctgaaatgaaagcaactgatttacaaatcaaaatggttgcgactggaatttgccattctgatgaagcaattcggcggggtgatgcgtcgttaggttatccagtaattttaggacacgaaggttctggaatcgtcgaaaaggtcggttcagaagtaactaattttgaagtgggcgaccatgttattctatcattttacgctgacggaacatgtgataactgtctgaaaggcatgccaactaaatgtcggaattatgccgactataacttgagtgggactcgtcccgatggttccgaccatttccaagaaaacgggcaccatatcagtgatatgttcgaccaatcttccttcacgactcatacggtagttgaccaacgtaatgcggttaaagtaccaaaagaactagatttacgtcgcttgggacctttaggctgcggctatgtcaccggaagtggcactgttttgaacagtttacagccgcgcccaggacaaacaattgcagtctttgggactggtgcggttggtttagcggcaatgatggctggtaagatttctggctgtaccgaagtgattgcggtcgacattgttgattcacggctagaactcgccaaagaattaggtgctactcacgccattaacagtaaggaagaagatccagttgaagcaatcaagaagttgacgcatggttacggggtcgactttgccgttgatacgactggggtagaaccagttatggtttctgcaatccacgcacttgctcaaggtgggactgctgctttgattgccgttacggccaaaaatatcaccattagctcatggaacgatttgtgtgttgatgataagaaagtcattggtgttaacatgggtgatgccatccctggcgttgatattccacggttaatcgatttctatcaacatggcatgttcccatttgaaaagaccgaaaagttctataagtttgaggatattaatcaagctaatgctgattcaggtagcggcaagaccatcaaacctgtcttgatcattgatgaagattatcaaccggggaaatagctgccggctgggtgccatcagtttatgatgaataacttctaaaacggcgatgtcaaaagttgattttgacatcgccgctttttgtgttaaacacaagccgcttggacggcttgcataatttgtgattaaaacgtgccgattcttaaattcaaaaacaaccagttatggaccgctgggaaaagttcgactcagcgtaaacttgtttagttagttcgtcctacaccgacctccaggcatttctgccaattgccggaacgtggtgggcacagatttaagccgaagcccacgtctcaaatactggcctttcactaaccaagcaaaggacgcttgctaagtgaaatttcaccactgggcattggccgaaacgccttccagtcgggacagtgttcgaatggcggacatgtgcgtacccaacttttggtgaattcgtcattgtttttcataaaccataattttgtcaatcaactgtcagggtgaaaatgatattgagatagctcactaatcctgaattggtgtagtaagatttaagctcttgacagagggcttaatacacctaacgctttgtttaaagttccagtatcaaatagcgaacaacaaattgtaccgagttcggtggtcgttcattagccatttgagcggcttcccgaaacgtgttcggggccactaaagcctgtgcttgctacgccaacggactaatgccaaaacagcattaatccgttggccaggcaatgctcggcttcaactcgtggcccctcacccagccccggaggtcggaataggacgcgcaccggctgacgaataacaatctaaacttggcacgttttaatcacaaatcaggacaaattaatttgcacaatgcgtgttctgatagatattcttatctgtgtttgtcggtttattgttgcggtgtttattttgaatagcgcgtccaaacgtggggtgcatggcattgccgagtaacgattcgagttgtagagaggtcccaatcaaataatcggttcaagaatttactatgaattcttgaaccgattatttgctgtgaatgatttagttaactttgaatgggggattacttggcatcatatgcggcttggaaaatcttgatgatgtcttctttagtgcctttgcgtgggttagagaaggcgttaccgtctttaagcgcattagtcgccatgtgttcgaagtcctcgatcttggcgccaatttccttgatggaatgcggaatgccaacgtcttcgctgagttgtttcatcgctttgatagctaattcggcagcatcacgagtcgataagccatcagtgttttcgcccataattttggcgagctcggcgaaacgttcggggcacgcgattagattatattcttcaacgtagggtaagagcagcgcgcagcagacaccgtggggtgcgtcatattggccgccgagctggtgggccatggcgtgcacgtaacctagattggcgttgttaaaggccatgccggctaacatttcagcttcgaccatgtgtgtccgggcttctaggttatgcccattggcgacggcttcgcgtaatgatgtttcgattaatttgatggcctggatgcactgtgaatcggtaatcggattgtgatcgacagaaacaaagggttcgatagcctggacaaaagcatccatgccagttgcggccgtgagtcccttaggaacatctagcatgagagtgggatcgttaaaggacacgagtggcatgttacgccatgaagcaacgacgaacttataatgcgtttcttcattcgtaatgacacagtgacgggtcaattcagaaccagtcccagcggtagtgttgaccgcaatcagtggtggtagggcattcttgagtgtttcgattcctgctaacttagtgatatcgtcgccgttagtcatgatgatgccggcaccttttccggtatcgtgggcagaaccaccgccaatagtaatcagggagtccgcttgattggcttgatataaggctttaacagcttgaatgttatgaattttagggttgggttcaacttgattataaattacgtagtcaatcccggcagcatccagtgaccgccgcacctgagcaacggcgccgtctggcagactttcaagaaatttgtcggtgacgatgactggcttgtgcataccaagagttttggcacgctcgccgattttactaatgacaccaggaccgaaaaagttaacgctaggcattaagaaatcaaaattacgttcagtcatattaataacctctttttatattgtaatcgctatcattactaatttacgaatcaaattatagtcgtaataattacaatttgcaatactttttggctaattaattatatttttcacaatatcgtttagaaaaggtgcggcaatcacggcatacctgttgtaaccaagtgttaaatgacggtgaactatagtcctcatgctatttgatattactgcctacaaaaagacgactaattacaaagattcacaatcttagtaattagtcgtctttttagtgtgatccaatagaaaaattgggttagtaccagtgatgatgttgccagaaccgtttggccttgacccaggagccgtagcgcgaggcgacgtaggtattagcacgtttttcctgattgacgggtgacaagttgccgtgtaagtatgagcgcaacaattgatagcgaccgtagcagcggccattacgagccgtataactgtatccagattcacgataggcgatccaatttttggcagcgcggttggctttcgaaagcttggcgttgatcttggcaatttgctgggcttggctaagcttcttggaggcctgggcggtgattgtggtttgtggtccaagactagtagtcacgttaacgacaaccccgaagacacaactagccaaaactaatagcaacatggttttaaagttaaattttttcatgatatgtataaccccgttttatattttccctaagctgataagtgtagaatacgccaattatgtgtcagctatgttaaagaaaagttactatgttattaaatgaacgtttccgttatgaaatagtttttgtcaataactgttgcggcaattgtttagatgaataattgcgctgactatcacatgaaaaaatcataatattgttaggaaaactaaagcgctttattgccttcgttcggtaatcttaaattggaatagctttacaaaagtattaaaggagtaagtgagggagtgcaataatggcaacaaaagataatgaaaagattacattgatggcgctagtcatgatgatctttacgaccgttttcggatttgccaatagtacggtggcctattatttaatgggttacagctcgattctattttacctagtcgcagccgtactgttcttcatcccgttcgcgctaatgatggcggagttcggggcagcggttaagtctgatagtagcgggatgtacaagtggctggaagtgagtgtgaatgcgaaatttgcgttcgtgggcacgttcatgtggtttgcgtcgtacattatttggttagtctcaacgtcagctaaagtctggattccgtttacgaccatcttctttgggagcgatcaaacgcagcgctttgcgatgtttggtctgaatgcgacgcagatgattgggattttgtcctgtctatggatggtgctagtgacgttcgtttccatcaaagggatgaaaggcattgtgcgggtcacgagtttaggcggcctggcggtgaccagtttgactgcaatcctgttagtggtttcgggggtcgttttagccttgaatcacggacaattcgcacaaccgttacaacatgtgatgacgtcaccaaatccaagttatcagcatccagtcgggttactcgggtttgccgttttcgccatttttgcttacggtgggctagaagttctcggtgggatggttgataagaccaagaaccccgaaaagaccttcccacgcggaattattatttctgccatcgtcattaccttaggctatggcctgggaatcttctgctgggggattagtacgaactggcaagccgttttgtcgaatccaacgactaacctcggtaatattagttatgtcatgatgcaaaacttgggctatgttttagggcaagcgcttggtttgagtacagcggccgctaagacaatgggactgtggtttgcacggtacaccggcttagggatgttcctcgcttacagtggggcgttcttcaccttaacttattcaccattgaagacgcttatcttgggaacacctaaggaactgtggccgaagaaatttacgaagctcaacaaagctggtatgccaagttatgccatgatggttcaatgtgccatcgtgattgtgatcatcttggtggcgtcctttgcaacggcagacgcgtcagccttttacaatgtgttgaccttaatggcgaacgtttcgatgacgttaccatacctcttcttgctatacgcgtttccgaagtttaaggaaaaccagaacattgttaagccttttgaagtgtacaagtcattggcttggacgaaaattattagttgggtcgtgttcattgtcgtcttaggcgcgaatgtcttcacgttgatccagccaatcttggaaactgggcagattcaaaatacgatttggatgctagttggaccaattgtcttcggtgtggccgggattatttggtatcaagttcgagaacggcatgtcaattaaataaccaatttcaaaataccattcgattgctgactgataaaacagcattgaatggtattttttaagtgccttaatatgggaaatttagtacactcattagcaaaagctatctagggggggatggtcatgacattgggaactgcgttaaagcaggcacgcaaagccaagcaactcaatcaaaagcaagctgcccggggaatttgtgcacaatcgatgctgtcagcaattgaaaatgatcgctacgtgccgaatgcccggctattactggcgctgtgtcagcgattaggggtcgcggttagtacgttgagcctagccgacgattttgagatcagtgccgagcaagcgtttaatgaccgcgttcggcagatgtgcaatgcccatcagtatcagcaattgaaggattggctattacagccaaccactttggaacatgttcaaacggatgagcagactcaggcttactattattatctgggtgtcgcctgttggcaggttgatcgcacatcggatgctgcacaacaaaatttacggctggcaattggtatggctgctcccagctcgccgccgacaacgttgacacgcttggccttgatttcgttagccgtcgttaaggcgcaccaccatcctcaagccccagtcgcggccttagtcacccgggcactcgctgacattgatgcgagtgcatatgaagaaaatgccaacattgttttttaccttgctgggttggtggcctatgaacaacatgattcccagttggcggtggcccgtttgacgcaggggttggcctttgcgactacacacgattcacactacatgctggctaatatttatcagttgatggcgcaactcgcaatggcggcgggggagactgccacggcgcaggttgccagtcaacggtcacaagttttcaaagacctgtttaaagaacaaattaacgaccgcctgtaaattatcagtattctgattttatgttggcgtccccaccgtgtattttataatcaccaactaaatacatgtgcacttgatctaacggtccgttattgatttggagtggttggccgtaataacgatgaccgggtcaggatgaacattgggggttataaaatgacaacagcattatttaccaatcaagtattaacacaggcaactccagcaacggtgcgagcattgctagcagatccgctgaacttaccagcatgggcgactgccattaccacggtcaagccaaccgcgacggggtacgtgttacagcggtccggttcggcttttgatcagccggaacagttgcaggttacagtcggcgctgaccaggtcgtttatcacagtgaggggggccaattgggatatgaaattgtgttcaccatgacgccattggccgagcgaactgcggtccaggaagaagtctcccttacgactacaccgccgagctggctaccgttgccactagtgaagcccgtcatgcaacgagactttcagcggaagttgggtcaattggcaacattagcggaggaacagccgaatgacgattaatgatgggatgacgttaataaaagtgttagtgacgtggtggtctgtcagttggttattacgggccactttgatcggcgttgttggaataattgcctatcgttttttgaagcagcgtcaatttaagtgagttaagacgatgacagcttttatgcctaatatctaatcgtaactattattatttagtgtgcgtttaactatcatccgaaaactaattccggtattctatgggtattcttttgaaggaggaaatctcatgaatcaaccagaattacgtgacccacgctatttatataagactgatggctttgataagcaggatcaggagacgcccgcactacaagctaagatgcgtcctgaacctgattgtggtgagaagagttaccaaggacatgataagttgttgaatcgacgcgttttgatcacgggtggtgattcgggaattggccgggctaccgcgattgcttttgcgcgggaaggtgctgatgttgcgattcagtacttgccgggagaggagccggatgctgaggcggttgccgaactagtgcgcgctgcgggccgtcaagcgttattattaccttgtgatttcaaggatgttgacgttgtgaccgacctcgtggaccggacaatcgctgaatttggtggtatcgacacccttgtcctaaatgcggggcaacagatttcacaaccttcactggctaagctgccgatcgaacaggtgcgtgcgaccttcgaagtgaatatcgtcgcgatgtttgcgttggctcaggcggccttgccaaagatgcccgctggcggtagcatcgtcaccacgacttcgattcaagcctatgcgccgagtggtcatctattagattatgctgcgactaaggcggccatcaagaactttacgattaatttagcagccgaagcggccgaaaaggggattcgggtcaatggcgttgctcccgggccaatctggacgcccttacaactagatcaaggccagccaatcgaggcgctgccgaaatttggccaagacaccttgctcaaacgagcgggacaacccgcagaactggcaccagtgtacgtctttttagcttctaacgacgcgagctatgtgaccgcgcaaatttatggcgtgactggtggcggcgtgattaattaggtgttcactgcaagttaattcctgattggcttgaataaatcataagtggctaccttggatggatacattcaaggtagccactttagtgtgtttaatgatctgatgaggcgttcattaagtaatccagcgctgccgttcccaccgctttggctgcaattagtaaacagtcttcattcatcataaaatcagggctgtggtgcgggtgggactcacccggagctggttgacagccggcatagataaaggtgctgggtttggcttgtgcaaaataggcgaagtcctccgaggggtcttgggggccgcagtcgaatattttagtaatttctggaatctgagcagcttgaatactggtgatgacgcgctgtgtcagggttgcatcattcatgagtaccggataattatcatcgtaatcaagcgcagcttggacaccgaaagtcgccccgacaccgttcgcaattttaataatctggtcacggattgtctggcgcgtggtttcgtccataatccgtacatcgcccttgagggtgacttgcgctttgatcgcattgaaggaaccgacgccgtcgaatgagccgatggtgacactgccggtatcaaatgggtcaatccggcgggaaataacggtttgtaaggcggttacaaagtaacttccagcaacgattgcatcgtttgagaggtggggcatcgaggcgtgcccacctttacccgtgaaggtgatcgtaaaattagcccgcccggtctgcgtcgcatttaagtgataggcaatcgagcccgtcggcatggtactcatcacatgcagcccaatgacgttatcgatgccgtctaggacgccagcagccaacatacccttagcaccacccggtgatacttcttcagcgggttggtggataatgcggacgcgaccacgtagctgatttttcagcccgagtaaggtcttcgccagtaccatgagataagcagtatgaccatcgtggccacaggcgtgcatgacattggcgttttgcgatttaaatgataagtggttgtcttcttgaatcgcgagggcgtcaaaatcagcgcgtaatgctaactgaggtccagggtgaccgctatcgatgtcgacgacgaagccgtacccatcaccataagcggtggttgagacgcccagttcacgatagaacgctttgatgtaggctgcggtttgttcttcatgaaatgaaatctcggggtgggcgtgtaagtggcgacgaatcttgatcatttccggctccgccgccgtgagttgttgcatgagttgtgcttgaagggtcattagaatcttcctttctgattgttagtcaggtgctatcgttagtgtatcatcaaataagaagattagtggcaatcacgcaatgagttagatcaataaattatggggcgtgaggtgtattaggaacattgattattactagaagttgggaccccttatttaatattaattcttattataaagtctgcgataactgaatgacgttattaggtgggatataaccgaacatcgtattcattatttctcgcacatatactgaattattatcatcgtaatctgattttgcaaaagatatgatatattgattgtcctgactgttaatttcaggtaccctaaacaggagaccacaattatgaggaggaacgattgatgaagattttgatgccatattttaagcggtatcgactagacgtctggattgcgatgctgtcggtcatcgtcttagtgtttgcgacgttatggcaaccgcgattattgcaagtcattatggaagccattatcaagaatgatcaggctacggtattccgtgaagggctgatgttgcttggtttggccgtactgggaatcattggtgggatcgtgaatacgatatacgcagcccgggtggcccttggtgtggcgaccgacttgcgagctgacctatacgctaaggtccagtcattagcctacgctgacgtggaaaaattttcaccgtccaacttagtggtacgaatgacgaacgatattaatcaagtccaacagattgtgatggctggctttcagcagattacccggattccattactattcatcggggcactgattctcgctgtgatgacgatgcctgagcagtggtgggtcattgttgtcatgatggcggtaatcttaggggtcgcactgattgcggtgcggcgaatgactaaatactttgcacaaacgcaacaagatattgaaaacgtcaatacggttgcccgcgaaaacttaatggggattcgggttgttaaatcgtttgttcaagaaccaaacgagatcaaaaagttttcggccgcatccgatgaattaaccgctgtgaccgctaaaattgggtactggttcgctattctaatgccagcgttctttttgacggccaacgtggcggtcggggtcgccgtttacttggtcggtcaaacgattacgacgcacccggcctatttagcagctattacgagttttatttcttatttaatgcagattttatttgccgtgatcaacgggggatttctcatgacttttgcgtcgcgggccgtcatctcacttggtcgaatcggcgaagtgatgactaccgaaccaagtatgacctacgttgatggcgacgcggcgcccgtagctggtgatattcactttgaccacgtaaccttcacttatccgggagatgcgcagccaacgctaaaagatgtgacctttacggtaaaagcagggtccatgctgggaatcgttggggccactggatctggtaagacgacgttggcccagctgattgcgcgcttgtatgatccggatagtgggacggtctccatcggtggaattgatgtgcgggccttaccagaaaaagcccttcgatccacggtggcctatgtcttacaacggtccacgttattttctggcacgattgcgggtaacttacggcaagttaagccggacgcccagcctagtcacatgcaatgggcggctaatattgcgcagtctgcggaattcattgaacggttgccacagacgtacgatgcccccgtggaagaacggtcacagaacttttcgggtggtcagaagcagcgactagcgattacgcgtggcgtaattgccaatccagaaatcttgattttagatgatgcgacttcggcactcgatgcgcgttcagaaaaacttgttcaagaagctttggatcgcgagttgaagtcaacgacgaccgtggtcattgccgaaaaaattgcttcaattattcgtgcggatcaaatcttagtgttagataatggtcgcatttcgggccaggggactcaccacgaattgcttcaagatagtgcgatttatcgcgctatttaccaaacgcaaaaagcacgggaggagggcttacatgagtgatttacgcaatgctggtaaatattactggcactatttaaaacgctactggttaggcttcttactaagtgtgattctgattgccttttcgacttggtgcattgtggtcgcaccgacttatctgggacgagccgtggaggagctgacgcagtacttgcagcagtggacgaatcaagcgactcgggcacaagcaagcttgcaaccgttcaaccggaccctgatcatctacgtcttgttgtatgtcggtgatgctagcacgatttttattgcgagcttgatcttagcacgcgtgacggccttttcgaccgggacaatgcgggtaggcctatttcggaagatgcaacggatgaaggttcaatactttgatacgcatagtgacggggatattctggctcggttcacctctgacctagataatatttttaatgccatgaatcaagccttgctagaaattttattagccgtggctcagtttgttggcctgctaattgtgatgtttaatcaaaacactacgatggcgtgggtgacgatggcttctacgccggttgcattaattatcgcggcgtttgtcatgcacaaggctggcgtcgcggtgaaccaacaacaggatgatatcggtcaactgaatggttatatcaatgaacaaattaccggtcaaaaagtcttgattaccaacggcttacagcaggactccttgaaaggctttcatcagtataatggtaaggttcgccagtcagcgttgacgggtcaaatctggtcaggtattttgaatccactgatgcaagggatgtcactgcttaacacggcaattgtcatcttctttggctcatggttagcgctgaatgggagtatgtcgactggagcagctttggcgctggtcgtggtgttcgttaactacgcccaacagtactaccagccaattatgtcattgactagtttatatagtatgattcagttagcgattactggtgcacggcgggtcgatgaagtccgtaatcaaccggatgaagtgagccccgctaacggtcaagcgctcgacgggattcatgatgaattactgattgataatgtgcgctttagttacttaccaggtaaagaaatcttgcatggcgtgtcgatccatgtgcaccgcggtgagatggtggcactcgttggcccaactggttcggggaaaacgacggtcatgaatttgttgaatcgcttctatgatgttgatagtggtgcgattacgtttgatggggtgaatattcaagactttgatctccaggtgctacggcaaaatgtcgggattgtcttacaggaaccccagttgtttacgggcacgattgcggataatattcgttacggggacccaacggctagtatggatcgggtcatcgatgcggcgaagcaggctaatattcatgactttgtgatgagcctgccagatggctatcagacgcgcgtttccgacgaacagagtattttttctgccggtcaaaagcagttgatgtcaattgcccggacgattttaacaaatcccaagttgctgattttggatgaagcgacttcgaacgttgatacggtgacggaagccaatattcaagccgcaatggacaacgtcatccaagggcgaaccagctttgtcattgctcaccgcttgaaaacaatcctgaatgccgataaaatcgttgtattgaaggatggtcaaattattgaacaggggaaccaccatgatttattagcggcaaacggcttctatgcggaactgtatcgtaatcagatggtctttgagtaatgaaagtataaggagtcggacatggcagggcaagagcaacaagtgcgggtttcaatcccagtctcagcattaaaacgagccgggattgatcgcgatgatcagttacagttaaaggtgcgcaatgacgcactagtcttagagaagattaagccacgtcaaccacagtggcagcaatacttgataatctggccgctgttggttgcaatcctatcggggttagccagttacgggtactggtggtttcaaaaagtgcgaccagttccactgacaggtgcgcaatcaatcgggagtttgacgattgtggccggtgtggttaccggcgcagtgctatttgtcggctttttcttaaaaacgcgtaatgatccagaaaatcgattttcgcgccatatttattggcggaactttccagttattacgattgcgtttattatgatcttagcctttgcgctggtcggggctttctgggtattagaattattatttccagatgtcatcttcgatcgctttacatctatgttgctactggtcttgtttacgtattttgcggatgcgttcatgattagcgctgcgttgacgataaatgcgcggtcgttatcaacgattttaacggtggtgattgtcagtggctgtgttatctcaatggccgccaatggtcaacggcgatggtggcagcataatttaagctttttagggacgcatgccgctgaaaattcctggcaattcaacttgacactgattttttcggcgttattgatggtcgttctgattgactatctatttgtttcacttagtcgaatttatccgcgtacttggcgaacgtcaaccttgcggatattgttgacgttgaccgctgtcgatttcggggcggtcgggctatttcctaacaacctgacgtttcactggttacatgacttagttgctggtggcttggtcacgttgttagtcttgttgattgtgggggtgcggtggctattaccagccgtgacgaaagattttctgtggctctcatacggcgttggcgtggtgctattactactcaactttggttttcgctggtttgggtatccatcgctgacggcatttgagattcaagcctttgcgatttcgtttggctggttgctgatgctattttcacgtctacaagcgttagtcaatgaagacccggaattgttgacgattaagttggagcaggaaagtacggcagggcaataagtgccacgttgttttgaaacggtggctgagtatattaataataattgaatcagataaaactggctgctagacacggtttaaagtgtctagcagccagttttattaattatggatgattgttgaagcgggttaggtgtaattgattacttttaaatgttcacatttagcgatgctgagccatcaatttgacttgtggcaacatgttatcagtgcccggttgagaaataccaaggctggtattttcgtatgctgttggctcagcaataatcttcatgattaaatcagcaatactagcgcgtgaaatcatggttcctttgaagcgttcacctttgtaagtcagttcatagtcaattttggtatcgtcggtcatataggccgcacgaataattgtagcaggaatatccgatgattcaattattctggccgcatgtcgcgtatcgtttttagcagcgtgaccgactacctgttcgacccaagcgccaaatggattaggggtttcgtggtagagtccggatcctgtgacccaaataagatggggcacatgattgcgattcattgacgtgataatggtctgtgccaataatgccatattcccggctagatttgcatagacgatatcctgattaggcataacagtgtctagtagctgtgaatcactgacatcaccttgaataaccgtttctcgttctggtgaagtgactagtaggcgccctgcatttcttaagactagtgtcaactggacgtcagtttcggctaagagtcgttgttccacaatccgcgcaattcgaccgttagcccctaaaattaaaaccttggtcattctgatcctcctcgtattagtgaatagtgtaaccaccgtcaacagcgacggcttgaccaaccatgtaactggcagcatcactgcaaagaaagagcacgacttgagcgacttcttctggtttagctaaacgccccatgggaatttcgcggactaggtcgtccatctcctgtcgttcagtatcatccattcgggcaaccattggtgtatcaatgattcctggacacacggcgttgatccgaacattccggtcagcgtattctaaggcgctactctttgtcaggcctaagacgccgtgctttgaagcgtggtaggcagttcgatcagcaataccaacgagaccacccattgaagaacagtttacgattgcggctggtgttccctgagcacgcatctgtcgtaattcgtacttcatactgagaaacatgccttttaagttagtatccatgacatgatcatattcttcaaccgatagatcggcggtatcggtgactggactttgaatcccagcatcgttataagcatagtcgaggtgcccaaactgagcaactgcgaatttcaccattccggcgacgtctttgggatcagcgacgttacacttgaatgaaacggctgagtagccatgatcgactagctgttgggcttcgtctttaggttcatgatggccagctaaaatgacgtgagcacctgctttggcgaatagagtggcagcactcaggccgattcccgtgcgtgcacctgtaacaataacgactttatctgtaaaattgaacatgactttctctccttaattaatcttcttcaaactgcattttaatatttcttgatgaacggaattgtttcaaatcgccagcattaatgtgaccaattttttgaaggttactaatcacttcgccagtttgctcataaaaaatcactaagctgtgtcgcggtgtccagtaggcgatatcaccaactgcatagccagtagtgtgtgcctcgttagcagggagtgcctgctgaaaacgatacgtcaattcacggttataaaggttgagcatcggcagtgttagtggtagttgtgaaagtaacgctgcggtggtggcattttcttccaaatttgctgtgaagtggcggtcgttggctgttatcttcattttcttcattatctagtacctcctaagccaatgcgttatattcgtcattactaacgggtgatagccattctggtgtgcctgcagtgatggcaatgtgactgaaccaactatctttagtagcaccgtgccagtgtttgataccgtcatgggtgatcaccacatcaccaggatgtaatcgctgtgccggttgcccggcttcttggtaccagccttcgccaccagtgactaataagatttgatagccattgtgatggatatgccagttgttacgggctccgggttcaaagctgacgttgctgacagttacgttgacttgctcgtctttcactagagcgttgtggtaacttttaccggtaaagtattgttgaaaagcaacgtttaaatctcccattgcaaaaatgccgtgttggacgctattttcattattgttcattgttaaaaacacctttcatttaaaattaattgtgggctaaaatttgaagctcggcttttgttagtacgtttcccactagttgttcacggaagtcgttgtaatagaagcggttattcaacggcaagttgtgcttgagtgcaaatacggatagtgtatatcgatgaggctgatcaggtggattcggtccggcatagtgatcggcgaaatacgaatcgtttaactgataaaagcgtgacatccatgagttttgaccttgggggccctcaaaattacgactgaaatcggctgggatttctgccatgacaggaatattggtcgcgagccagtgaatgaacggaaaacccgttcgtgggacggcgtcgtaatcaatgagcgaaatagcaaacgcagtcgttattgcaggaattgatttgatttcaattggaaacgatagaatcggttggcctgagtgtttgacgttcgcgttactggtatagattagtggtaaaaagccatcgtctaaatcaactttaatttgcattaaaccgacctcctagtaaaaaccaggtttgttccaagcagtattgggttcagcgacgccaatgctacttcgctgatataattggggattgtgaataatttcagtaatcaggtcagcaacggcttggcgtgtcacctgcgtatctttgaatggcatcccctgaggaatgaccttgtagtccgtatgctggtcattattatatagccaggccattcttaaaaatgtatagttcagtccactattatcaatcacggcagcagctcgcttgatttcagtataatcacccatcatttgggcattccaaataccaaatttaccagcgacttcatcgtaaatgcctaaaccacctgcgacaattaggcgctcgacaccattttgcttcatcgcatcgacaacattttgattggcggtggtgaaatgccccgttgccaagtaaacgatatcttgacccgcgattgccgccgtaagatcagcggaattattccaattgccgttcgtgagggtaacctgcgattgggcggcgtactgatgaagccgtcgagtagcttgacgagcaaatagtgtgagttcaacatcgttttttgcaagtaggcgtggaattaaatattttgaaatgttactggtagcacctaataaaataacttttttcattgtaagaacctctcttttaaaaaataagacttaataaagttgctacgcccaaactaagtacgaggaagatgaggcaaaattgccaattccaacgtaccgagacagttgctgagctgacatgtaacagggtcgcgacaatcatgacgatacctgcaaacggtgataacatgtatgcaacgacgcttccgatattcagactcaatgcgattaatagtggtgaaagggcaatgtgcatggtcataataatcttgccaattagtgctactgatgctagtgggtgaatgccaattagggaaaccaatacgacaataatgggaattaaaacgatcaataaccagccaaggtgagcaaagcttggtgctaacgcgtgggttagttcgctactgatagtggaatgttgaaaaccgtacgtgaacgtaccgattccaacaaagaacggcgcaagcgctgcaccgcttgcaattccgtgttgccaataatcaaggctagctttttttagtgcaaatttgaaggctgtttggcccgtagtcggcttgagccctaatgccgtgacccaaatcaggacaattagtaaaccggaaagtgtaacagcgttcattgaacttacgactttgctttccattaaaacaaagctgagtattagtagggcaataacggccgccactaaactgacaagtgatgcgtgttcggtaaaacgagtctgctgcttagtattggttgtcacgggctgaatccgcatatacggttggttatattccatcaaatacgctagcaataatcctaacaggcctaaaatcaggcatggtatgaataattgggtccacccgactttagtaacggtactgattagaaagattgttgctgctccaggtgcccataatgtgccgagcgtaaatccacgggttacggctgttgccgaaaaacgggtggcgtctttgacttggcgcttgatactgtcgcctagaattgataggacaatggcaacggtccccatggagagaatacttgatagtaggtgcgtgacaatcatgacaaaggtgaaggtttgtttggggccacgaatgtgcttttgcatgaatgcttcgacagtagcttggtagttgccaatggtgacagggattaagaaaagttgcataacaactagtaacaccacgatatcgaccattgaagtgattgccatggctagaccgttgattgataaacccgtagtacttagcagtcccaacccagcaatgaaaaagatcaatgtcgcgacttgaaaagagcggcttaagctttgaattccgagaattgagaccccgattgcaagcacggcatttaatagcgtcaagttgacggggacaattaagcttagtaactgaatgattattaggcttaaaactagactgtgataaatcgtcgctttattgatagaccgttccattcatgaatcgctgctttctaatattgatcgtggattgtcgtcatcgattagccttgctttgtcgggtaaatggtaaattcattgacgttgacgtcatctggttgtgcaactgcgaagtcaacgacacgggccactgcatctggggtgataccgacggatgcatataatttattcataccttgcttagcattggtatcggtaatggtgtgcaataattcagtgttgatagctgccggatagaggctggtggtccgaatattggtgtgttcttgagcactttccatgcggattacttccattaaattgcgtactgcaaatttagttgcaccatagatgccggaaccagcgaaactcttaagcccagctactgaagatgtcgtaatgatttgaccatacttttgattggtgaaatcaggcattactgcggcgacaccgttcaaaacaccttttaagttcacatcgatcatggcattccattcatcagtttttagtgcactgattggtgaagtcggcatgataccggcattattgaaaatgacatcaataccgccaaattctcgctttgctaaagcaactaacgctgttaagtcttcaggcttagtcacgtccgttacgcggtaagtggcttgcccaccttgttgctggattttattggctaatttctgtaggcgttgttcacgccgtgcacctaaaacaactttggcaccatggctggctaacaatttggcacttgcttcgccaatacccgatgaggctcctgtaataacgataactttgttttttactgacatatttgtttcctcctgattaatttttttgtttatttaaaatgtgatggtaatttaagacgtccattgtggaaaaatcatgaccggaaagctggattttttcaccatagggtgatagtgaaatttgattgtgcccaataattttccaagtaccggaataaatattagtgacgtgatgttggttctccttccacttgtgatccgcagtgaaagtgatttgttggtgaatatctttgttgtggtgattgatccaaacaccaacgacatccgcttcggtcagatgcgagttgtccgaatgggtaacacttgtctgttgcttggtggcttggttagacttgtcggtggttggtgagtgttgctgaactgcatagacgatgacgacaagtgcagcgacggtaacaataatttgaaaaatagtttgcataaactttttgttcaattaatcatctcgtttctgatgtgctgtgcctcaactacaatgactagtatagccagcaacgtgcctcctgagaagaatccgttagttagcttagtattaacttttagtttatactagaaggctaggaggtgaccgttgtggattttaatcaattacagacgtttttacgagttagtgagtatggtagttttacgaaggcgggggaacagagttttatatcgggtactgcggtgatgaaacagatcaaccggctggaagcggagcttaacctaaaactattcgtccgaactgcgaccggggtccaactcacaccacagggtaagaagttccaaccgtatgtgcaacagttgctcgatttactaaacacggccattgaagagacgcgacgggtccgttcagacgataagcaactgattttgttgggaacttccttactacatcctgctgatgccttcatgtcattatggaaagaactggcaccaaagatgcctaaatttcagattagattagttcaattgcaggaagacttgaattcgagaaatcgtgagtatgcgatgcttggtcggagtagtgatttaatcgttgggacgttcgatagcacaactttgaagcagtcctttagtgcgatacagttgggagcgtatcactttggaattgctgtccgtagtgataatccattagcccagttggatgaaatcatgtacagtgaccttgcgcatcgtaaagttctgatggtgtcaacgggaattagtgagaaaaatgatctggttcggagtgaaatgttggcggcagaacctagtattcagccaattgatactagcgggcgttatgacatcaatacgtttaatgagaccgttgaggagaatatcgcaatgatttcgcttacgccgtggaaaagaattcatccgaatttagttacagtaccgctgaaaacgtccgtaacagtaccgtatggtctattaagcaccaagttcccgggtaagaagacggcagattttctacatgaatttacgaagttggtcccgactgaaacgcagagccactcataaaatgacattaaaaaggcaactgttcgtggtcacggtacgtgctggtggactttttggggtttgagtctaatttgaaacttgcaatcatttgttaacgaatactggcattcaacctgagttaaatgtggtctgaaaagagccccatggtattgttgaagtacgtgagtattaagtttgcattgacatattgtaaaatgattttctagaaagttgtagaagtttatatctaaatcttttgagctactctctagatgcatgatttgcaattgcaatcagaaatgatataaagtttttaaactttaggcttgactataaacgaatagacgtttattatacaagacatgcgatacaaagataacaacaaaaaagaagcgatttatcaagcaacaattctgcttttaaatagagacggcttttcatcaacctcaatgtcaaaaattgctaagcatgctggtgtttcagcttcaacaatttatatctattttgagaataaagatgatatgctgaagaagttatacttggatactaaacagaaaatgagtacccaaatgttttctgacacgacagatagtgatgcaaaaactggtcttgccaaggttattcgtaactatattgattatattgtgaataataaagatgcttttctcttcttgcagcaatttacgaattcaccttatatgagtgaatttgatgatcaggaagcaagcaactactttacgcccatgtatcaaatagttaaaagcggccgacaggagggaacatttaaagatgtggacaatgatatattatttgcctatattgagccgccaattaccgaattagccaagcgttattttagaggagaatcaagttttaccgaggaaagaattgaagccttgattaggttagcctggagtgctattaaaaaatagcactttcatttcgctcctatagtgaacgtctattcgtttattatagagctaaatttcacaatcttttattcgcatactactaaaaatgactggagatattatgatgcaaaagaaagtgacttttcagaataacgaacacgatatggctggtatcttattcttcccagatgactttgatgaaactaaacaatatgccgccttcccagttgcatcgccagctggagctgtgaaggaacaaattgcaactaactacggttcaagattagctaagtacggctttattgccttagcctttgatacttcacatcaaggtgaaagtggcggcaatcctcgtcaattagaagcaccttatgaacgtgtagaagatattaagtgcgctatcgattatttaacaaccttgccttacgttgataatgagcggattggtcagtttggcgtatgcgctggtgccggttattcgatgcacacagccatgacggatcgtcgcattaaggccgttgccgttgcaagtatgagtgatccagcatcatggattcgtgacggatttgatggtaaaagtcccgttgatgcacaattggcactactagaagaggcttcaaaccaacggactcgtgaagctaatggcgctgacccaatttatggcacctttgttccagaagaagtcactgagggtatgcctaatactttggaagaggctcacgaatattaccggacggcccgtggtcaacacccacgttcaactaaccaagtatcaatgatgtcaattgacaaaatgacggatttctcaaccttcctatttgctgatcgttatttgacgcaaccgattttgatgatcgctggtactaatgccgacacattacgtttctctgaagacttacttaaaaaagcggcttcaaagaataaggaactatttaccattgaaggtgccactcacgttgatttgtatgacaaaccagaatacgttgaccaagcagttgcaaaggctgcggccttctttaaagaaaacctttaataaaaagtaaccaactcaaatgacgaagaaaggattggttgatattgactgaatcaaatggaaaagtcgctttgattacgggcgccgaccgtggaattggatttgaaactgccaaagaattaggtgcccagggctacacggtgttaatcggtagtcgcaacttagagcgtggacaaaacgcagtggataaactaaaagcaatggatattactgctgatacccttcaaatcgatgttactcagcgctatacgattcaaaacgcagctggtcaaattaataagatgtaccataaattggatgtattaattaacaatgctggcattgccatggcggacgacgtactaccaagtaccgtgagtgaagaggttctgcgtaaaacgtttgataccaacttttttgggagtttcgtagttactcaaattatgctgccattgatcaggaagtctgatgctggtcgaattgtcagcctctcctcttcggttggttccttagaatggcaaagtcatcctattgaaggtgcaccaattaacccggcttacgctgcatctaagaacggcgtcaatgcgttgacggtgatgtttgctcgcgaattagccgatactgatattaaggtaaacgtggctgatcctgggtggactgccacggacttaaacggatttaatgccccacgtagtgtcgcggaaggcgcaaaaattgtgattaaactggcaactttacctgcagatggtccttctggtctactgattagtgaatctgggaaagtcgcttggtaagtcgtaatacagtgaggtgatcaaagtgaacgcgcaggtcgtttatttttcaaatagtggtaataatgaacgcttagctaaaaaaatttctgcttattatacaatcactgcaacaccaatcgtaccagttaacgcctatccgactagttatgctgctttaactacgcaggcaaagcgtgaacggtttcggcatgttgaggttccaattaggccgcttgaacttaaaatggataccagtatgttaattttagtatcgccaatctggtatgcagatttacctcgcccggtagttacttttttgaagcaacttcaacgatcatatcaacgagttgtttttatcagtgataaatttatggtggggttcggtacttgtggacgaactttgcgcaaatatttaccagctacaacgataattgaaaaggtagcagcaagtcgtggcaacttctctccgattatggcaacccttggaaaatagtttgagaggctgtgacataagtctctagaaacaaaacaggtctggaaaaatccgaagatttttccagacctgtttttgatataatagaaaataaaaaaagagcatcggtcgcacccgatactctacgaaattatcctcgaaaggacattcctaatatgcaagattattataacatgaatcaaaccactttgagtatcgccttggattaccaaccagaagagcatcatcctgctcgttacatcaaccagcttgttgagagtttaaaactaaaatatgattaccagtttggccgtccgcgggaatataacctcggtaccatgttaaaactggtccttttagcgtacagctatggcattttcagcagtcgtaaaattgaacagtttgcccgtgaaaacaagccagctgggtggttaattgccgaccaaattccgtcctaccggacgatttgtcgctttagaatttctgatgaactggccactttgacaaccgatagcttatcacagctaacccaatatcttcgtcaaaatggcatgattgatgatgtttcatttattgatggaactaagatcctagccgacgccaacaagtatagctttgtttggaagaagaatacgatacgatttgacaagatgaatcgcgaaaaactcgttgacctgttaggcgagcttcatgaagctaaaattgtcggtgaaattccggcaggatcagagctgactcccgaactattggatatcatgattagcaaggttgaggatcacttagtggtccttaatgaaaccgtggaagcaactaagcaggtttccccgaacccagccaaacagcaacgccggactgttaaatcacaaaaacgtaagttggataaacgacgtgataaaatgcgtgaacaccaagcacagcaagcaatctatggtcagcgtaacagctactctaagacggatcacgatgccacctttatgcgggtcaaggaagatccgatgcaaaacggtcaattaaaacctgcctacaacgttcaaatcgccacgagtaatcagttcattacgggatatcggcttttccaaaatcaaaccgacacacgaaccttacaaccgtttattgaacatttaaaggccaacaatgtgttaggtcacaccatcgttgccgatgccggatacggttccgaaagtaattatcggtacttggaagatgaattcggtcagcataccgttttgattccctacggcacaatgcttaaagagaatagtcgaaaatggcaaagtgatgaccgtaaggttatgaactgggactatcatgaaaaagatgattattttatcaatccgcaaaacgtccggtttaattttaatgcttatcgtcgacggactgataagtatggttttacccgtgactttaaagaatacattgccgaaaagtatgatgaaaatcatcaactaattgccgcggcactaacaccaaaaggatatcttaaaaggatttccgtgaacgaaaattgggaatatttcaaatcgaaacaacgagaattactttcagctccagaaactggtcagatttacgctcaacgtaagatcgatgttgagccagttttttggcaagatgaaggcttctttacatttcaatcgattctcggtgcgaggtttcgacaaggtcaccaaggaagccggaatcgtaatactggcgttaaacattatgaaactggtcacggtagggaccaactttaaaaatcaaaggcgtaagcaaatgggacgagaaaccaaaattcggtttctcgtcccatttgcttatacagaggctagttatgtcacagcctcttttacatagttaaacaagtaaaaataaaaaatgaaattaatgcttgcgttggagtgaacttcaaggtttatgatttcattattgattaacacaacaaggagtcgatatgatgaatacacaattaccgaagggccgcggcgcaatttctgacggcaaagatacaaacttaaatgaagcacctactcgtttcatcacaaagaacgctaaaactttagtgatctatttttctcggagtggtaatactgaatatcaagcaaagatcgcgcaaaaggtgcttcatgctgatagctatgaattaattgccaagaattcatatccaacggattacgatgcaacggtcagccgttcgaatcaagagcaagccggttcactgccacagttagtaactgatgatttacctaactttgatcagtatgatttgttactgcttggtagtccaatttggggtatgacacttgctaatccgatgcagaagttcttagaacaatttggtagtcaacttggtggtaaaaggattgctgaatttacgactaacgcaggatttggtgctggaaacgctcagcgagttttaaaagaactcgtacccgtttctgcgactattttgaacgattatacgattagagacactgaaattgaaaaaacaaatgaccagtttaaagactggcttcaacaaactgaggagaaataaattatgaaaaatgtattaatcttagctgctaacggacaaattgctcgaattgttgagcagcgaattttaactgaacccgcttttgatcaaattaatttaaccttatttttacgagatgcgtcccgtttatccaagtatgccaataattcacgcgttacgctaattgaaggcgacattaccgaaccgcaggctgttgaagatgcaatgcgcaatcaagacattgtttttgtcgcagtagttgatcatgatcctaaaaaccgaattactaataacgtgatcaacggaatgcgtgcaaataacgttaaacgggtcctttctactaacgtgttaggaatttaccaggaagttggtggtgaatttggccgttggaatgcgatgatgatcagtcatggtatggaaccagcaattgtttcagatcgtctattagatgcttctgggcttgactacaccactttaagattaccgtggctaaatgatcgtgacgaaattaaataccaaattacgggtaagaatgaggcttatgttggtgtttcaggatcacgtcaaagtattgctgatgcagttttacaaatcatcgcagatccaactaaatatagtcggacgagcattggattggctgatcctgataccgagggtcagggccgaccggtatattaaaacggagtttggttttattgataagcatagataacaaacttataatgacgacgattattggcgctatgtctttaatcggtgtcagtaagaaaggtggtttaatacatggttaagcgaacactaggtacgactagtccgttaacagttgatgcaattggtttagggtgcatgggcatgagttccgcttatgggaaccccaaaagtgaaaccgagatggttcaattattgcgaaaagcagttgaattaggtgaaacgacttttgacacggctgaggtttatggaccctttactaacgagctactattgggcaaagcttttaaggggtatcacgaccgtattaccatcgcaactaagggtggtatcaaggtcgttgatggaaagcaagttgtggatggtaatccacgcggtttagtggcctcggttgagggatcgctaaagcgattgcagttggatgcgattgatatgtattacctacatcgggttgatcccaaagtgccgattgaagaagttgcggaaacgatgggccaattaattaaagctgggaaaattaaacactggggactatcagaagctggtgttcaaacgattcgtaaggccaatgcgattcagccgctaacagccgttgaaagtgaatattcgctatggactcgcgaacctgaaagagagttgattcctactctagaggaactgggtatcggcttggtaccttttagcccattaggaaaaggatttttaactggaaagattgatgtcaatacgacttttgataaaaacgatggtcgtaacaagttacctcgttttcaaaaggatgctatggaagcaaatatggccttggtacacctattgcatcaggttgccgaaagtaagcaggcaacacctgcacaagttgcgttggcttggttattggcgcaacagccatggattgttcccattcctggtactactaaattatcaagattacaagaaaatatgggtgctgaaaaaatagtgttcagcccatcagaaatgaaaaatatcactatggctgctgatcaagtgcagattatgggtaatcgctatacaccggaacttgctaaacgagcgggattataaaaataattgcaaattacgcttgcgttgaagtgaactccaaggtttattctatattcatgttgttagtaaccgatacaaatttataggatcactcaaaaaaaacaaaaaagtgtttgcgttggagttcacttcaaggtttatgatttactcacttaagaaacatgtctaaaacatttaagaaatggagaatttaaattatgacgatgaaattacaagatgttgctgttgaagacttacctaaaattaacgataatccatggggattagtttaccaagatgcaattactaaaaatgaacctggtaaagtgaacatccacccaatcagttatattttaaatggcttgaagattgcagctaatgtatataccccagctggttacgatccaaagaaaaaatacccggcattaacggtggctcatccaaatggtggtgttaaagaacaagttgctggtttatttgctcaacgtttagccgagaatgggtacattgccattgctgccgatgcttctttccaaggcgcgtccgagggtaccccacgcatggtagataacccagcttaccgggttgaggacattcacggtatggccgatgccttatctcttttcccaggtgttgattatgatcgcatggccgcttttggtatctgtggtggtggtggttacaccttacgtgctggccaaactgacaaacgctttaaggttgttgccacgttatctgcatttaactcaggactagttcgtcggaatggttttatggattctgaagcaaatacgattcaggaacgtctccaaaaggcctccgatgctcgtgaaaaagaagttaggggtgaaggtgttgactataccgctgatttgaaaaaattaacacccgaagaagctgctaagttgccatacgatttgtaccgcgaaggctatgactattatgcccaaacacacgcacatccaaagtcaacctttgtttacactcaaagtagtttcatgaacttaatgacttttgatgcttctgtaaatatggaccttattaatgttcctttactgatgatggctggttcacaggcagatacgttctacttgaccgagaaagcttatgccaatgcaaccgggacttcggacaaggaactgttcttaattccaggtgcacatcacattgaaacttactggaaacccgaatatgtcgaacaagaactcagcaaattgttggacttcttaagtactcgactttaatcacaaaaagtaaattagtttttgaaggcttacaaggtcacgccttgtggccttttattttaagaaaggaatggcctggttcaccatgaatttgtcttaatgacagattctaatggtactaatcagtccctagacaggagtacggtaaattatgaagaaaatcattattacggctgggacacttatactagttggtgtggcaatattaattggtgtattgttgtatggttctcaaaagtcagcaaataaatcacgccaattgattatttacttcacgctctccggtaacaccaaaaaagccgccgaggcattacaacaagatacggacgctgatattattcggcttcgccctaaaaaagcatacccaacaacgtatgatgcagccgttaaagttgccaaaaaggaattagcaaccaagacgcacccggcaattgctaccgcaattctcaatttggaacagtataaaactatttatgttggatttcccacttggtggcggcaaccaccgatgattattcacacattatttgacaccgtaaactttaaaaataagacgattgttccttttacaactagcatggaatccccgattagcagctcggtgccgtatctacaaaagatggcagacaaagatggtgctaaactagttaaaggaattagatacacgaataacaacaatttaaaacgatttttaataaccaacgatttaataacaaaatagaaataggtgaaaacgatgaatattaatggtgtcagtaaagaatttaatgtttctaaagacacgctccgttactgggaaagggttggcttattgcctgaaattaagcgaaatgccagtggttaccgagactattcagaacgggatctaaattgggtttattacattcaggttttgcgtaatggcggcatgtcaattgaatcattaattgagtttgtgaagttgtatcgtgaaggaaatgcctcgaatgatgtccgcaaaagtttacttgttgaccaacgtgatactatgcttgaagagattgctaacctacagaaaacagttgattacttacaatataaaattgatcacttcgaagaccatacgttgaactacgagaaggaaaaattggcgttagatgataagtagtatttgggttgtcgttgtccaatatctctttttctattagaaaaggtgcccgtctattgttgaaatagcgggcatttttaatataactatgactaagatatagttagaaaagctcaccaaaaagaatgtgtgttcgtataatggaggtataaaggttggtgagtttatggaaaacattgttccccgcgaaaagtggctttacaacgatcgtggcatgatgaattggatggggtggattttggctgaccatagtgcgtaccttgaaagcgagcaaaaacatcagcaaattaatccggttaaacctgagatgacgattgctgaaatcaatcgactactgcaatcgaattggcaacagcgcatggccattacgatacagttaaacgttatccggcaggattggtacgcaccagccgttactggcaccgtagtgggctttaacgacgagtgcacatacctccaactcacagatggcgcgttaaaggctgttaaagtgcagacgattcgcaacgtttcactagcagataggacgaagtggtggttatatgacgactccatttgatgatccgagccgcttacccgttcgggacattatgtgtattgattgtaaaagcttttttgcgagtaccgaagcaattcgtcgcggtgaatacccgttggctgctaaaattgccgttttatcccgtgaagaatttaatggtgggcttattttggcagcctctcctgatactaaacgggactacggcgttaaattgggaaccaggaaatacgaaattcgaccagaaatggatattgaattagcatcaccacacatgggtgattatatccgactgaattatcgtattagtcaaattgttcagcagtttactgacgaacaacactgttttatttatagtgtggatgaaatgtttgctgatataacgcattcccatgccctgtatgggtctaatgatgaaattgcggccagattacaggataaagtatttcaggaaaccggcattgtcacaactgtcggcatgggccctaatccgctaatggctaaattagccttagataacgcagctaaagtacaagctccgtggcgtgcgtattggggttatgacgatgttccggagacgctttggaaaattgataatttgaccaacttttggtcgattggtgctaaaacagccgctaaattagaaaaaatgggtattcactcaatttatgatttggcccatgctgatcggcagcagatcaaacgaaaattcggtgtattgggcgatgccttgtattttcatagtattactctgacttagccaagtggtatgtcccacgtagcgataaccgtggctatggtaatagtcaggttttgatgcgtgattatcgaaccacggacgatattgaaacggtattatttgaaattgctgatcaggtagccacttgtttgcgtaaacaccacgttcttggagaagtaatcggactttctgttggcttttcagaaccagatgaacgtggacgtaatggctggtcagcgcaaacaaaagtggatcccaccaatgaaactaacgacttaattcgtgcagtacggtacttgtttgaatcgcggtggcaaggtaacgcacttcgtaatttaggagttcgagtaaaccgaattagtaagccgaccacctttcagacttcactttttgccgatgaaaaagtacacgaagctagaacgcactattgatcaaattcgcgctcattacggctataaagcgattgtacgtggttccagtaaaaagttctctgggactgcaattgaccgtttatacttatttggtgaacgggtgcctttttggggcttaagtctaatttgaaacttgcaattatttgttaacggatactggtattcaacccgattttaatttataattagtcaaaagaacatatgttcttttaacgacaaattattgagtcaggtttcatccaaaagtgagtatcatgggggcgagcgacatgcggctatcgttaaaattcgatcagcagcatgagatttattttggattaccagcaaaatgttaaggtgaacaacgactgcgattgtgtcgattaattggaagggagtcattatattgatggaacagcgaacatacatggcaattgatttaaaatcattctatgcctcagtcgaatgcgttgctcatcaactcgacccattgaatgccaatttggttgtcgctgatacgagtcgcactgataagacgatttgtttggcggtttcgccagcactaaagcaatttggtgttccagggcggccccggttatttcaagttgaacaacgggtcgcaactttaaatcgcgcccgtggtcgccagacttcctatcaggcggttcggcggcatcgctcaatttatcgtgatcagctcctcaaacatgctaatttgggtatcgattatcgggtcgttcccccacgaatgagttattacatgcagaagagtgctgcgatttatgatatctatttgcgcttcattaagccggaacacattcacgtgtactcgattgatgaagtcttcatggacgtcacagactacttaagtacttttcaggtttcaccgcacgcactggcaaagacgatgattcacgagattcaggccgagaccgggattacggcaacggctgggattggtgctaatctctacttagctaaggtggcgatggatattgttgccaagaagattcccgctgacgctgacggtgttcggattgcacagatggatgagcagcaatatcggcaatacttatgggcgcacgagccgttgactgatttttggcgagtcggtcatggctatgctaagcggttggcagccctggggctcaatacgatgggtgacattgcgcgttgttcactaggaaccttgtcggattctcataatgaagaacaattatatcgtgagtttggtaaaaacgcggaactgttaattgatcatgcgtggggctgtgagtcgacaacaattgctgacatcaaaaattaccatgctagcgaacatggtatatatgccagtcaagtgttgatgcgaccgtatacttatactgaagggcaagccgtgttacgcggcatggtgaataatttgacactcgaactggttgctcgccacgtggtgacagatcagttgggaattcgtattgattacgatgctaatgcttcatcagttggcacgcattatcagggtgcggtcaccgaagactactatggacgacaagtaccaaagcccgctcataccaaggtgacattagcgcaggcgagtgcttcacaacacgagctaggggctgcgtatcaacagctttatcaacaagttgttaatcgtcaattgatggttcgacgtgtgaccgttatggcgaaccatttggtcgacgaacagcaggttaggcgccaacctcggtatcaacaaactaacttatttgaaaatccagaagtggcccaagcgcaagaacgagacacacaacgccaacgtgaacgcgatgggcaattgcaacgcgccattttgaaattacaatgtcgttccgggaataagaatgtcgtcattcgcttggcagatctaaaaccgagttcaactacgattgaacgtaatgagcagattggggggcatcgtgcctaatgacaaaggaagccagtactactgcgttatttaatgatacgagtcgctatgcggatattttagagtgctcgcgacctacttcaaggcatttaccaatgccccaagcagaccgtgctgcccaatttgcgccgttcgcggcgttgactggttatcatgacttgattgaaaaacgcgctgcaatctatgcccataaacactatccaaatgctcaggataaacgagctgtggcaacccagttgaagcagattgcagcgttaacaaaccgtccattgctcaacgtcgattattttaacgataccgttggctattatcagacggtaaccagccagttggtgaagctcgattggcatcaagctcggatctatctagcggcaccaaccagtattgcgatggccaatatccgtagcgtttccatagcgaatcaatcctaataaaggacggctccaatgactaagattagtcgttagaaccgtccttttgagattaatgattatttatttcgcggtgatttgcatccgcccgtgctttttagaatgatacagattggcgtcgacgcgttgataaaaggccgttggtgattggtcatcagctgctaattctgataggccgaccgaaatcgacagctgaatctgatgatcattaactggtacggcgatatgattgatagccgcaaatagttgttcagcgaccgcaagtgcttcagttaaatcatagttgggaaagataacgttaaattcctcgccaccggttcgatacagtgcgatttgcggattgttggcacgacagacgatcgtagccacttgcgcgacgtgctgcagaattttgtcgccagccaagtgaccataggtgtcgttgacttgtttgaagtggtcgatgtcaaacatcagcatggtcaattgtgagccgtttttccgactgcttgtaacctgataattaatggctgttttgtaagctgcaaaattttcgattttggtcagagcgtcgtgattagcgaatgcaaccagattctgtttgaggtgtgcattggctgacaacatgctggcgtagatatagagtaaggaagcaaagacgagtaggtaggtccattcttgccaataagttgcccatgataagttgaacttaagcttcatgaaccaccagagaacggccccaaaaccagcacaagtgactaaataaagtgcgacttgtccctgtttcgtttggagtgggacgtgtttacgcaatcggccgagcgccgtaaagaagaggatcagtgtgacggcgtgtccccacgattcccagtagtacagagagtgattaaaacccataaagataaagacaagcggatacaagtaatagtagcggacgcgtacattgagaaagtagccacaaaaaatgagtgcgataagctggaaattcatgaaaatccaggcgtcgttctggcccacaacggcagcttgcatcccaaggacaaatatcatcatgtaaattaagccgtaccagtcagtaataacagattggtcaacccgccaatgatgggtgttgaagaagctaataatccaattttgtgagacccaaaaaagggtcagcacgcctaggatgaaaaaaacacttgtaataaatggagttatctcccaatgtgaccaagtcatacgcaaacacctttcaaatcgcaaaaactgcgttggttcgaattaaatgacgccggtataagtatatccctttaactgctaaatagcgactgtgattatggactttaattggctttttagccgttattatcaggaaaaatcagcgggtctcgcgctagatacgccgaacggcaattaaagcagcgcaacaagcctgggttaaggcttaaaatgtccgagttggtgcggtgagcgtgggggcagcatcgttgacgaaggccggggagtcgtcgtaataatacccagttggtcgggacgtgccgtaataaaaccggtgtttaccagccaagcattaatcgttaccggaccgacaaatttaaaaccaacttgttgtaagtgctgtgcgatgcgatcgccagtaattgttgtgcgcgggagttcatcataatactggggctggataattaattgttgatggcccaattgttgccagagatagtctttaaaagactgtgtggtccgaatttgttgaatcaggcgggcgttgtgaatcacggtttcgattttacgacggtttcgtatgatggccgaattgctgaggagattggtgatttgttctgggcgatacgctgccaccacctcaatttgccaggcgtcaaatgctgcgctgaatgctgagcgtttattgaacacgacggcccagttgagaccagcggcaaaaccgccaagactcagaaactcaaataattgttcatcgcgctgaagcgggataccccattcgtgttcaaagtaataccggtagccggcatcgtacggatagtaacgattgaatagtggatcatcatcaaaccagttggtaatcattaaacaagcctcatttccaaatcaattagtagacactaactaaatacggtaaatgggtcggaaaacatgtggataaaaaaacttttccaatcctcctgagaatggaaaagttaacttaaagcgtgttcaacgatgatctttgattacaaggttagttggcatgtggcgaacggttttcgtcgcgtggtcacgcttgatctgagctagaatggtcctcatactgactgtggcagtcaaatcttttttaaaagtatgcacaccaaagctgtcataagtgacctggtcatttttgagtgtgaaccagttcggctggagttgcttggcatctgccttaatgtgtttatcagaccaaaccagatacttagtttgcccctggtcagtgtaaatttcgacctgccaacccaagctgaaatcactaacttcttgccaacgctgaatctttaagtgcttgatcgcgtaataaataatgcagctgtattttaaagcaggctgtttagcaatggtcgtttcggtaatcggttgtggttgttggataacgcgtgatttgtgaaccgtagttgtggtggctcgcggggtgcggtgtaggttgcggtgtagggtgctgagaccaacaatggtaccgataataagaacagtgataatcggaatcagaatttttttcataagaaactcctaacgaataaaattgtaaaacgtaaatattactatttacaagaatggcatttattgctatcctttaaaacgtaatgattactatttaaaaagggagtggcaattgtgaaacgtttgtggctattactaggtggacttgttattggtgggggcttgttaacgggctgtcagtctaagtcaacgactgctgaatcgcataaggtcaacattgttgcgacgacgaatttttatggtagtgtggcaaaagctgtcggtggcaagcacgtcagcgtgacgtcaattatcaacaaaccgtccgttgatccccatgattttgagccaacaccaaccgtggctaagatggttggtcaggctgatctcgtcatcgctaatggcatcggctatgatggctggatgaacaaggtcgtgcactcgacgcaacgggccaaattgattcgggtcggcgaggacgtgatgcatcgcaaggaaggggctaacgagcatctctggtatgacagtgcaacgatgcccgccaccgcgaactatctcgctaatcagttggctaaaaagcaaccccagtatcgcacgtattttaaggccaacgcccgcaagtacatcgccacgcttaagccgattcaacaggaacaggccaagttacgagcgaaggctaacaagttaaagaatcggcaagtgttagtcagtgagcccgtctttgattacgcattgaccagtttagggtttaaggttgctaatcaagactttgaaaatgcgattgagaagggcactgacccagcaccgcaagttatccacaagatgcagcaggcattaaagagtcggcaagtcgccttctttgtgaataacagccaagttagtgataaattagtgactaacatggtgtcattagccaagaagaatcaggtgccagtgttgaatgtgactgaaaccatgccagctaagttgacttatcaacagtggatgttgacacagtatcgccagctcaaccagttattgtccgattaagggacggacctgcaaggcgacgacgcccgattgcgcaacttggacgggggaatacaacgttagcatttcttgaaccatctgtgttaccggcgttcccggggcactgccgacttgaacggcggtgtattcgctcagtaaggattcaaaactagcgaaacgcgtgatgtcgatgagctgagtggtgagctgctggccagtcgtcagatcgatgaaatttacaatgtcaccgacttgtaaggcttggcgttttgcatcgtttaaacggatttcaattgttttgagccccgattttattaacagccattgtggatgaatcaattgcatggtggtcattgaacgtcctcctaatcagtttagtcttaattatagtggataactaacgaaataggggcctaaataatggcaatgatgtgcctgaacaccggatattagtggtaggtagctggcgcctgtctataattaggttaacaatacaagggggatggcacaattggcaaaacgaacagcgattccagttagattacaaatcgttggcacgatgagcgcgttaatcatcatgtatgcgtggggccgctcactaatcggccagccgttgcaattgggcaatcaacagtttacttggttagggttggtttacttgaccggcgcttttctattcttgttagtggccccatggctgaccaatcgcttagcgttgacgccgtttgacttcatagcgatgacggatcatctggcaatggggtggttggggtatcttatcctaattttagtcgttccgatatggtttcagccggccaattccgggcttacactcggcgtgctttccagtgtggttggtggaatttgtatggatgttccacagaatgtgacctggggtatccgggtaccctggacgtacaactcgccagtgatctggaagaaagtcaactggctgaccggactattgttattaatcgccagttacggcatggttggcatcggctgggtatggcccacactgttcccaatctatcaagtgagtgccattgtgggaattatcgtgattgcgttgggttatgcgcaccatttagcccacttgacgtaagttgtgttggtgattattaacacggcaaattgatatacgcggatcataattaggggtcgcgagtggcacaagtcacgttaatcgtggttagttgaagcgttgttaacaatcgttgaacggcaaaaaaggctggaaaattccagccttttttagtgtctttttaatagagggcccaggcttgcatgccttgtgcatagtacaagttaactgcggcgtcgatttgttgttgaacggaaccaccactaatatggatgttttgaaataaaccgtatgcaccacttgcaccgttaacgacgtgtggttgccagttagattcacgattgatgatgtgattccaagttccggcgtcaacaccagtccgtgcttgcatttgaccgagcacgtaactttgtaagttatcacccgaatagctttcagttgccggggtagttgctggtgccgaagcaaccgtctcgttagtttgtgctggtgttgtttgagtcgtagttgcggcctgtgtttcagctggctgggttggtgtggtgaccggtgcctgttgaactggcgctgaaacgaccggtgtcgctggtgcttgactagtaaggtcctgggcgttcgcccctggaatccgtaattgttggcctggtaaaattaaatggccgtgaatgttgttggctgtttcgattgattcgatcgtcgtcttatattcttgtgaaattgcccagacacagtcacccttcttaacggtgtaagttgcgtcggcgtgtgcagaaacagttccggccaatagtaggccaaccgttgcagcggatgttgttaagattgtggttaataattttttcaagttatactctcccatttttgtaagcaatcagcgtgtcgtacaattgttgatcaacaaaaattagtatagcggcgacttattactcgcatgtgtcgctaattttaagaagcgattgcgagattctgagaaaattatggggagcaaatattttactgaatagttgaagactatcgtgacgggacgtatcggtgacaatatatcggctactaatataaaaaatatgacagaaatagcaatataataattactgaaattaccgatagttgagccagttagcaaaaatagcggcaattacaatgtttaacgtgacattcccaatattaaatagttaataccggtattgttcttataagtttaaaagggtgttgattatagaaagtaatttaccgcaacaaaaaaagtcgggaaggattcccgactttgtcttaatagttttagattaaagggcccaagcagccataccttgtgcttcatataaagcaacggcagcgttaacttgttcttcaacagaaccactgctgatgtgcatgttctggaataacccgtaggcaccactagaactgttgcggacgtatggttgccagttggattcacgcgtaataatcgtgttccaagtcgaagctgagacaccagtccgtgattgcatctgacttaaaacgtaactcttcaaattgctaccagtgtagcttgaagtcgtggaatcagttgaacttgttgaagtggtcgtcgcggttgtgttgctagttgaactagaactagtcgttgaagcacttgaactcgttgtgtttgaagtcgttgacgaggtgttgttatcagaactggctgaactcgtcttaatagatagtttttgaccaggtaagatgtagtgacccttgatgttattagtcgtttcaacatgattgatagttgtgttgaatttttgtgcgatggcccaaacggaatcaccgctcttaacggtgtaagttgagtcggcgttagcattgaggacaccggcgaataataaaccagcggctgcagctgaggtagttacgattgtacttacaagttttttcaaattagacactcctataaattttgtgattatcgattaaataagttactgacaaaaatcttaactgcgatgtcattcgcaatcaacagaacccagtctaacgcctccgtgttacttgttagtgtcgcgagttttaagaacgcaatgcaaagattacaagaatacggacttttgtaatcttcgtaaccgaactgtgactttgaaaaaggctggttaaatcggttgataggggacagtgacaagctaagttaatcaagttgaggtttgcctaaaattaacattatgacgtgaaatcacccaaaattcagccataaaaaaagccgattattttagtataatcggcttttagtgcttgaaaatggtgtcaaacacggctatttaacagtttattccgtcactggaaatggatctgctaaaccgagggcttgtttttcagacttcgcttgagcaatttcctcttgcactaattcacgcgcgtgcggatcactatataggtttaatttgtaatccacttccttcagattcttcataatttgggcttgctgagcgagaatggcattgcggtgagtcgtcagcagttctcgtcgttgtgcaatcgattggggacctgccatgacataactgatatattggcgaatagcactgattgccataccggtatttttgaggcaaataatcgtatgtaatagatgaagatcgccgtctgtaaatgctcggtagccggattcattgcgactgacaaagggaagtaagccttgtttatcataaaaacgcaaggtgtacgcacttagtccgaccttatcagcgacttctttaatcgtataggtcaaaaagattcctcctaacacttgccttagagtattgtctaaggtttatattagctatattaacaagccatgatgaaaaaaacaaccaatattccgggggaattaaacatgaataaatcattagtattagtcactggcggtaatggcttcttagccagtcatatcattaaacaattattaacagcgggctatccggttcgggcaacgttacggtcgttagataaagcagctggtgtgaagcagacgctagcgggtacacctaacttagatcgattgacatttgttgctctggatctgacacaggatcagggttgggccgaagcaatgcgtgacgtgacgtatgtgatgagtgttgcggcaccagtatttgttaatcaaggtcaggcttctgatgaggtcactagtgcggccaaggtcggcacgatccgtgttctaaaggcagcgacggcggccggtgttaagcgggtcgtcatgactgccaaccttggtgccgttggcttcagtcgtttggatcatgatcatcccgtcactgaagtggactggacccgcgaagaccaaccggggctttcgttgtatgaaaagtcgaagttggttgctgaagaggctggctgggcgtattgcaaggcgcatgctgatagtccagaattcacgacggttaatgccggtgccatgcttgggccatcgcttaatgggcacgtcacgggtagttataatctagttagtcggatattaactgggcagatgatgccaaaccttaaagtcaatgtcatcgacgttcgcgatgtcgctgacttagaggttcgggcgatgacggcgcctgcagcggccaatcagcgttttctagcagtggccgccacaccaatctcgatgcgggacctcaaaacattgattcaagaacaacggccgcagttggctgcaggcctgacgaaacatttgattccagactggtttgtgcgggggttagccccatttagtgggcaattacgcgagtctagtttgatgatccgcatcaatcacgaggtcagtacccaaaaagcccagcaattgttagggtggcaagcgcgctcagctgatactgcggtattagccgctgtcgatacactggttaagaatggtttgaataaataggacgatcaaaacggtctagcagtagtatttactgccaggccgctttttgtagctactttagtggcaaccggacttagttattttaacaaaagtatatatttttaaaataaaagtattgattttgaaatagaaataggatagtattatttcacgaggaaagcgttttccaaaataaatgacacagaggaggagtttgatggataaggagcgacagatgcccaaggattttttctggggtaattcagtgtcaagtatgcaaactgagggtgcttgggatgaagacggtaagggccgttcagtttatgatgttcgtcctgcgacagcaaccacttcggattggcatgatgccattgatgaatatcatcgttacgaggaagatcttgatttgatgaaggacttacatttgaatatgtatcgaattcagatttcatggtcacgagtagttccagatggtgatggtgagtttaatgccgctgggattgcgttttatgatcggctggttgatgcgatgctggcacgggggattacaccgatgatttgcctgtatcactttgatatgccgttagccttagctgaaaatgaaaacgggttcatgtcgcgccacaccgttgatgcgttcgtccgttttggtgaaaagatgattgcccattttgctgatcgggttaaatattggatcgtgttcaatgaacataatttatactttaccgacgaagtcttcaacatttcagggtacaccaagggtgatcaaagtgttaacgacttataccggattttccaccatactatgttagcgcacgcgcgcctagatgactttgttcatcagaactacgatgacgtgaagattggtggtatgttagcttacaccccggtttatccagaaacagctaagccaattgatattatggcggctcgtaagagtgacgaatttttgaacaacaacttgaatgacgcttacgtgcacgggcattattcaccagaagtcctgcgttacgttgaacaacagggcatcgattatgatttgcaaccaggtgatgaagcaatcattggcaaaatgaaagcggattttttggcttttagttattatcgttcaacggttatcaacggggataaaatacccgttgatgccgttccgaatcgttatctcaattattcatttgaggccaaccgctttttacaagctaatgaatggggctgggcgattgatccactcggtttccgcaacttgattaccaagttgtatgaccagtacgaagtacccgtgttcccgattgaaaatgggattgggttacgcgagcactgggatggccagcatatgatcgaagatgatgagcggattacttatcatgaagaacatatcaaggcgatgaaagatgccatgttgatcgacggcgctaaggtactaggttatctcggctggggcttgattgatattccaagttcacacgcagatatcgaaaaacgttacggagttgtttacgttaaccggagtaatcatgatctaaaagacttaaagcgggttcccaagaagtcatattattggctgcaaggggtcctagcaaaaaatggagatgaattgtaatggaaaatagtagtaatggtgctgttagcaatttcattaacaacaaagttttaccgccaataatgaagttcgttaacactaaaccagttaaagccttacaagacgggatggtctacgccttaccatttattatcattgggtccgtattcttgatcttatctaatattccaattccagctgtggctgctgttattaaggcctctggttgggcagcgttctttaaccaggcctatacagtaacgtttggggttctttcactttgggcggccgttgggattgcctatgtgtatgtgcgtaacgaagggtatgaaccactgcccgctgggttaacttccatggccgtattcttacttttgcaaacgcttaacattgccaatccattagtagctgcgatgggtaaagccggtactgggattaccaatgctgctgggaatgtcgtgatgtcaggtagcgccgtttcacagaatatcgataaattaccaaaggtcctacaaaattttgtgcaagcacccgttactggggttgttaatattacctggctaggtggccaggggatgatcgctgccattattgtcggtatcttagttggttgggcttactccgctatgattcgtaaaggttggaagattaccctaccagaacaagtaccagccagtgttgccaaccaatttactgccatgattcctgccggggtcatcttgattgttgcaatgttaatctttgcggccttcagtgctttcggtaatactgacatgttgcaatttatttacaaggttcttcaaacaccgcttcaaggattatccgattcactcggtggtgcgctggttattgcgttcttagtgccattcttctggttctttggggtccatggtgggttgatcatgggtgccattactagtgggttactgattccgaacacgttcgacaatgcttcattatataaagcaggtaagttgaccgttgcccaaggtgcccacattgtaactaatgaattctacaataacttcattaacttaactggttctgggattacgatcggacttgttatctttacgttgtttgctgctaagtccgttcaatttaagacgattggtaaagttgaatttgtgccagcattattcaacattaacgaaccattcttgttcgggttaccgatcgtgatgaacccattcttggcaattccattcttcttgacaccggttatcgtggccttatccacttatctggtcatctacttcggcattgtgccaccattgaatggtttcgcggcaccgtggacgaccccagcaatcatttctggcttcctgattggtggctggaagatggctatctggcaaacaattacgttggtcatgtcaactgcaatttacttcccattcgctaagaagtacgatgctatcttaacgaaggaagaaggcgaaaaggccgctgcggaagctgctgctggtaacgctgaaattgaaaagatgtaattatagaaaggaattaaataattatggctgaaaaaattattatgttggcatgttctgcgggaatgtcaacctcactattagtgtctaagatggaagctgcggcaaagcaagatggtgttgattacaagatctttgccacctcagcggctgatattgaccatcaactgagtcaagatccgcatcccgatgtcttgttattaggaccacaagttcgctacatggcgaatgacgtgaagaagaagactgataaggctgggattccaatggatatcatcaatatgtccgactatggcatgatgaatggtgaaaatgtcttacaagcagctgaaaagttactcggcgacagataattaggatttaaccgggaaagtcaatgcaatcgtgaatcaccaacgtgtgcggtggttgctttaacatgattgggacttgtccgagtgataatcaaacactaaccaaatcctagattgttttggtggtgggcatctcaggatgttatatatgttacgattcctcactggctaattgctggtggggaatttttttggtggtggctgtggccgcgatacggtactgcgagggtgtgcaggcgagtaagcgagagaagcatgtagtgtggacgttactttggcagtgcttaattttaaaggacggctgctgattcaaaatggctattaatcaaacaaattaaataaaacccttgacctgaaacccgttcgagcagttaggataaaggtaatcaaagaacggtagctggccagcgccattatggaaatctattcatcaaattcgggagggttttatcatgggactattttcatttggtaaaaaagttaaattatatgcaccagtcgatggcacactgatagatttagccacagtcgctgcgggtcagacggggtttgcggtgacgccagaacgccaccatatcttcagtccagtaacgggaaccgtcagtgccctgattccagaacaaaatgcgatcgaactggcagctggaaagctgacggtacggttacgaatgggtgttaataccagcgcaactccggcaacttatgttcatgaaggcgaccaagtgacaccagaaacaccactcgcttttgtggatcaagagcaggccgctgaaaatggggaggatatgacggtgttggtggttgtggataaaggtgggcaacccgctgaaaaaatcagtttatccacaagtggacaagtgagccacgaccaagaagttgccacggttgttgctaagtaggacggatgatggggctaatcgtgtgtaattgtttgcgatgagctgagtcagaaggaatttcatcgcgtcaccacagttgattgatgcaaggtcaactagcaattgcaatgcagttgttaaatacgaaaacacacttcaaagctgctacttttgaagtgtgttttcgtgttcagttgatttttgattggcggttgcaagcaattcaatctgccgcagaatgagcctgtccttgtccacaagccatcagttcagcttggtaggcatcattgatgcgattgagtgcttggtgaaattccgtgataactttgttcatttggcgctgatacttttcatccaacgaataaccgttttgaacttgagttttaggccccgttgtttgattcaagtacgcctttaagtcatcgtctggctgtaacttttcgtataaatcgacattgtctagtaagcggacgatccggttgtatttacccgtaaaggtccgccgaataatctgtattcggtgacgaaagacatagcaaccggcctgaatgacggcttgaggttctgggtaggttgtcgtttgttggtagtgttggacgatttcaggaacaatctgccgaatcgcattattgatagtcggtgtaactaaggccgccgcgattttagttgggtcggatacgccctgttcagtctgtgaggccgaactgaacaagtcactagaaagaatgttcggattggtcgtagttaggtccacatattcccatagtaggacattgaattctgaatgattgagaccaccattttgaaagacagcggtgacatattcagtcaaactaccgtataaaaggtaattagtggatacgtcaaagtatgcagctactttagcgagtcggtccgcgttagctagcgtacgtcccttttcccagtcattaattgtgctttttccagccaagccaatcgcagatgcaagtttggccatacttaaaccagcggcaattcgaagttggtgaatacgattaccaacttgttgtttatcaatctgcaatttgatttcccccctgattggttcttagtatattctaacatagggagggaagcgctcgcattgttaacactgaatatattagcactttcgatgattggcgtggtaacgacagataagtagtatcaagtgcttagtgatacttatgaataattgtcataaaagcggtgctattatttaccggccagccgtctagttggatttcataaggttgttccgtaccaggataaatatgaccgggaatcgcaaccttttgccggtggtcgtgaatgatcaggaaaaacatcgcaggtcgacaaaggatggtcacgtgtgcggccaggcagtcgctaagcgtggctgctaaatgctggcgaatggtcgttagtcccgcagccccttcattaataacgattgaccaatcgaatgccaagtctgaataggcggctaatggtgttaattgttgcatgttgaatgcctcctccaaggtattaattagactaaatattactattagcatacatgcaaatagttgtgatgacgaccatctgcgcttgttatggtcaattaataagctggcttaacagagatcatgcgacaagtgtaaattgccagcgtatactagaagtattatgtgcaaaaggaagtgtcgagaaatgcaacaccggattgctgtgctggcagatattcatggaaacttgacggcgcttaatgctgtgttggcggatgcgcgtcagcaagccgcgacggattattggttcctcggtgatctattcttacccggcccgggtgccgaaaagctctaccagaccttagcggacactgcgccgtcagtatggttgcaaggtaattgggaacaggggattaatgcggtcatgactggaaacgggcgactggatgatccttcacagatttattttgcacgattgaccgcgtatctggtgacccatctgagcaaatcacattacgctgaattagtgcaacggcccattgcgacaacgatggtcgtgaacgggttaacttttcaactggcccataatcagccggaacgctcgactggtcacgacctgtatccggatgaacgccagtctaattttgatcacctagctggtgatgcggatgtggccgtttacggccatacccaccaacaaattatgcgggtgagtcagcggggccagctcattattaatcccggggcgacaggccaaccttatagtccatacgctaagttcatggctgatcagcgtgctcactatgcaatcttaacggtggatgacgcgggtcgaatcagtgtggattttcgaaaagttgattatgatattagccttgagttgaccgttgcgcgtgaacaacaattaccatatttagacttatatgaacatcttcgccggactggttttacgagtacccatgaccaagccttattgggcaaactgaacgctaagtttaattacgctaatgaggtacgacgattttttggcatgcaagcgtgatagttagtggtaagttagtgagttaactcttataatgattgaacaggatacgaggagggttttcatgaactttgcaccatcagaatggtttggctttaacaagcgagctagacatgatatgacgtttactaagactatcaatggcgagaccagtaccaagcaagtgtacgggcactttaacgtgtgggccctgttgttcacgtggttttatgcgctgttcagtgtgcggtgtcgaaccccgtttttcttactgaaaacggcggtgccattcttaggcatgctgtcgttaaatatggtgacgcagctgttttttagtgaccaagttgtcatgagtatcgggttactaggcgatatttggtatggttttatgtttgagacgtggtttagaaatcagctggttgcaaatggctatcaacaaacggcttagtgcgacaggaatagattagcttatcaggcttcccagcaagacgtggggagcttttttgattggggtcgttgacaagcttctggctagtaaagtatcgcaacataaataatatcgtttctttacaaacatctgactaaacactttacattccttaactattcttaaaagtgcagtttgttttacgataaaaaagatggagtgataattttataatgataaagccgcgtgttttaacgaccttattagtttgttcagcaatcttaacaacgacggtgaccccggccgtcgctgcagtaaccccaatggcgactccgagtgagcaagttgccgaaccagttgccagcccggccgttccaacagcaaccttgagtttggcaattcaaaatcaacaattggttgatttaattgggcagacgcagtggcaaacctatgggcagcctgccgtgacgaaggaccctgaatttaacgaccaagtgttgaacttggatggcaaatcagcgttttacacgaccttcacggatcagcagtttgcaaagttacagaatgggatggcgatcgaggcgtactttaaatatgatccagccgccgatgccaatggtgaacatgagatcttttctagccaacagggtggtggtttaggacttggggtgcaaaacaatcaagtcgttttcttcgcccatgatggttccggctataagactcctaaaggcaccttacataaggggcagtgggtgcatgcggttggtgtgatcgataagaataagacggctagcttgtatctggatggccagttagtccaacaagtggctatgcccggtgatttaaagctggcacaaggaaccaaagactttgtgctgggtggtgatgcggttcctggaagtcacgttcagtcaatgatgaccggtcaaattagacaggcccgcttgtatgatcagacattgacgtcgcaacaagtaagtcaattgaacgttgaagcacaggtcggcaagcagccggtcgcacccgtaccagtcgaccaaacgattgcgacgaagctcgttggcccgaagcgaattgcgagtgggcacacttatggtcttaatgtacacgcccggcaaatcaaagctaccggtgccgccccaatcaccatggatgtcgtgtatgatgcggctaagtttgactatgtcggtgcagaacgtctcttacaagggggaaagacgcagatccaactgattgcgcctggccgtattcgcctgactacgacggcgaacctttcaaaagctgaatttaaaatgtatgcgcaaacgcggttagcgcaccttaatttgaaagctaaggccgctggtgagacgcagatcaagtttgagcagctaactaaagatacaaccattgaactagggccagctcaaactgttgaaattcaaggtaagtacgcgctagattataacggtgacgggattattggtgttggtgacgtggccctggcaaacgcagccgataaagtggcagccgccaatgcagctgaaatcaagccttataaacacgtggtcgttttaacgactgatggtggtgggaacccctgggatccgaagggaatgtactatgcacaaggtgcggagcaaggaactaagactcccgtatggacaaccaacccagaaatcatgaagaaacgtcggaatacgtatacgatggacttattcaataagcagtttgcaatgagtacgtcagcgcgggccgtttcaccagcggtttcggcacaaaactacatttccatgttacatggtcggccatgggacacgctacctaaggaatatcaagggactaacgcgaccatgggacaagaatactttgcagactttaacaaaccacaagcaatgttcccatcagtatttaagatgttacaagccgataatccaactcggggcgctgcggctttctcagaatggggaccaatcgtcaatagcatcattgaaccagatgccgcggtgactactaaacagtcagcttcgctgaaatcctttgatgatgtggctaactatatcggcacgccagaatttcaaagtactgggttagtctacatgcaaagtgattatatggacggtcagggacacggtcacggctggtacaatgacaattactgggataagtacgcgcaatatgatgcgctgttcaagcgagtaatggataagcttgaagcaaccggtcacattcatgatacgttagtcattgccaacgctgatcatggcggttctggcaagaatcatggtggttgggatgaatataaccgcagtattttcatggcgctcggtggcgaaacggtcgataatggccgccgtttgcatggtggaagcaatgctgatatcagtgcgctcatcctgaatgctttgcaagtcccacagacaccacagatgtttgacagtcaggtctttgactcatcggcttttcttaagcagactgacctatcgaagaagaaacgttcagttgaaacgttaaagctcagtcgcaatgatcaggaagcaaaagttcaattgactcataaccaaaaccggcaactgacggcatttgatctgcaattggacttagcaggtcgggaagtcgctgacgttaaggttccaaccggcgtgcagattttacggcagacggtcgctaatggtcaattaagattaacagtcagtgccagccaacccgtgactgacctggtgacgattaaactcgtaccaagtaagacgcgtgcggctaagaccatcatgttaagtcaagcaatggctgccactgccgacggtacagaagtgcttgtggatttggataatgataatccactgacgagtacggctaaacccgacgaaaacggcagcacgacgactaaaccagatggcaatggtactgcggtcaagccggatgaaaatggcagcacgacaactaaaccagatggtaacggtactgccgttaaaccggatgaaaatggtagcaacacgactaaaccaggtggcaatggtactaccgttaagccggacaaaaatggtagtagcacaactaaaccgaatggcaacgggactgctgtcaaacccgacaagcatgaaactagcaccacggggagtgggacagttaatacatcaggtgcagacaaaacgagcaccaacgacaatggcacttcaatgacggccggtacagctagttcgcatgcaagtacagtcacggatcgggtgacgagtggcacggtattgcctgaaactagctcgagtgcaactactaatcatggcagtcattcgacaggtcatcatggtagcggctggttaccacagacaggtgaagcggtgcaacgctggctagcagtcgccggcggtgtgttcctcatgctgactggtgcaatcgcggtttggtggcggaagcgacgcgcctaggtaaatataacttggcacgataattttggaagtaagcacggatgaggcagtttctgggaacggtgtgtttctcgaaactgccttttgtgcacgctgatcaacggtggtgatgtcggttgaagtaccagagcgaaccaggttgtaatgtcactccttaataattaatttcaaattatttagcctaatagttagtttttgctgttatagtctaactaaagtgctatgataagattcaataaaaataaggtataagattttttccacagttgtttttttggtaaacttaatgactaatagtcacagttaaagcccttgatataaataaaggggagttggcacacgatattgacgtacagtaaggtagggtgagcgaggatgagctacttagaattaaaagatattcacaaggcctattatttaggcaaggaagctttcccagtcttgaatgggattaatctaacttttgaacgaggtgaattcgttgcgattttaggggaatctggcggtggtaagtcaacgttgatgaatatcattggtggcttggatcggcaatttcagggacaagtgttattgcaaggaaccgcgttagatcatcaccaagagaaacagatggatcagtatcggcgtgaaacagtcggttatatttatcaatcatataatttgatcaaccatctgtccgtgttagacaatgtcctgatctcgttagatatgaccaagttaaatcggtcagaacgtgagcaacgagctaagcaactgttaactcaggtggggttagcggatcaaattaaaaagtacccgaaccaattatctggtggccagaagcagcgagttgcgattgcccgggctttagcgagtgatccgcagattattatcgcggatgaaccgactggcgcattggattctgaaaataccacggaagttttgaaaattttggatcagattgcggcggaaggtcggcttgtaatttgtgtgacacattcgcaggatgttgcgaatgcgggtactcgaatcgtgcgcttagctgatggtaaaatcacggatgacgagcgggtgaaacccgcttatccggtcgatgaaaatcgccaacagattgcggcacgtaagttaccgtggtatgtgccactgaacacggcgtttaaacatctacgctatacttggacttggaacttgattattatcattgggacagcgattggtttattcgcagtgatgttgtttaacgggttaggtaatggcctcaaggggtatattaatcaggaaatcaatgatatggtcaatccccgtgtcgtgacagtgagtcggtatcaaaaatcgagtcaaagtcagcgaggcggcagccaagaaggtaaccagcaggcagctgccatgggggcgagtgtggcgacgaccaatcagccaacgttcagtacggcccaactgagtaaactgaaaaaagttgcgcatgttcagaccgttcagccaattttgagtgcaagcaacgcgacaattacagttggtaataaagactacaccgcttcatcgttaacaacgtggacggcttctaaccggaagtcgattattaaagctggtcacgtggctggtaagaatgaaatcgtcgtcgataagagtagtgtggcgaagaaatggtcatctaagaattggaagcaattggtcggtaagaaagtgactgtggcttttcagacaacgaataagagtggtaaaagtgtcacggttaaacggcaattaacggttgctgggatcacggacagcacgactggaagtggtgtgaacgccgtgacctacgccactatgaaagatatgcggtcagcaaagaatttaagtacgcagccaacttcagttgcggtgaaagttgattcgcgggagcataatgatgctgtaaccaagcagattaataagctaaagattgatggcaaacgggtttaccgtgccaccagtattgccagcatgcttgatacggtcaatacgtatgttaacttagcaaccacgattttggcggcaatcgctggaatttccctactagtctcagcgttaatgatcattgtgaccatgttcatgtcggtcagtgcccggaagaaagaaatcggaatcttacgtgcgctgggtgaaagtcgccgtgatattcggcgattgttcacgagtgaatcattgatcattggggtcatcagtgcactactagctactggaattgcttatggtattggagctgccttgaataaggtcctctaccaaatcgccagctacaatatgattgagattcaggtaagtaatattatctcgacctttatcattgccctggtgattgccttattagcagccatcttaccagcttggcgcgccgctcggttgaatccaatcgatgccctcgccgctgattaagtaattgtgagtcattaactaaaatagtctgttagtaaaacggtaatgaagcccagaacgggattcattaccgttttttgtgcgtggggcctttgatgctaatttgctttacatatgtcgaaattgacatataatgaagacaactaaatagaacacacattgcgcgagccaatttgtcatgaatcgtgattaaaatgtgcaaagtttttaagttcaaaagcagccagctatggaccgctggggaagttcgactcagcgtaaacttgtttagttaattcgtcctacaccgacctccaggcatttctgccaattgccggaacgtggtgggcacagatttgagccgaaaaaccacgtctcaaatactggcctttcactaaccaagcacaggacgcttgctaagtgaaatttcaccactgggcattgtcagaaacaccttccagtcgggatagcgttcgaatggctgatagggatgtactcaacttttgctgaatttgtcgttgtttttcaatctgacagttttctcaatcaactgtcagattgaaaaagtcttgtgataactcactatttctaaattaccgtagtaataattgaatatttcgaaaaagtggagaaggcactctgatatttaactgaaagggttcagtatcaaaatagccaacgacaaattgtaccgagttcagtggccgttcatcagccattcgagcggcttcccgactggaggggctggtgacaatgctcagtagccaaattattcttagctggaagtgggttgcttccggcttaggacgcgcaccggctgacgaacaacaatctaaacttggcacgttttaatcacagttgatgctaaatactagcacaacgcgtaaagaaaagtgggtgaaatgatgcattatggggttttagcgttaacgtttttgagtgtcaatttggattttttcttgatgttagtttttttattgaagaagtatcggttgtggcaggtcttgttgggctatttgttgggcaatcttattctactaacggcaagcttctttgtgggtaaagcactgaccttatttttgccagaatggttattaggattcttgggtgtgctgccgatttggcttgcgtttcacgacgatgatgatgataccgccgatcgggctggtgggtcgccggtgattaacgtactagttacttatttggccgtatgtgctggttgtaatttatcgatctttttacctgtgctcgttggggaaagcatggtacactttgtgatgactttaggatttattggtatattgacgatgcttgtcgtgcttatcattaaccaggtggcggaaatcaaggctgttcaaaagcaaatagcggctcatggtgaacggttgatgaaaatttgttacgtggtgattggcttatatgttttctgggatagtgggctaattagccatttaatcgcattcctatgattggtgagaacggaggaattggcatggaggtcagcgggccactattaactgaggcggctaaaatatacaaagtattgagtaatgttaatcggattaaaatcctaatttttttagaacaccatgaagcggacgtcacgcaaatcgttgaacatgttcatttggcgcagccattagtctcgcatcagttagcaattttgtttcagtatcagttggtatctaaaacgaagcgggggaagcatgtctactattgtctagacgatccccatattttggaaatggttgatgccatgattggacatgtggctcatgaaattaaacatgaaccgcatcatgattaatgacgggaggaagttgtgaaggttaagataacgaaacgacagcttatcagtggggcagtactgctagcattactattaattggactgttgatctatcgctatcatggtacttgggagatcattcagcatcgggtatttgatcaatcagcactggtggcccaagttcgacggcaccgcgcgattgatattttattagtagttcccttattgatttgcttttcaattattccaggtgcccccgtggcgacgatcagtgtcgttgctggcatctgtttcggcaaagggcttggggcagtgttaaatattattggcattacgctgggcaacttgattgcacaacgctttttcggacgggtaacggctcgacgtgatcaacagccgtcaaaactcgtgacggccattggtaagatgcggcaccccttattaggaatcgtgattgggtatacgataccgtttattccaacgtcattagttagtttagcggccattgaaacggcggtgacaccccggcagctagccgcagcaacgctactgggcagcatgcccacggcgattatctatgcttggggtggcgatgaactgattaaagcgcacttcaagaatgcgttgatgttggttggactcttggtgctcttattgggattgttgtggttgatccaccatgatcgtcaacgagcagttgatttggatcattaataattgaaattataagcggcgggcccgccttcttaatcattgactaagagggtgtgcccgccgctttgcccgtagccgttatgatgcaactggctgggtatgcttgaattgattgatttgagttgtggtcagtgtaactgtcttatatggtaagaaatgttcagacagttctgagcctggatcggcctgaaagatctcgaccgtgtcgtcagctaagtctagctgatagacacgccgcgcatgcgggctgtcaacataaatagcggtagcggtgaagggccgccaggtaaaattagtcgccggtaataagtgccattgttctaatgcgtcgtaggtttcgtttggtgtcataatcgaatcccccttcagtgactattatagtatgtttaggttaatagtcaaataatgttttgttaacctaaaacccccgttttcacattgaaaacgggggttttgaggttattttaattgatttaacgaataactaaaactgaaatcggtgcgtattttgccatataagcagcttggctaccaaagtgtttggcaatcccctttttggctagggagccaataatgagtaagtccggttgaacgtgggggatgacttccttaacgatggtctcaccaggttcaccttccgcaatcattgcgtggactttggtgacgccagcagcttgggcttgcttttgatatttcaatatatgctgttcaagttcttggcgttccccatgaatgtagtctttactgagcgcttgatagacgttcatttcatcattttcaagaatcgagataatgaccagttcggcaccatcttgcttcgcttgatggattgcatagtcaaaagcaagtaaagcatcggcagaatcatcaacaccaacgagaatccggttaaatttagtcgccattatttgttggcctcctttgctgctgcagcaagttgctgttcaacgtaacgtttgttaccgcgttgtaggtcgaagacggtccagacaagtagggctaagatagcggcaatcaaaaggtaggctagaattttagaaaaagtctgttcgccagctgaaggattatcgccaaagaagcctaagattgaatctggtagaccgagtaagtttaagaaagtcaaaccgatgacggataaccaacctaaacctttgatccaaagtgagtttttgaatcgtttgcccatttctgccgcgctgtcagtcatcattaatagtggcaacatggagaatggaagagcgaaagccagaaagacttgtgagttattcatcagattattcaatgcagtatgctcgtcgattgcactcttaccactagttaatagcacgcaaatgaggacgggaataacggagatcaaccgggtcactaaccgccgtaaccagagtggcatccgcatgtggacgaacccttccatgatgacttgcccagttaacgtaccggtaattgtggagttttgcccagaagccagtaacgcgatggcgaagagggctgagagcgccccagatttagcaacactgattaaaataccattgcttaacattgatgtattggataatgcttcataaagaccgaagaatgaaggatctttaacagcgccactcttaaagacggcaacgcccataatcaataatagtgaattaaccacgaaagcgaatgaaagttggatattggaatcccaagcagcgaatttaacggtccgcgcgacatcttcctcatcgttgtggtcaatcttccgcgtttgtgagatggctgaatgtaagtacaaattgtgtggcatgacggtggcaccgataatccctaaagcaccagaaagtggcgtcataccgtttactgaacgacttgtcgagaaagtgtcagcggttgggactaggcccttgatcacaccgccccaatcagggttggacagtgcgacttgataaacgaatacgaataagataactaaaatcaaacaaaccacgatggcttcgattttccgaaaaccgattttggtcaataatagcaaaactaaaacgtcaagcacggtaataaacaccgcaatgactaacggaatgttgaacaataaatagagggcaatcgcagcaccgataacttcggcaatgtcggtcgccatgatggctaattcggttaaaatccacaagacgattccgagtgatttactcgtccgcgcccgaatcgcttgggccagatccatctgactcacgataccaagtttagccgccatgtattgtagtagcatcgcaatcaaacttgatatcaagatgacagacattagcatgtattggtagttttgaccaccggtgatggaagttgaccagttaccgggatccatgtaacctaccgcaactaaggcaccaggacctgaatacgcaaagagggttttccagaagttcagattcttgggaacctcgatggtaccgttaatttcctctagtgaggggccgttagcatattcaatcaatttatgcttccggtttggggtgttcgtcttttcgctcaattaaaagaccacctttctatatctctaaatctttgagccgttgtcattgtacaataaataaaagtaaatggaaatacttttttaggcatgcctacaaaataattaaaacagtttgatataaaacattctaattgataataatatttttaacttactaagcagtcaaccaagcagactaaaacgctatgacggaaatcattgtcgtagcgttttggttcgcgattctcaaaaaatacaacacgcgcaaatcgccggcttcatcgacttgcttagaaacttatcttgccgaacaatcacccgtcgcgtacgatgtgcttggaggtgtgaaaatgaatttttcagataatttaaaaattattcggcaacaaaagaagatgactcaaactgacatcgcgacgcaattgcacgtttcacgacagacgatttcaagctgggagaatggtcgaagctatccagatattggcatgttggtgcaaattagtacggcgtatgatttttcagtcgatcaactattgaagggagatttagggatgttaaaacactacgaggctcagtcggcaaataatcggcggcagcagcgcttggtggcaatcagttatgacttagtcgttggcctactatttttaagctatttgcactattttttgcattggaacgacggcatcgtgacgatggtcattaatggtggattgattgtgatgaccacgacgttgattatgaattataattattttgatgattgggcaaccactaaacgccaggcgtggcaattagtgggggttattacgatgttggcggttttaaatatcgcgttggtgtggccacaactagctagtcagatcccatcaacccagttcttaaatcaacatgctggtgcatatttagcggggaatgtgagcggaaaattagttggtgacttcttgcatctctttatttggacagcggcggccgtgatggcgattgaaattccgctcaatcgggcgagaaagacttcagattaggtgttcaggttgtggatggtgttattaagtgctgcgaccactatttagtagcgatcgagtcacgctcaacggtcattttggcacctatgataatgatgagttatcggctacggcaagccgtttttaattcatgattgtcgcagattttggttattcgttgatgtgcaacggccccatgatgatgccaactagctgcagaattagctgatgcggacagttaaagctggttggcgttttgtgtatgtgaattattggggtaaaactgaatagttgccatcgccaatagttaactgctgtgctaagattaagttgtgttatttttactcataaaaatgaagatacaacttaaacagaattctttcacaataatcatgtttaagtgaagaaagtcaggtgtagtaaccatgagtaagccagattcgattaaagttgatcaaaatgaggaaacggttactgaaattttagagccagcagcagaattagataaaaaaattatttcacccgttaaagaaacccgtaatcaggcgattcgctatatcttgtggggattgatcagtgttgcggtcaactttgcaactttctatacgatgtaccacctaatcggactcgaataccaggtcgctaatgttatttcctgggtcattgccgttcaagtcgcgttctgggtggaccgcttgaaagtgttcgaccatcattcacaccacgtttatcgtgaaatgggtaagttctatgcgacccggatcgtgacgtacgtcgttgaagcgattattttatggttgttgatgtcagtattggggagctcggcggtactagccaagattcttgggcaggccggcgccatcattgggaacttcttgttctcgaaactgtatgtttttcgaaataagtagccacatcaagacggaaatgaaaattcacgtctttttttgttcagtggggtgccgcggttgttagaatgacgagtaggtgtgtgaaagcggattaagattacaagtagattgcggtaatcctaaatattcttaatgattcactaagagctatgtttaagtggggtgtcatgtggtttaataaacttaaattattgcttgtcaccatgttaaaaaattaagaggagcgcacagcatgctaaaaaatctaatgcgcggaatcaaagcgctgtgtctaatcggcctcgtgttatttgggtggcgcaactatgatacgcttgccccgcgcgcggcagctttatatcagacgagtcgtcagaatctagcggctgccttgtcgggtgacttatctagtcatttgttgggtgctgatgatactagcagtgctaccgaagattcggcgactaactcaagtaagcaatcatcaggtcagcagacggataagactgcgagtgccagttcggtcactagctcgagttcgcaagcaactagttcaacaacgcaagcaacaccgattgaatcgatcgtgcagaacgccaccttaaagaagacgtattattattccttcgatcataatgttcccaaagcggcccggcaggtctttcttgaagctgtcgcgacttataaccagactgggttggtccatctggtagctggtcaagccagcgggtcacaaaattcagtgactttttcgatgtatcataaaaaaatgacgactggtgcgaccagtgttgaacttggtcatggtggccctgatattactaagcaaattagctggcgaggtatccaatattggaataacgcgacggctagtcttaacggctcatacgcctcagctttcagtaaatcggtcgcagttcatgagttaggtcatgcgttagggttggatcacagttcatcgactgaatccgtgatgtacccggtttcacaaggtaagagcacgttgtcaagtgctgatattgcggccctggaaacaatttatcaaaagaatgcgtaatttattttcgtaataccaaacaaaatttaaccacttttcaaattttgacctataatcaaggtgtatcaaaaattagaaaggaagttgttttagtatggctgcagcagttgaaatgaacagtatgttagacgaaaagatgacggacgtgtttgattggagcgactctaagttacccgtacgggatgcgatttggaatcactttatggacgctgatagtcatgatactgacaagacggctgacgaagtagcgccttatatgagtatggacgaagctaagctcaagagcgaagttgaaaaactcttaaaggcttaactagaataacgaccatgacggcctaatttttgaatgggaactgattgccagtttagtaatcagttctttttttatgcttttaatccggctgaataagctggttggtcaggggggcctctcaaccgaagctaatcaagaccaaaaataatttttttgaattactgtcgacactatgagcccgtagtggtttaccttttaattaatataaaaacaattaaaaattcacttgacttataattaaaagttaattaatctaagaaacatcaacattacaaaaacttttgaaagcgaggcgtgtcaattatgaaaattcaatctaacctaaccaacttgttgacaacccttgctgttcaaaatttagccttattattaacgaagaaggacccggtcacttgaccttgagtataactcaaaattcaagtgaactgagcccttctttcccattgtggtaatgaggctcagttccgggtaaaggcctcattcactacggtggatgaggcctttttgtgacttaaggaggatcggggtcaacaacgtagcaataaaaaaacgaaagtgggaataactaatgaaaaaatgggaaaaacaaacgatgaagattgcagcacttggtgcgatggcgttgacactggcagggtgtgccactgccaaatcaagttcaagtcaaggaaataatcctggcaagactattaaaattggggtcaatatggaattgtctggatctgcggccggttatggagaacagcaaaagcaaggcattcagttagccgtcaagaaaatcaataagagcggtggaatcaaggttggggggaccaagaagaaaattcagttggtgatccgggacaataagacatcgaacacgactgctgcttccgtggctgcccagctcgtgaataacgataaggtcgtggccgtagttggtcccgcgacaactagcgccgggactgcggcgatccctaatatgactaaggcggcagtaccatcagtcagtccatcagcgaccgatccggattatacgttgcaaaagagtggcaaagttcaaaagtacatattccgagcttgctatcagaataattttcaaggagccacggcagcaacctttgtgactaagaacttgaaggcgaaacgcgtcgccattttgactgataactccagtgattacggcacgggcctaacaaaggcgtttaagaagcagtatcggggcacggtcgttagcagccaaacgttccaagagggcgataaggactttaatgccatcctaactgcgttgaaacataaaaagatcgatgccatatatgcgcctggttactattcagaaatcggtctaatcgttaagcaagcgcggcaagcgggaatcaaggctccaatcgttggtagtgacgggatggcggatgctaaattagcccaaattgctggcaagtctaatgctaccaatgtttattacacgacgccattttctactaaggcttcggcaacgaacaaagttgcttcgaaatttatgagtgcttacaaggcaaagtatggtagtaccgcaccaactttttcagcactcgcttatgattcggtttatatgatcaaagcagccatcgaaaaggaaggctcggctaattctgttaaaatcgccgatggtttagccaaacttaagaacttcaagggtgtcactgggacgacgactatcgataagcaacataatcctgaaaagacgatttcaattgaacaattgacgaatggcgtggtcagcaaggtttataacgtcaaatagtcagactagtgaaagcgtgggggaacacatatgcagacatttggacaacaattgatcaacggactatcgctaggaagtatctacgcgttattggcgctaggctacacgatggtttatggcattatcaaattaattaattttgcacatggcgatatttatatgttgggggccttttggggctattacagtttgaagtcactacactttaactttgttgcggcgctcctgtccgcaatggtgatctgtgcagttagtggtgtgattattgaatatttcgcgtaccgcccattacgccattcaccgcgaattaccgcgctaatcacggcaatcggtgtttcattcttgcttgagaatggaatgtcatactttgttggtgcgagtgcccgttcatttccccaagcaatcaaagtggtgacttatcactggggcggattgcgggtatcgaatgtgcagctactgatcttaggaacggcgtgcctattaatgattctattggaattaattatcaaacgtaccaaaatgggtaaagcaatgcgggccgtttctgttgatcccgaagctgcacagttggtgggcatcaatcttaaccatacgatttcgttcacgttcgcattagggtctgcaatggccggcgctgccggagtcttgattggcctatactataattcgattgatccgttgatgggcatgacgcccggtatcaaggcctttgtcgcagccgtgattggtgggattggttctgtgcctggggcttcattggggggctttattatcggcatcctggagactggtgttcaggcgattggcctatccgcatacaaggacgcggtggtttactttgtcttaattgttattttgctcgtgttgccggctggaatattcggtaaacgaaccaaggaaaaagtctgagggaggcgccaaattaatgaaagcaaatttgaaaactaacatggcgtggctcggtgtgatggttatcggctttgttgtgattgacggtttagagctgatgggcgtcattaactcgtttattgaaaatatgctggtgacgattggtatcaacgttatattggcggcgggactcaatctgattattgggtttgcaggccagttctcgcttggtcacgccggctttatggcaattggcgcctacgcgactggtattatgacccaaacaatggcgacgcccgcgggattttatctgtcgatgatcgtcggcatggtgattgccatggtagcggcggtcattgttggcatcccaacattacgattgcgcggtgattacttagccattgcgacgatgggggcggccgaaatcattcggattctaatcaataatctgaaaattacgaacggtgcagcggggttattcaatatcccggcacttgcttcgtgggcaacggtgtatgtcttaatgtgtctgacaacgattatcacggtcaactttattcacagtcgcggtggtcgggccgtgatggctgtgcgggatgatgaactggcggctggtgccatgggaatcaatacgacgcgctggaagttggccgctttcgtctttggcgcggcgactgcggcgattggtgggtcgttgcacgcggcctacattcagacgattgcgccgggtgattttaatatcatggcttccattgcgattctgattattgtcgtactcggtggggtcggcagtattaccgggactttcgtagccgcaatcgtattaggagcgctcgacacgatcttacaaaacttcggtacgatccgaatgattatttattcattggcactgattttgattatgatttttaagccagccggactgttaggaacgtgggagttctcattcacgcgtctattcagacggcgatcaactaaggaggcggttaaccatgagtagccggttattagacgcacaagggttggtcaaaaactttggcggcctgaccgccgttgctgacgtttcactccattttgatcaagacgagctgattggtttgattggcccgaatggtgctggtaaaaccacgttattcaacttgttgactggtgaaacgccggttagttcgggtagcattagtttctacacagatcagggcgtggtgtcgttaaatggcaagcagcccgctacgattgctcgggttggtatttcacggacatttcagaatatccggttgttcaaggagatgagtgtacttgataacgtgcgcattgcaatgaccaatcattatcatgaacggtttttgactagcatcctgcgcttacctaagtattaccagactgagcgggcaatgacccaggcggcgcaagccttattagcgatgtttgatttgaccgccgtcgctgatcagcccgcaaagagtttaccatatggtattcagcggcgattagagattgtgcgggccctggcgacgaagcccaagttactcttccttgatgaacccgcagcgggtatgaatcccgaagaaacggcggatttgacgcgcttgattcgccgaattcaacaagaatttcatattaccgttgtgctaattgaacacgacatgtcactagttatgaacgtagtcgagcggctctacgtgttggagcacggggcgttactggcaactgggacgccaaaagccattcaacatgatccggccgttatcaaggcctatctaggaggggtgtaaatgcttaaagtacgtgatttagtcgttaattacggcgcgattcaggcagtcaaaggtgttagttttgacgtgcaacagggtgaaatcgttacgttgattggtgctaacggcgccgggaaatctacgttgttgcacacgatatctggcttgatgcgtccggtcagtggttctattcactatttggatcaacccatccaaaagacggccgctcctaaaattgtgcgggcgggtatctcgcaagttcctgaaggacgccatatttttcccggcctgtctgttcaagaaaatctacaaatgggtgcttttttacggcaggatcggggtcaattggctcagacttatcagcaagtttacgactactttccaattttgaagaaacgtcggcatcaagatgccgcgacgctctcaggtggtgaacaacaaatgttggcgatgggccgcgcactgatggcgcagcccaagctgatgttgcttgacgaaccttcaatgggattagcgcccatctttattaatgagatctttgagatcatcaaggcaatcaatcaggctggaacgacggttttactaattgaacaaaatgccaatcaagccctgaaaatcgctgaccgcggctatgtcttagctagtggacaagtcaagcttagtggtcggggttccgaattattagctaattcagaagttcagaaagcttatctagggggttaagtatgagtgttgcagattatatgacaccacgcctggtcgttgttagtcctaaaacgacgatcagtgtggcggtcgaattaatgaagaaaaatgcgattcatcggttacccgtcatggcaggtaatcgaatggtcggcttgatcacgcatggtatcattcagcgtgcgatgccatcacaggccacgagtttgtcggtgtatgaattaaattacttacttactaagacgacggtggatcaaatcatggaaacggcggttcaaactgtcgcagcaaccgctcagttagaaacagcgattgcaacgatgcggaaaaataagatcggcgtactaccagtcatgacgggcgaccaagttgtgggcatcattactaataatgatatcttggatgcgttcttaaatattgctggttacggccagccgggaatcgtaactcgggtggtggtccatcatgaccatgtcggcgtaatttttgccatcggaaaggtcttaacagaacacgatttaagtattcagacgttaatggtcgtaaatcaccaggctgaaaaagtgattgagctccacgtgaatagtgaacaggccgccgatgttaaccaagtcttgacagcagcaggttttgaagtacaaccggtcagtgattagctctggcggctattgtctattattggagattaggtggctaaagacatcgcgttgtacaaagttatagggcgtggtgaaagtgtgtggtcacaaaaaagattcaggatgattcaatcctgagtcttttttttcgacgtattgttacttaaggctgcggtcgactgaatgttttatagacaggacattcgctagctaatgggaaattacggcaactaactagtacttgtgaggagtagcgataactgattggattcgttattaccatgcggttttgagcggtacacacaaatttaagaccggataataaaattgatagcaaaccgagactgatcaagaagaacgagactgacctgaacgtcacaataaaaaaaattattattaattggattaaatccctatctgttgttttattaatgttgtacaagtattagaaaaacagcggatagaacgttttttaatgtaaaaatgatgaaacaaaaaattaatactgcatacaaaatacggccggaacagttgacctggttgattttcacgggttaacaaagaagcaactcaaagattaaggggttgtaattgttgggaagtgtggtaaattattagtgcagttaatgaattaggcaaactaaagggatgcacgatatgaaaaaagtagtaggcagtttactcatgaccagtaccattttattgggggccttaacgccaatcgttggtcacgcggccgatggtgaaaatcggagtgggacgacgaatgcaacggcaacgtttacggcaaataccactaatccagttgatccggtcgatccgactgacccaacgaaaccacttgaccctaagcctggtgatggcgataacggtgccaattccggtgctggtttgtcactgatctatgcgcccggtaaacttgatttcggttcgcatgaaattgacgtgatcaataaccaaagctataaagcattgactggtagcgatggtagcacggtcaccatggggtcaacgggtaaagttggtttacaagtctctgatcaacgcgggacgaatgcgggttggacattgagtgttgccgctgcggatggcacggatggtaacttaagtacgcttaagggggccacggtctccttacctgcagggacggtcatttcttccggatcggaagctagcaacggcagtaccggtggtaatggtgcggtcggacaagctgttgaacttgacttaggtagtcaagcttcaactagtgccggggcgtcctttacggggacaacttctgggaatgtcatgacagcagcggataagagtggggcggggattacgtctgacttgcttgatccggctgcagtcaagttgaacgtcgtggctaacacggcggccgctacgacttacaagggcgtcctaaattggacattaacatcatcagcagataattaaattaatgaacttggagatgaccacgtaatagtgggcgtctcttttacataataatcgacggggggacgcaataatgaagaaaatgatgcggtggttaggggccatcttagtgatgatcagcggcttgtccgcggtggttccagcacaggcagccaatacggacaccagtaataatattggttttagtgtcgcggcccaaacgccgaaaaaccaaattgataaacaggcaacgttttttgacctcaaaatgacggcagggcagacccaaacgttgcagacgcgaatctataatacgactaaccgggatatccgcgttgcaatggggattcatacggcatataccaacagtggcggcgcaattgaatacgtgaccccggcgaaaaagtatgatgcctcactgcagtatcgggtcgaccaattgactaaaatcaaggggccaacgacggtgacagttccagccaacggttctaagctggtcagtgcccaaacgaccatgccgactaaggattttaacggtgccctgttaggtggttggtattttaaacgcgtcgatcaaaaggtcactggtgaagtgaagggtgctacgaatattagcagtgaatattcttatgtggtgggcatcaagtacagcttagggactgcgcccacgcccgtcttgaaactaagcgatgtcgctgctggaatggttaattatcaccggagtatcgtggtgacgttacgcaatactgcagcagtgatgataccacgggttaccatgaagacgacggtcacagccaaagatagtggcaaaaccgtcgtaaaggcgaccaaacaaggcgtgatgttggcgcctaatacgacgtttaattacccattgttactcaacaaacagaagcttcaagcggggacgtatcatttacacttggttgcgcacaacagcgctcataagtggacttttgaccgcgacttcaagattagtgccgccacggctaagacgtataaccaggatacggttgatgataacggcatcagtatctggtggttgattggtctgggcgcactgggcatgttgattgtagtcttactgattttgtggttagtgcttttcttgaagaagcggcggcaatcccaagattaacagcaatcggctcggtgtttagtttgggactgctaagcgtcatgaacaattagtagctgggtaaaaaagggggactgacaaatgatacgatggctgttgatacggggcttactgggcttattaatcggcctaggaccatccatcgggggagctgctcagacggtgggcacttcgtcgacacaaatacagttctatacgtcacgttcagcggacaaacaaacgcctacgacggtgcaacaaattccgcagggcgacgttgtgtacgcaacgaaggctgtcaaagccacgcccaatcgctttgtcggtcagtggcaacaggtactagcaacgggccgtttgccccaaaccggggtccaagcgaatcactattatcagtggctcgggttcctgaccttaatggcactcttattagggtggcaggtgcttaagttaatgcgtgaaaggggggcgaacacgtgaaacgactgcggcatattaagctaggcatgctgttactgagctgcttagcgtttatcagcatgctagcgattacgagtcaggcagcggcgcccgtgacgtctgcgacaacgacaatcgctaattcgagtaataagtactacacttactttaatagcggtgatgtcgttgggttcaatatctcgggtggaattgggatatatccaagcttaaccaaagtgacggccaactatgcggatcagggacgtatatcgactaagactaccacaataacgttgacctttagtggttcgttgtttgcgaatagttcggagattaaaacgctatattacgatgtcttttataagcaagcaaccgaagaatttggaacttcactagtgaccaagactccgacaaatatggcgactggttctagtacggtatcgatgaatactagcaagactttgacagtcgatatgagtaagttaaaggataatttgccagtatatattgggtttcgattaactacagtaaagggtgagacatccacgtaccgcttggcagtgtttaatcggattagccttaatacgacgctgaatacgccaacaacgacggataccactctgacaggaactgggattgccggtaataccgtcagcacgacaattaatggtaagtcgtacacggcgacaatcggtagtgatggcaaatatgaaattaagttaaatgatggcctcagtggggtcacttcagtcacagtaacgcagacgggagaagccgattatggcgaatccgaatcggtgactaaggacgtgacgataccaccgctgacaatcaaaagtagcagtacagcggtgaatttgtccgtgagtgatctagcggcgttgacgtctgatagcgatgctgttaattggttagttaagcaggctggcgtggttgcgacgaatcctagtaacgctaatgacacgatgacttatcatgcaagtgagagcggtctggtcgcgttattcaaggggctcgctgataatcagagtaccacggtccacatctatgcgacgagcgccagcgacttaacatctgataaaattgcgctacaagtaactaagttagcagggacgctgtcgtttggtcaattaacgaccaatatgagcttcggcgatttaaaggtgccgttacaccacaagtctatcaaccgactaatccactagccatcagtgtgactgatacccgggcgaccggggctaagtggtatttgtacgttagtgccacgccgctgacatcgacaacggtcagtggacggacgttgaagggcgatttggtttaccgtgatggtagtgcacagaccgtcttaacgaatcaagcgacgttggtccaacagggacaaaaagtcgcggggacgaccgatacggtagtcactgacgattggtcgacaacgaagggaatcggattatcagcgcaaccaggtatttacgctgatacttatcaaggtaccttgagttggactttgagtgatacgccagataaataagttagcgtgtatcagttgggtgacggggactttgaccaattgcacttaaattttttactggttcgcagttgacaagttaggtgtcgtcatggtttactattagctataaattgaaacggaggatgactaatatgtcattagcaactaaccttcaattaaataatcaatttgcctttagctttttctttagatagcgtttgtattcgtttgatggatacaagcgcacgcaacgcgtttgtatctatcgagagctaaagttattcaacatgacttaaacgccaggtagatgcagggacaatctatctggaaaaatatcgggcccgataaaacaccagttagattcttcccagaatctaactggtgttttttgttttcagtccggttcatcaagacgttgatgaacgttgggcgaaccagacaatttttaaggagcgtttcaagatgaaaaaaacaactttaggggtattaattttaggtgctgggttactattagctggttgtggcaaacaagcaacgagtggtcagcaaagcgtgtcggtgggcatcttacaggtggttcaacatggttcactagaccaagcgcgcaagggcttcaaagccggattacaaaaagaattaaaagcgcataacagtaaaataacggtcaagtatcactatctaaatgcacagggtgatcagagtaatttgaatacaatgagccaacaactcgtccaacagaaaaatgatttgttagttggcatcgcaacgccagctgctcaggcattagccaagaaaacgacgacggtgccgaccttggttacggccgtaaccgatttgaaagcggcggggttggtgaaaagtgatacgaagccccaaactaatgtgagcggcacgagcgatttaatgcccgtcggcaaacaattacagttattgaagaatatgagtacaggttataaaccgttggggattatgtataactcgtcagaagaaaattcagtgctacaagtcaagttggcgaaggcttacgcgaaaaagcacggtatcaacttaaaggtcgttagcgcaacgagtactaatgacgttgccagtgttttggccggtttgacgggtaaaatatctggcctttacttaccaaccgataatttgatggcgagtgcgatgaagacgattggtcagaagaccaaggctgcaaagctaccagtggtaacgggttcgattgaaatggctgaagatggcgggactgcgacgtatggtcttaactattacgaattaggtgaacagactggaaaaatggcttaccaagtcttaatcaagaagcaaaagccgcaaacaatggcggttcaaacagctgacaagttacacctctacgtcaataaagcgaatgctaaggcaatcggcttacaaccaagtacaatcaagcaaccataagaggggagcgaggtaatatgttaatcacgagtattggacaaggtttattatgggcgccactggttatcggggtgttcctcactttcagaattttaaacatccctgatttgaccaccgagggtagttttccattaggggctgccgtgacgattagtagcatgttggccggacagtcagctatcgtggcgagtttattaggatttgtcgccggatgtttggccggttgggtcacgggggtattagatactaagcttaaaatgccgtcattattggccggaattctgacgatgacgggactatattccatcaacatgcacattatgggcaaagcgaatattcccttgcttgaccagaaaacgttgatgggatggttaccagcgagctggtctttgaatttacaaaccatcgtgattgggtctgtggttacgctggtcgtcctggccgggttgatttggttattccagacgcgtttgggactatctttgatggcaacgggtaataatcctgcgatgagtgctgcgaatggaatctataccgatcggatggtcattattggctatatgttatctaacggtttgattgctttatcgggtggtctgattgcacagagtaacggttacgcggatattgggatgggaattgggacgattgtcatcgggctggcttcagtcctggttggtgaaatcttcttacatggtcgtcaaatctgggtccgtttgactggaatggtcgtgggcgccattatctatcgttatttgttgactttggcaatgggcttaggtttccccgtcaatgacttaaagattttatcagcggcgattcttgtcatcgtcatctgcttgccactattacaaaataaataccggacaaaacggcagttacgccggtaccttaaagagattggagtcgatcaacatgccacacccaactattctgaacgtccaacacttgcaaaaagtcttctttcccggaaccagaaacgagcggcacgtcttaaaggacgtgaatctaacgattgaacctggcgaatttgtggcggttattgggaacaacggcgccggcaagtcgaccttgctcaatacgattgcaggaacgttaaatacggatgctggagagattacactagccaatcatcgtgtgaccaatcgtcccgttgcgtatcggtcacggtgggtggcccgggtgttccaagatcctaagttgggtaccgctggcgaactaagtgtggcccagaatctcacgttagcccaacgtcatacggggagcttgagtctgcgccgttatcgccaacgtggacaggaagaacgatacttaaggttgctggctagtcttaatatggggttagaagcgcgactgaatacgcaagtgaagtatttatccggggggcaacggcaagccttatccttactgatggccaccttgagccaaccagagctgttgttgctggatgagcatacggcggcgcttgacccgaagacgagtgcggaagtgatggcgctgacccaacaaatcgtgacggccaatcatctgacaacgatgatgattacgcacaaaatgagcgatgcgttgacatacggcgaccggctagtgatggtacaggatggtcagatcaagttggacgtgcgtggtgccgaaaagcaagcattgcggacggatgacttggtgacgatgttcgcagctgaggtgtgaggctgtcgttgcaaaaaacgacttgcaacggccgatgatcagttagcaggtcattatcttacttaacgaatttcgcaatcaaataaatgatcagtcctaaactgatgagaccaccgatgatagatataatgaaaattaaatcgccaaaatacattggttttcctttctagcttagcgcatgctgagcaataccaaaatataattattgtaggttcggttagtcaccgcttcgtgcaaatcatgattaaggcgtgctgttagtttagattgcagttcatcaacacgtgttcgtccgacttccgaggctaggtgacaatcgttttagcataccatattagtttcgtggcgataatattcatatgacgtataattctggaaaaataagttaattgaataatccataattgccggtaaacgttgctaaatggcgaatgagttacgttaagggaaatttaaagaattgtccggcgactagattatcgaaaatagccctctgcgtatcaaatacgtagggggctattcatataattggcgcatgtaacaagttatttcgtcgtgaccaacataatctcatcactgactttgacttggttggtcaacatcttgaatttcatcaaattgacagcatccatgttagtgatgataaccatcatggttgtggccttaccagcagccttaatcgctgccaggtcagctttggcaactacttcgccatggtgaacgggttgaccggtttggactagtacttcaaagggagcaccgttcaactcaacggtatcaatacccatatgcagcagaatttctaaccctgaatcggttttaaaaccgattgcatgcttggtaggaaagacggtgctgaccgtcccgtcgaccggcgtcgtaatcgtcccgtctgcgggatcaattgcgaagccatcgcccaacatcttcttagcaaatgtgttgtcggcgacgttttcaatatctacgtactgaccgttagcgacgctgtaaaagtcggtggtcacaccaattagtcgcagttggtgctgtcgcaacagcttcatcgctagtcgtggtcttagtaatgggtgcgttcgtgagctttaagtggctcaacacgtcggcgacgaattggacttcggtcccaataatgatttgtagattatggtcgtctaatttgttaataccagcagcaccactgtgtttgatagcggcttcattaatggttgacgtatcggctaattgcaatcggagacgggtcgtgcagttatcgacaaccgttaaattatcggcaccaccgagcgcagcgtaaatttgcttggcttgacgtgtgtatttgtcatcatccgcatcagtggcgatggctaaatcatcggcatcatcggctgtcactggttcgcggcccggtgtcatcaaatggaacttcttgattgcgaagtcaaagccaaagtagtaaatgacggctagaaccaatccttgtaagattaacattaaaggttgattagcaatcgggtttttaaggcttaaaatgtagtcaactaacccggcggagaaggcaaaaccggctgtccagtgcatgaaggcagcaaaggctagcgataaaccagtgaagattgcgtgtaaaacatagagtggccaagctacgaacataaatgagaactctaatggttcggtcacaccggtaaagaaggacgcaaacgcaccggccatcatcagggatgctgtttcaactttacgttctggtaacgcattgcggtaaatcgcgtaggccccagctggtaaaccaaacatcatgactgggaagaaaccagcttggtacatcccagtcacacccttgatccccttgtgtgctaagaatttaccaatatcattgatgccagcaacgtcaaaccagaaaacggagttgagtgcttggtgcaacccagttggaatcaataggcggttgaagaagccatagagaccggccccaacggcaccgagacccacgatgaatttgccaaaggtaactaatgcatcatagacgggcggccaaacaatgagaagcgcaacgctgactaataacatggtcagcgcggctaagattgggactagacgtttaccactgaaaaatgaaagagccatcggtagtttggtctcgtggaagcgattgtaaagagctgcggcaatcagaccagagatgatcccaatgaagacgttgccaatttgaccaaacgctggattaacagtggctaccttgatattcaagagtgtggcgaccgattctggttttaaaacgttagttggtaattcaaaggcaactaaaccagcaagagcggctgcgccatctttatcttttgacataccgagtgccaaaccaactgcaaatagtagtggtaattggctcagaacagcgttaccaccggcttgtaagaagtgtgcgacgatgtcgttactagcagatgcccaccagttaccaattcccacaagtaaagctgctgcgggtagaacggcaacgggtaattgcagtgaacggcccatacgttgcaaataattcttcatgtacaaaattcccctaaaaagatagttttgaataagtgcaaccattgttgtacggtggtgaaagcgctattacaaccgctttttattggtatagtccattggtttaataagattaacagtacaattgggagtggtctaatataaatacaaatacggaactacaagtccgacaagcataagtaatactggtataaacgatgaccccaggtaatgagcataaaaaataaatattggtcggaataataggtgctaatgatagcgatttcaaaataattgtgaaaacaaatacaaaatcagttataataagattgattaatgaatttgttacttttaaaaaaggagttgtttaggatgccaacaaccatgacgactaatattaaaaataatgattttaaagacgtggtgtttaaccgccaatcagtacggcagtttgatccgactgtcaaaattgaccgtgaagaattgcaaacgattattgatgagacaatcagtgcaccatcagcatgcaacttgcaaccctggcactttgtggttgccgatagtgcggacggtaaggcgaaagcaaagtcggttttaatgccgtttaattatccacaaattgattcttgctcagccatgatttttgtcctaggcgatacgcaatcgcatttggtctatcgggacgtgtggaataaagcttgtgaagaaggacgcattaccccggaaaagcgggatcaaatcttcaagacgttcttaccaatgtatgaaaatgcgagtccagaatttctacaagccgatgcgatgattgatagtagtatggccgcaatgcaattactattgattgcccgcgcacatggctatgatgctaatccaattgcgggttatgcggcagataaagtcgcgacgacctttggcttggatgccaagcgctatgtaccagtgatggctatagcacttggcaaggcggctagcgaaccgatcacgacaacgcgttacgctggtacgcaggttaccgaattcatttaattgagctaacctttttaactcgcgaaaatatcgcgagtttttttgtcatcgggcttgttctcgaacgcgtttgagcaggtatactaagggtaagattaataaaataattgacgggagtacattggcatgattaattatttgttttcagatttagatgggacgctattgaattctcaaggaattgtgagtccacaaactgttcaagcagtgcgagaaagtggcttaccaatgacgcttgtatcagctcgcgcacctattgaaatgcgtgatacaattcaggcactagggttaacaggtccccagattggctttaatggtggtttgatttttgaatattgtcagaatcaagttaaggcgttacaagcagccccgttagatcagaaattagcattacaagtgctcgagtttgttaagacggagtcgccgacagttagcctgagctgttacacgcaaacggattgggtgacggaaaaagttgatgctgggactcgtacagaacagcagctgacgggacaaatagtaacaccgattacgagttatacagatcactttcggcaatatcctgcagctatttttaaaattatgattatgaccttagacaaacatgttatggcaacactcgcaatggcccttaaacaattggtcggtagttacgctagtgttaaattatctggacagacgtatttagaagtaactagtgctcaggcacaaaagtctcgtggaattgcatttattaaagaacgatatcatttaacaactaatgagatagctgcctttggtgatggtgaaaacgatttgccaatgctgagggcggttggtttaccaattgtaatgggcaatgctgattcaactattcagcaatatgggcatcgtgtgaccaaacgtaatgatgaagatggcgtggcttacgccttgtcacatttaatcgggaggtaatattgatgacgaacattcatgatattgcccgtttgtctggttattcagtttccaccgtttcgcgcgtactgaatcatcaaaattatgtttctgccaaaactcgtggagatattgaagcggtaatcaacaaattagattatgttccaaacgccgtagctcgtaacctgagtcggggggcaacgttaactattggagttgtgctgccgcatgttgatcatccatactttactcaactgttacatggaattatgcgagctgcttttgctgcgaattatcacattgtattactaccatccaaatgggactcgcaattagagttgaaatacttggaggcactccgtcagcatgcttatgatgcactgatttttacatcccacgggttgccattaaaaaaacttgcagtttatcagcgttacggacgaatcgtattgtgtgaaaatccccatgactattctttaccagctgcctatgcccagcgtacagcgacgtatgttgaggcgtttacgtatttaaaacagcgacatcatcagcgaatcgcgatattaacaagtcgaccgctggaggttagtgccacgacacaggcgatggttggggcctatgaacaagtttatcagcggacattgtcaccgaagttattgtataccggaatcattacggcggaagatggcgagcatgctggaacctattttgcccaacttactgaaccagtgaccgcggtactgactaatggtgatgacattgcagtggggatgcgtcgagcttatttggctgcgcaacggcctgttccacttttgattgggcaggagcatcagttgtctggtgaagtgttgggcattccaaccattgatcatcattttgaagtcgtgggagctcgggcattagaattagcaatcagtgaacatccgcaaagtattgctttgccggccgaactcatcattaataattaattacactaaattgaatagtaataagtccgctctttctgagaactgctggtcagaaagagcggacttttaagttatcgtgcaaatcgtagtcttgataattgaggtaaaagcaatatcgttaatgatagttgcggtgaagtcgcaattggacaggtaaaaaaatgtttatataattagttagcttttgttgcatttatctaactatcgtgctaacataagcatcattcaaatcaaggaggacaaaaattcatgacagttaataatcgtgatttatttagtagttttgggaagttatttcaaaatcgggccttcgtcatggcggttgcccaacaatttcattttggagaccatggttctgagcgtggtcaaatgggaattttacgggtattggcggatgcacccgctggtttaaccaatgctgagattgctgagatcttggatattcgaccaagttcagttagtgccacgttgaatcggttagaagacgggggcttgattgaacgcgaaccaagtgcgcatgacaaacgggtggtgatcgtccggttaagtgaccgtggtcgtgagatggcggaccatcgcgcgcaaggaacgagtgatttagcggatcagttatttggtaatctgacggatgatgagcgcgatcagttacaacatttattagataagttgcgggccaatgcggatgacatcgatattcaagatttaatgcaatttggtcaacaacacggttttggcccacgtcccggttggggtcatgggcatcattggtttaattaaattttagaaacacgaggcataagagcagatggaacgaccacaagcagcatactcgcgtccggcgggtgataaatttgatttaaaacaattcttacagttgattcggcacgctagccctcgttattggcaactctggttgggcttggcattaggcttattggcgactggtgcgcagttgatggtgcccaagtttgcccaaacgttgattaatgggtttagtcacggcgttaatcagaccttactaattggtgtgattggcttattcttgatcagtgcagtcattagcgcgttatcaggttccttattggggatttttggtgaaaatgttgtcgctaatttacgggggactttatggcataaattagtccggctcccggttcgctactttgacaacgttaagacgggtgaaatgacgtcgcggttggtgaatgattcgacgcagatcaaagacttgctcgctaacgcatttccgcaagttgtgacgtcgctgatgcaactagttggggccatcgcaatcatggtcttgatggactggcgaatgaccttgattatggtcttggcgattccagccgttttattagtcatgtttccaatcatgcggcagacgggcaagattggtcatgaacgccaagatgctttagctaattttagcgggacggcagaagaaacgctgagtgagattcgcttagtgaaatcgtccaatgctgaaccagtggaaacaacgactggtgcacatcagattaagacgttgtatcgaattggactacgcgaagccatttatgattccatctcaagtccagtgatgacggcaacgatgatggcgttattcgttggggtactattgtatgcgtctgcgcgggttgccagtggaacgatgacgatggggactttggtctcatttttaatgtatctgttccaaatcattggcccagctgggatgcttggtcagttcttcaccacgttagcaaaggccagtggctcgacggcccggattcgggagttgttgaatgaaccagaagaacaattgacggttggtgttgaacacgcagtcgccaatgagactttggcgatgcaccatgttgactttgcctatgatgatgatcaacaaattttacacgatgtcagttttgaagctaaaccaaatacggtggtggcgtttgcgggaccgtctggtggtggtaagtcgactatctttggccttctggaacgttattatcaaccaaccgctggtgaaattagtattggcgagcaagatgttaatgaactaagtctcaatagttggcggtcacaaatcgggtatgtcagtcaagactcggcaatcatggctggcacgattcgtcaaaacttaacgtacggtgctgatcggttatactccgacaatgagttgtggcacgtcttagaattagcttccgcggctgactttgtacgcgccatggcagatggccttgagacgcaagttggcgaacgtggggttaaagtcagtggtggtcaacggcaacggttagccattgcacgggcttttctacgagaccccaagattctaatgctcgatgaagccactgctagtctggattccgaatcggaggcgatggtacaacaagccctcggcgaattaatgaagggccggacgaccctagtgatcgcccatcggctgagcacaatcgtggatgcggatcagatttacttcattgaagatgggcatgtgagtggttcaggtacgcatcaagagctgatggcgaacgtcccactctatcgggattacgttaaaattcaatttaaagattaactaaaaatagttggttaccgagatattgatgtatagtatccaactgacttgttgatttaatagatatcagatattttgggagatagattagcttaaatgagtgattgagccagttatttcgcgatggctggtatttgaatgaagacgctgaatttggaagcatggaaattatcaaagctcaatctttccaaatgtaggtgttataactaagatagttgctgagttcggattgctgatttgaaaatcatatgcaacaactgaatcatgcaaacacagtttgccaatcaaaagcgcacattaaaaggccaccatttctggtgaccttttaattgtgattcagaaagctagcttttagatatgtaaggcgaaaggtgccatcactggcgacccttcaatttattattatagccaagtcaattttctgtcgttagactgaatagagcatattgatttctagtgaagattataatagtgttgcgcagcaactattatcggttatggccgaaacaaaccatgtatgtcattaatgaaatgctaataatcatgccatccactaaaatagttttaagaagaatctgtttaagccagaaaacgttagctgatgatagtcgaaactctgaatacccacttttattttgctcccaataattcctcgtaagttttgaagtacgactgaaccaccaagtgaatccataagcggcgcaattaattattgtggcctccactggatatccatttgccattatgaaaatttgtcctccagtactgagagccgctatgaagctactaataaaatagccgattaggtacttctttgctgttggattattttttagtggctctaataaatatttttttctggcgttgatacgtgctcggaggttgaagaaactggctcgcatcttaatgcttggcaaacaaagaataactagccctattataaagagatttattaacgctatgaaaatcacagtactaagagtgtttgcaaccgagttagattgcatttgcatcccccttacatggtcttaattataatttttggtactcaaaaccgttattatcaagcaacagccgctaacaaagtgataatgaacatcatcataactgctaaggacgattctgttgaagctggcgtgggtgtgaattgtaaatctggatgcaagttattaatatagtctagagcatttgcgggaatactcaaaatagtctttagattattattataatcagttgcctgagtttgagtaacattaactggtaggggcgctatgaattcatggaagtgaatgtcaagtgtaatttcatattcaatagaatatgttttcccattgctggcagtgtgctcaaacgttgatttaattttcagggtaatcgtcatgagagaagttttaatagatgtattacttgaaatatcaccattttttatgacacccgcaatttcgttcatagcatttgtcatatcagatgaacctaatgcagtttcattctgtgtaagtaactcttggactgcatcactaacagaaaaactggtactaccatcatttaccttatatgtcgctgacacggtaccatcgtcgtcactaatgcttccttctaaatcaacttttaaagaaaaatcagcagcgggtgttgaaattgtgtacgtgtcactaaacgcttcaactgagacggatttcacaaaattaaagtaagtatttgtattgcctagtttctgaataatttcattaattgcgtctaaatcatcgcttccaccaacgctactaccagctgagaagtcatccactgccgtcgagcggctactgttagaagctaccttatcaatgtaaaaatcatcaaaagcaaccccattaaattggtcaaaggcccattcactgggcattggaaacccgagattacccgaaaagccagtagacatatcggatacaaaagctttttcggctaatccatccacaataatcgtattggcgacgtttcttgtggcgtaaataccaacttgaaacccgaaactactgatcccacttgccacgccagtgaagtatggttcgaccgtaccagctatgtcaccatcctgaatatcgacgtccacggcaaagtagataattgtatcatccgggaaacctaattgcatcgctgctaagccagctttacgcccatcactactgcccttagtttgagtgaagtagtcttcatcatcggatgcaccgtcttgataaatagggaaaattttcaaaccagcattagttaatatactgatttcactggtggttaggtttttatcaacctcactgcttccagtaccggctgtcccagttaagtagcgaccgatgtatttgtaaccagcagagctaagtgcggcggcttcactagcatcaatttggtgagatgtctcgcaagcaacagcatcgcggtcagggttaccggcagaggttagaagactcatgaaaacgtccaatcctgctgatgcaccagttgtttctggtagggccatatcgttttcaaaagttgctactgagcttgatacatctaaagaataactgccatcaaaagcccccgtatacgcttgattatttacataaaggccccattgtagtatacgaacaagattattattatcaccagttgaaacagttggagtcagttcttgcgtcattggcccataagttccagaggcagtgtcggtatcaagtccttcttcggcttgtaaagcataaatcaaagcggtgtttgtatcgcgttgataaacgccatcacagggtagaatgccagtataggcgagatagtcatgatttaattgttgttgcatcgtacggatcttttcatagccatccgcaaccagggtgaaggcgctcatattgagtagggcagccatgaactgagaatccagggtaccggatgtatcacttaatccagcgtattccttcatggttgtaactgccgatacagtatcgctagtgaactcgccatcaaaagcggcggaatcaatgcctttacaccagaaaccaccctgtataatatatgcgatattaccagaataaccaggtacaatatcatcagcaatttcatcaaagagctttgcagttgttggcccaaagttatcaactaaatcagtgattcccagttcatactgtaaaccacgagtaagaccgtaaattgtgtcccagccagtaagaccattttctggaacactaccaaatccagcgacgtcaccgtacgtggagtttaaccattgttgagtatctaatactagttgatcagccgtagacacgcctccgtagatttattttgataaagctttattatggactgtttcaccggataaacaagtctagctataaaacatcacctaaatttcttggaatgttcataaattcaaaacgtcatctttggaaatttagtcatgcaatcttctataattggatggaaaaggtgtttttatcaataattcaatgatgcaagatttggaattactgttgcctattcccaaaactatgataattaaatctaatgaccaagaaattaccgcatccgtcacagatttaaataactggctatgcaaggacttggaatggaaaactccaagtgaatttttttcagtaagtgaacccttaaaattggacaatttgtcatagtaaaaaggactgcttaacttgattttaagattcgcttagcttctttattgaatagggttcgaaaatatctagttggtcataacactacaatataatagtgataagttgttatttccatgaaaataatcagaaagtattttaggtttagtttgcggtctggtctgtgattttcaattgttggaacggaactgacatcgacttagaccgttgtttgtagttgatacaactagttaaagggcatgaaagataattgaaaactactgtatttgaagtttgacaaaagaatatacattttgttgattaatcgctatcattgttatgataactagtttaattgataaaggaatgataaaacgatgcagtcattaggagttattgatattggtggaacgaccattaagtttgctgtgtggcaagatcagcaattagttgctaagaccaaagttacgacgcccacaacgctagctgaattttacactttgctaaccacgcaggtcgcgcagatgaaacgcgattatcaaattgctggtgtaggcattagttcgcccggggctgtcaacaaggcaactggaattattgagggtgccagcgcactgccgtatattcataattttcggattcagccggaattacaacgccgttttgaattaccggtcagtatggaaaatgacgccaattgtgcggcgttggctgaattggcggatggggctgggaagcaggttgctagcctgtgcttcttaattgtgggaaccggtgttggtgggtcggtcattgtgaatcatcaaatttggcacggcgcgcacttattcggtggtgagtttggattcacgctcatgaatgaccatcagatcttaagtgagttaggcaccgcggtagctgttgcaaagcggtacaacgcgagccatccagctcaacctgagctagacgggcaagccgtgtttgaactggctgccaagggtgatactgatgctcaagccgaagttcaagttatggttcgggccttagcgcgggccatctacaacttacaatacagctttgacccggaattgatcgtgatgggcggggcggtctcaaataatccgcacctactcccagcaatcaatgctgaaattgaaaaattgcgggcaacggtcaaaattgcttctataaaaccagatgttgtggcttgtcatttcaccgatgaagctaatttacggggagcggtcgttgacttttgtcagacgtatctggacattcaaaaataaaagtctgaaaagtcgatggcaagcaagttattcgcattccaacgcaaacttacttagaatagtcataatgattataaattctaagtaaggaagtatggactgatggtaatgcgtgatctaaaatattggcacgaaagtcgggttaggcgtgctcaatgaccggtgggccgcgttagtactgatcaacctgaaggcggcgccaactgagattatgaatttgcgccagcgagttaggggccttagcacgcttaaactactgaatgttttagctaaattaaccgaattaggattagttgcgactgcagggaactatcaatttcagttgacgactgcgggcattagttttcaaaagcaactgcatcagttggaagtgtggggcgatcaaatgatcgtggccatgcactgaatataataagtattgactgtcgtgactaaaagctggtcgtaatccacaattatgggattatgaccagtttttagtttggtttctagttattatcggccccaagcggacgatcggaaaagagatggtaagctgcggtgtagcggctctgaacgataatgttggcaaccacttcaggtggctccggatgggccttggtcagccagtgctgaataattgccagcacgccactaaagtagattggcatggcgtagtcagccggaatcgactggaaatattgatgatttaagggcgcctgctcagtagtggcgagtaaattatcaatgagaccggcctgaaactgatcaagaaactgtggatcaccatgggggccaagcaaggcctgaaaactagctaattgggtgttgatattcgttgttaattccagataggttggataagcattccgcgggtcaggatgaaccaaggcagcttgaatcccttggttaaggacttgctttgaaacggttgcttgttcgattaaagcatgttcgaaagcgtgaatgaagtcgtaaatatcttgaaagtgactgtaaaaactcccacgactaacgtgggctgctttgacgaccatggtgacagtcaatttaaagatgggtgtcgctgtcagtagtgttgggacagttgcgaacattttctgtacggcaagcggatagttagttgtcatcatgtcacctcctgtaaatggtcaatttgacatcaattgtacatttccaacgcactcgtttggtcttagactatggttattctaaaaaacgaggtgcagctaatgtcaaaaattgattttcatacccactatttaccaacgagttacgttgaggcactaaagcgtcatgttccaggtgatcctgatggctggccgacacctgagtggacaccacagcttacgcttaactttatgcgtgataatgatattagttactcgattttatcgctatcatccccacacgtgaacttcggtgataaggcggaaaccatacgcttagttgaagcggctaacgacgatggtaaaagcttggcccagcaatatccagatcaattaggatacttggcgagtctaccaatcccttatgaactggatgctgtcaaaacggtgcaacaggctttggaccaggatggtgctttaggcgtcacagtgccaaccaactcacgtggactttactttggatcaccagtcttggaacgggtctaccaagaactagatgctcgccaagcgattgtggctttgcatccaaatgaaccagcaatcttgcctaaaaacgttgatattgatttaccagtgccattgttgggattcttcatggataccacgatgacgtttattaatatgttgaaatatcatttctttgaaaaatatcctaatatcaaggtgattataccgcatgctggtgcttttttgggaattgttgatgatcgaatcgcacaatatgctcagaaggtttatcaagtggatgtttatgatgtgatgcaccatgtttattttgacgtagctggagccgtgctaccacggcagttgccaactttaatgagcttggctcagcctgagcacctactttacgggagtgatattccatatacgccgttagatggctcgcggcaattaggtcacgctttaacaacgactgatctattaacaaatgagcagaaacaagcgatcttttacgataacgcccatcgcttactgactgagtaagtgatgttaggataactgttgaatttttggcgtgaccaatattaaaaaccggaacatctgttaattactggtgttccggcttttttacgttattgttagcataattagttgggctaatctgctgtacgggtaatgcaagtaatcagaaccctcgtctaaaaataaagtggctatggtgttgctgttttagccattgtctgaccgactgttgcggtatattcacgttcaccaagactgttgggatgtaaattatctttgacaaaccagttgtcgttgtcttgcgcaacgtatagccaatcaatgagatgcacattgttatattttttagcggccgcggcaatcaattgattgttagggtcttgccaatctttgcctggaacgcgggtgttgacccagtaaatctggtggttgctgccaatctgatcaatgatcccatcgatttcggcggcactcgttggaccgttcgtccccaagttgatcagcacgtttttctgaattgcattatcagcttttaattggctaatgacggctggtgcttccgacacttggcgaccaaccttggcgttaacgttaaaatggtcaaagatttgttttaagtcactcgtggtgcggaccatgattgaatcaccgatccccgtcactttaagtttgcgcaggacgtgaatttcactagtggataattgatatttttcaccaagggcactatccgaaacggcgtgtgtagcgcccttagttttagtattccccgtaatggcgttgccaatactgacaacctgttgcttaatggttggtgttggaatgattaatgtgccaccaatgaagacgacagcaaagattccgaccaaccaataaattaatttttgatgtttcatttggcacctccataccccgctataagattagcttaccaccattacagtgtcaattatgaaatttatcataaggtgcttaaagtggtgtgatggcaggtttgtcagtcggactgtctaagttgaatttgaaaagatcattggaaagtcaactggtgcttgttagactaaggctagtgcttttggaggtggttaaatgcaaaagaaaacggtgggactgttattagccagtgccgggccttttttgtggggaagctcgggaacggtggcacaacatctatttgacaccacaacgatttcgccgttgtggttagtggcggtgcggatgctagtatctggaggtctgttaattttatatggatttagtcgccggttaccggtcatggtcgtgtttcatgactggtgggcaacggtgcgtctgattgtgttcagcctgttcgggatggctggcgttcaattgacttattttatggcaatcagtactggtaatgcggcgatggccgcaattttgcaattcttgtcaccggtgatgattattatctttatcaccgccacgacttggcagcttccagggaaagtggatgtcatttctgtggtctccgcaatcgctgggacggttctaatcgtcacggaggggcacactgactcgctggctttgccagtaattgcaattatctggggattgttggccgcggttggtgcaaccatctacacattaatgccaacaaaattattaaaagtgtatggcgccacacccattgttggttggtcaatgctgattggtggtggcttggtgctagtcggaacaggtgcttggcaccattcgccgcagctaacctgggtggcgtggggacaagtcggcttcgtcgtgatttttggcacgatgctggcctacttgttctttttacagagcttggaatacatcctaccaacgactgctagtgttctgggagctattgaacccctagcagcaaccattttaagcgtcttatttttgcacgttcactttaactgggtcggactgattggggcgataatgattgtcggggtaactattttgcaatttgcagcgacacgcgccaatcagtttgtctctaagtgagcattgattggtatagatggggaccaaacaatatatgaacatattaatcgttttattcacaaattctattgaaaatccatcttgctagcgtatacttttcgatgaaggatattatgttacgagggggatttttttatgaagttaagtaagcggggactattctggctacttgggttggatatactcctctttgggtagacaagcaaataatcaaagcttgcctacctaaggaggagtttttctatgggcagaaaaggttctcgctatacgattaaagagaagttgtt

SEQ ID NO: 10 - DNA, 128185 bp, synthetic construct
  source 1..128185: mol_type = other DNA; note = Lactobacillus plantarum PDA6 - Contig 10
tcgccaagaaacactaaatggcatgaccccgaaagaatttcggaatcatgccattctaaaaactgcatagctattttaattatttgaactgtctacttgactcggagcagtcccgttagtaagttttgcaattttactactatttagtcagccactaggggcccaagccgcaactaattatcatgcgaaggattacacaactgccgcatcggtcatcaatggtcctgattttaagcacgctgataccattcaaattcagtatcaaatgagttttggggatacggctttcaaagctggggacacagtcactattgatatgccagctaatttggaaccacggaccgttggggctacttttgatgtgactgatgctgtgactggtacgggtgtcgtcggcggggatggtcaggtcgtactgaccatgaattcggcgattgaaggtaaaactaatgtaaagattgatgttaacctgggaatgaagtaccgttatgatgacttaggggaacaagacgttgtgtttgatacccaagacggtcaagatacatcagtgatcaatatggttgctaatgaagctaatatgtctaaaaaaggcaccattgataaagaaaatggcacgattaagtggaccttacttgttgatcggcgtgaaattaccataaaaaacttatcgattgccgataccattggtgatcatcagcaaatgatcaaaggtattgaagtctacaatggtgaatggtcgagtgccaacacttacaagcggcgtgataagcttagtgacgatgcttatcaagttaactacagcgataatggttttgacttgaaattcaacgatacagtcagcaacctagttgtcatcgattactatactaaaattacggatacagaattaattgatcaaaattatcattttaaaaataaagctgtaatggaatggggcggcggcacgtccggtggcaagaacagcgaagaagctaacggtaaggtctacgaaaaagtcgttaacggtgggagcggtactggcgacttaagttccagctcgagttcgaacagctctagctcaaataattcgagtgacgtcgattccagttccgacgattctaattctgaaagttcaagcgctgtggactccagttccgacgattctagttctgaaagttcaagcgctgtggactccagttccgaccattctagttcggaaagttcgagcgctgtggactccagttccgacgattctagttctgaaagttcaagcgctgtggactccagttccgaccattctagctcagaaagttcaagcgctgtggactccagttccgaccattctagttcggaaagttcgagcgttgtggactccagttccgaccactctagttcggaaagttcaagcgctgtggactctagttatgaccactccggttctgaaagctcgagtgatgtaaatactagttctgagagttctgacaatacgactacggaaccagacaatggccatcagactggtgacattgaagatcctgaagataatacggcggtttatccagatatcgatgaagatactgggaccatcgatgttgatggtgggttcgatagtaactacgatgggagtacgacttccaacagtactaattcgtcaaaaccattgaaagattcaacttcgagtgtctttacgagtacgcccgctaacacaacgacgggccaagatggtgctgatcaaacgccagcagcggatactaaaaagtctagtgctaagacaacggtatctgaaagtgacgcgttgaccccatcaacgcctaaccaagttgctaaattgccacaaactaacgaagctaagatggacagtcaagcgcttcgttcagtcggcattttgttaggtgtattaacgctaggtggcggtgcacttatccgtcattggttttaaggctaactgatagccctaaaatgatgcacatataatgttattttttaaaacggccttctgttaattcagaaagccgtttttagttagcggtcatttaatagctaacttgaaatagttagattagttagcaatggcgaccatggtcgttagaagggctcactggttaacgcacggcaacattagtttatgacgggttcacaagcggctgctgactacgttaatcgttattagtcgcaattggcataactggttgcgcaattcgatttgattttaactggataatgggggtaaagtaacgaatagatagaaatggaggtcacaagatgagtaaccgattgatttttgatgctgactggctggtgccggaacaggtccaagttgccgggcaggctattcaatattatgctgcccgtaatattcagtacgttcagcatccagtcgcagcgattcaggtcctaaacgtctttgtaccagccgcatacttgcatggcagttcagtcaatggttatcagcgggcaacggcgccaattctgatgccgaatacggtcggcggttatttgccaggaccggcggatgatccgcaacgtgtcacttggccgacgaatgcagggacgattcaacaggcacttaaacgcggttacgttgtggtggccgctggaattcgcggtcgtacgacggttgataagtctgggcaacgggtcgggcaagcgccggcttttatcgtagatatgaaggcggcaatccgttacgttaagtataatcagggccggctgccaggtgacgcgaaccggatcatcatgaatggaacgagtgctgggggtgccacttcggctttagcgggtgcgagtggcaattcggcttattttgaaccagccttaactgcgctcggggcagcaccggcgactgacgatatctttgcggtgtcagcttactgcccgattcataatctggaacacgcagacatggcctacgagtggcagtttaatggtattaatgactggcaccgttatcagcctgttgcggggacgaccaagaatgggcgaccaaaatttgaaccggttagtggtcagctcacagttgaagaacaggccctttcgttggcgttaaaagcccagttcagtacttacttgaaccagttgaaactcacggccagtgacgggacgcacttgacgcttaatgaggcgggaatgggttcatttcgtgatgttgttcgccaattattgatatcatctgctcagacggcattcgatcaagggacggatattcataagtacgcaggctttgtcgttactggaaatcaggtgacggacttggatttatcagcttatttgaagtcgttaactcgcatgaaagccgtcccggcgtttgaccaattagatttgacgagtccagagaataatttgtttggcgatgcaacggcgaaagccaagcactttacggccttggcacagacgcgaagtacggtgactgcacaactagcggacgctgagctgattcaggcgattaatccgctcagttacttaacgacaacttcgtcacaagttgctaagcactggcggattcgccacggtgcggccgaccgagatacgagttttgcaatcccgattattctagcaataatgttagaaaatcatggttatggcattgattttgcgctaccgtgggatattccccacagtggtgactatgatttaggcgatttattttcctggattgatggcttgtgccaatgatttgaatacgatgagtgaaagcgaccagcgagggcatcgtgcctggctggtcttttcgtttagttggcaacgataatgtgatgaaaatacgttgacaattttcaaaacacgtggttaaatgtagctattctcatttttgtctaatcatattcttattaatttaaatggaggcctacatatggaagcaactacgaccgcggctaccgcgacacataagatgagtaccatggattacgtttataaagtttcggcaggtgtttctaatgctattttagtttgtttagggattggattgttattgcagtcactcgcgaattttgttcactgggcggcattataccaagtcggtgcgattgcgcaagtgttattgggaccggcatttggagtcgcgattgccacgatgctcaacagcaacacgttagttacgtttagcgccatgatttcgtcgacgatcggggcgaacgccgtctttttctcgcagtccgcaactaacggcgtcacagcgacggggcatacgttggcccaagcagctcagagctcgatctttaccaccggtcaaccgatttcggccgttgcggctgggttagtcgcggttctgatcggtaattatttaactggtaagacgccgcttgatatgatgttggtcccgttagcggccacttttgtcggtgcggtggttggtctcgggttagcagccgtaacgacgcccgcattggtctggctgagcaagttcatcgcgacttcgatgaaggtcaacccattgatcggttcgatggccgtttcacttgcctgggcgttatttttaatgacacctgcgtcttcggccgcattggcggtggcggtcatgttagatcccgtctcatcgggcgcggccttaattggaacaaccgcccagttcgtgggctttacgattatgtcttttcgccaaaacaacttgggggccaatatcgcgcaggggattatcacgcctaaagtccaatttccaaacttgctggtgaatccacggttagcgattccaccaatggttgctgcggttattgccgccccgctagcgacgattgcctttcatttttcaaccagttacaagctggccggcttaggattgaattcgttaattgcaccgatttcgttagcatcgacgaactttaacagttttatggtctatctcttgactggggtgctgatgccagcagttatttcaatcgtgctgtaccgcattctagttgcggcaaagtgggtcgaatcgcagcagctacagttggaaatcgtttgatgtccagccgatattaagagcctgtttctatgactgatgtgaaggccatggaaacaggttttttgtatagtgttagctgtttgttcaggatagggtgagtgctcaggactatgaaatgggacgtaaatccactatattaaaggtgtgaataatgaataagtgagatgacatcgatggaatttaagattaaacgggatgggttggcgttacaggcaaggttggagactccggcggcaccgagctcaacgctagtcatcttaatgcatgggtttacggccgatatgggatatgatacgacccaatttgtgccgcaattggcgcaggcattagttgctcacggcttggcagttctgcgttttgacttcaatggtcatggccgtagtgaaggtcggtttcaagatatgacagtgattaatgagattgcggacgctaaagcagttttagatgaagcgttgaccttacattatgaccacattgtcttggcagggcattcgcaaggcggggtggtagccagcatgttagcaggatattatccagacgtggtcgacaaactgatcttgatggcgccggccgcaacgttaaagtccgatgcgcaacaaggtgttctgcaaggtgcgacctatgatccacaacatattccggcctatttgaatattcgtgatggccttaaagttggtggcttttatttgcggaccgcgcaacagttgccgatttatgaggtagctcagcagtattccggttcggtgacattgattcacggtacggccgacacggtggtctcgccacaggcttctgaaaagtatcatgaggtctatcagcacagtcagttgcattgggttcaggacggtgaccatcgctttagcggcgatgtgcgcgctaccgcgatccaattagcactggccgcgtttaaatgatgacttacgccagttaatataatgttaggttagttaacgttggtgagtttaaaggcggtgctgacaaattagtttaatgttcaatgaaaataaccttaatcttttaccggaagacgcctatactaagagtagttagttttctgaaagtaaggtgtgcaacgtgaaaagtgaagtacagggaatcattcaagatttatatcaagaattagcaccaactgcggcgaatcaagaaattcgggcagcactattgaaggcacaccaacaattgaaacaggcgccccagcttgatcatgcgctaattaagcggttaacgaatgacgtgacttataatatttttactaaacagttgcgcttgacgccaactgaaaacttattggttagtgagttactatcggtcagtcatcggttgagtgcgtaatggctgaaccagcgactcattttggaggtgggacgatgcgccgaatcatcgcaatcgggaaagcactagtgacggccggatggttaataacgattattctggtgggttacggtgttagccgtcagctcaagcggacactattcgagtagcaccctgttatcggttacaaattaatttgctcaatctaatgaatataaaaagcctcgtaaattaacgcattatcataagcgttaatttacgaggctttatttgtgataccttcgaacaactagtattgactaccgaacaagttaccaatttgattggcaaagtcagttgcgtgactgagaagtgcagtctgtaaatcctgcagaataattttatccataaagtagaacagcaggctaacgactagaaccgcaataaggtctaggtagacgcggctaattaatggttgggtcaccgacttgttaatgacgaagatcaaacctaattgccagacaaggacactaacactcaacaggataatcgaccatctgaagctagccgcaatggtaaagaagttatcaacactgaagttaactagggacgaagcaaaccataataataggttcacaataatcgcgtaattggttaactgaccgaagcgtttcatataggtcgtaaagccgactttggtcccacgactgccaagtaagcaagtgacatagccgacagccaggtagaagcacatgccgattaggagacataagaaaatctttaagtcggtggaaaaagctaatttactaatgtggaaatagctttgactgtcattggcagtggtcagaaacttattgctaatggttacagcggccaacgtcataaatagtgcttcaatgacaaaggaaatgtaactaaaataactttcagttcggacttcacagctaggatttttccagctagccaagagccaactaaaataattcttagcagatgattgcagctgttggacttgttggttagtagccgttcgtgtcgtatcagcagctgctgaacgtgatgctgtttgtttttcagcgctggccgattgttgttgattggctgaagctgtgctggtatggacagctgcttgcgtcgttgcagtcgttgtttgggtagctgtggctgaagtggcgttggccgttgccgaggccggtgtcgctttggttagatcgtaaccacagtgggtacagaactttgcattggcagcaatctcagtgccgcagttgggacattttttcataagttaaattctccttcattaattatcagaatcatcggatttagtgtacgaccgaattttttgggccggtgtgattttaacaatcttgtagtgccccccggttttctcgaccgtcgcggtgtaacgaaagacctgaatgcgttcatcttcagagttggtaaagtcatatttgacgtcataagtgatctgactttgttgtttagctgctggaaccgttgataagacagtcggctcataggtgacatcgaggacgtcatcattgtcgtagtagcccttcgccatttggaccagttctttgtagtccgtgttatcggtaccgttgacgaagtagtcgtccaaagtgcggtcatcgtaatccgaagcatccgataggtcaccggtggacgtataactgctgacagcggtgaagataccgttcaggtagtccgaggcagtatctttactcatcacaccggcaaatttgaggtccacgtcttgaccctcagcgtcactaacgttagtttgtttggcggtcaatgtttgtgaaccggctttgtatttaccagtcaacatcatgcgattagaccagggaatatcattcagcgccagtgtgccactgctgttaatcgttccttcattttcgccattgatataaacggtggtattcggtgtaccattaacggtgaaggaaattgtacgtaaatctaagtcgtaagtttggccgtttgcccggaggtaataggtgccctcattggtaatctgatggccgctaaccgttcccttggcagtcaaggtgtatgaaccaggaacatacggcccgattttatgctcgtaagttgctttattagatgttgcgacgtgcttaccattaacgctgagtgcaacgttacggtggttcgtcgccagtgtggcataaacggaagtgacttgtagttgatacttatcgaaaaacaaccaggctttaccggttttaacgaactgaataccgtaatcattagtcgcagaacgacttttaagcgaactagccagtgatgctaatgattttcgattgtttttaaagtaagtgaccatcggcttgacgctatcatttgtaatcttgagtgatgggtcagtgctagttacttgcttcgctaaacctcttccagtcttgagtgcggttaagtcacggtcgagctgattgagcggctgataataattctgtccatacagatagccaccaatcagaatgacaacgataacggcaattagaccccaaccccaagttggcatatggcgttgggcttgttgtcgaaccttgcgcgtcgaacttgctgttgactgcgcggtgtttactgatggcgatggctgatcagtggttgcgtgcaacttaaaaccgcagttaggacaaaattcatccgttgcggccactgcttgcccacaattaggacaaaacgatgcttggccgcgacgatcgtcagcggctttaaaaaattggtgctgtttatacattccccgatgctcctccaaaaatagattgattagtcgacaataaaagactatttattggagtcttcacagtaaatagccgctactatcaatcgagttaaaattctgaataagacgtgtcacttgaatatgaataataagtgctaatcgatgaataaggctattgatgactaatcatcgttaatagcttaagaaagtctaaaaattattaacatattttaaagtataaacatgattaaactgtttatcaatatttacacggcgtatttatttagtaatgccccagtttgcacaataaacgacatgtcacgcattaaaaatacgactcggctaaatgctgtgccggttcgttagtcatgaattatgattgaaacgtgccaagtttagattgttattcgtcagccggtgcgcgtcctattccgacctccggggctgggtgacaattgctggaacgtagccgacgtcgatttgagctaacgcccaacccgcgtcatctcaaatacgagtcttattctaagccggaagtaccccacttccgactaagaataatttggctactgagcattgtccacccagcccctccggtcgggaagtcgctcgaatggctaatgaacgaccaccgaactcggtacaatttgtcgttggctattttgattaaacaaagcgttaggtgtattaagccctctgtcaagagcttaaatctcactacaccaattcaggattagtgagctatctcaatatcattttcaccctgacagttgattgacaaagttattgtttatgaaaaacaatgacgaattcaccaaaagttgggtacgcacatgtccgccattcgaacactgtcccgactggaaggcatttcggccaatgctcagcactgccaagagtgtgaggttcagacggggtgagactgaggattagcctagctagggcgttaagcggtgaatttccgcttgacgtcatagcgtagctaaccggaagtctcagtctgacccgagcacgtttcaccaatatggcattaaagcgtggaagaccagtatttaagacgtgggttgcggcttaaatctgtgtccaccgcgttccagcaattggcagaaatgcctggaagtcggcgtaagacgcgccaactaagcaattttacgctaactcgaactttttccagcgggcctaagctggctgcttttgactttggaaatcagcacgtttcaatcataattaatacataacaatcatcgacctaatgcgtttagttgtattattccattcacgaataacatatctgcgcaatccgaattgaacccgcttacgagtggccgtatgatggtcttgtaaactttaagggagatgaatgaaatggcagaacaaccatgggatttgcgtcgcgtgcttgatgagatcaaggatgatccaaagaactatcatgaaactgacgtcgaagttgatccaaatgcggaactttctggtgtttatcggtatatcggtgctggtgggaccgttcaacggccaacgcaagagggtccagcaatgatgtttaacaacgttaaggggtttcctgatacgcgggtcttgactggattgatggcgagtcgccggcgcgttggtaagatgttccatcacgattatcagacgttaggacaatacttgaacgaagcagtctctaatccagtggcgccggaaacggttgctgaagcggatgcgccagctcacgatgtcgtttataaagcgacggatgaaggctttgatattcgtaagttagtggcagcaccaacgaatacgccccaagatgctggaccatatattacggtcggtgtggtgtttggctcaagcatggacaagtctaagagtgatgtgacgattcaccgaatggtccttgaagataaggataagttagggatttatatcatgcctggcggtcggcacattggtgcgtttgcggaagagtatgagaaagctaacaagccaatgccaattacaattaatattggtttggatccagccattacgattggtgcaactttcgaaccaccgaccacgccattcggttataacgaattaggtgttgctggtgcgattcggaaccaagctgttcaattagttgacggggtgaccgtcgatgaaaaggcgattgcgcgttctgaatatacgcttgaggggtacattatgcctaacgaacgtattcaggaagatatcaatacgcatacgggcaaggcgatgcctgaattcccgggttatgatggtgacgccaacccagctttacaagtgattaaggtgacggcggtgactcatcggaagaatgccatcatgcaaagcgtgattggaccatccgaagaacatgtcagcatggcgggaattccaactgaagctagtatcttacaattggttaaccgtgccattcctggtaaagtgacgaatgtttataatccgccggctggtggtggtaagttgatgaccatcatgcagattcacaaggataatgaagcggatgaaggaattcaacggcaagctgccttgcttgcgttctcagcctttaaggaattgaagactgttatcctggttgatgaagatgttgatatttttgatatgaatgatgtgatttggacgatgaatacccgtttccaagccgatcaggacttgatggtcttatcaggcatgcggaatcatccgttggacccatcggaacgcccacaatatgatccaaagtcgattcgtttccgtgggatgagttctaaactagtgattgatggcaccgtaccattcgatatgaaggaccaatttgaacgggcccaattcatgaaagtggctgactgggagaagtatttgaagtaacgtcatccattgcacttgatgagcgtatttttatcgcattgaaccaaaatttaatcttacaaagagccgccagaccaacggaagtgtgctggtcggggggctttttgctgtcaaaattgaagggagcatgtagctcgtgaacaagaaaacgattggctttttcagtggaatcgccgtatttgccattatttacttcttaccgattgccggcttgtcagctaaggggcagatggacttggcacttagtttgatgacggtcgtctggtgggccacccaaatcgcgcaacccgcgttcgttggtgggatttacttaatgttgctcattattatgaacgtggcgacaccgtcacaggtcttctcttcggcgtggactggttcaattatgtggctcgtaattggggcgtacttgattgcgggagcggttaatgaatctggtttgggtcaacgcatcgcgtacgcattcattatcaagtttgtgcggagttggaaagggattgtgatttcgatttttgccctaacctttatcctcgcactcctgattccccatccatggcctcgggcgttcatgattatgtccgtcattacggtggtcgcggaaacggcgaagatgcccaaacgcgatttggctaagctaggcctcgctgtctttgctgcgtcctgtccactatccggggtcttttatactggtgacacgtcactaaatccgttggcagtacaggcctctggtcaaagcgtcaactttgtctcttactttatctacatgggcgtgcccatgatcattgcggccatcttaaccatgtttctgttcttattcctcttcaagcctagtcaggaagtccacatcgatgtggaagcgttaaagcaacaacaagcccagttgggtggtatgacggggaaggaagttcgaacaattatttggctgatcattgcgattgcactctggttaacgagtgggatcaccggtttggacgttggttggttgacgttgatcgttgcgctgatgatgagtctcccggtagttggcgggatcttgacggccaaatcatgggaaggtgttcccgtgaacgtgctcgtgttcttgacttcggcaatcgcaatcgggaatgtcggtggtgtgactggcatgaataattggattgcgaagaccttgattccaagcaacttgccaactaatatttatttattagcgattgtgattactgtttttgccatgattatccatatgttcatgggttctgtcattgcggtgatggggattacgattccggccttcgtagcggccacggctcatatgggaatttcacccttggccgtatcgttactagtcttctcggtgacaaacttgcattatattttaccgttccacaacctcgctgtcttagttggaagcgaccccgatactggtgggggttacacacaaaaagacgtgatgcggttaggaatcccactgacggcggttgtctttgtcgttgcgttagttgagatgttctggttccacctcgttgggttggcataagcggataagtttaaaaaatacccttttcaaacggccggttggtcggatggaaagggtattttttaaacttgttgattttcctgggcagtcaccgtcaagtagtcaattaagtcggtgagtaactggttccccgttcgctggggatatacaaagttcagttgactgatgaacgggatggcgagtgagcgcatgaccacgtgttcagtcatgaacggaagtaccgattgtttaaataagaaagtcacgttattttgattgagaatgcccaggagcgtttcaatatgcgtactttcaaagaagaattggggcgtcatgccttgctgagcaaagagtgcgatgatcggttcgtaaacaccggagcccggtggtaacgttgcaattttctgccgcgctaagtcttgaatccgaatgactggctgggcagctagggggtgatcacgcggtaaaataattttgagttcgtcagcgagtagtggttgtttttgaaattcggtgggttgcaattgggtcgtctgagtatcgcgaatgatggccgcttgcagctcaccactcagtaaccgtttgacgatttggtcgccctcatcctcgatgattttgatttcagtatcaggatgctgagtatcaaaagtggcgatctttttggcaatgttatattgacctgagattggaatggcgccaatgatgagcttggcaaatgtcgttggccgattcggtgccaaatcgtgcatcatggtctcatagtctgtaatcattttatgcgcatgatgatagaacgtttcaccagctggcgtgatttgtagacggcgcttgttgtgtgtatctagtagtttaatgttcagttcgttctcaagggctcgcattcgtttggacaattccgattgtgataagtggagttctacggcagcgttagaaatgtggcgtaaatcgtacaccatcacgaatgcttggaggtcattaatggtcatagcagtcacacttttctttaggttaaattctattctaacaccgatggcgaggcccgcctaattaagtaacggtataaattagtatcaatattgtgaggccgctatggtaatcgaaatattagttattttttttattgagaatgggtcactaataaaatcatggtgcgggttaacatttgttagcggtgatgattattcgttaccgtttaattgtggatggggactcgtgttgagggaggcagtaatgacatctagatataattattttggtgatgtggatgaaagttgttgagtggttggtgattacaaatacgctgaatcactagctttccttgcttttgaaattgaatccggcaaaatgaaatagttccagcagtttcatattgatcatcatgctggtcatggctgggcaatactttttaaaaggggattagtttagtatgtcaaaagcgcttaagatagtgatgggaatcaccatgttaacagggggcatcatggcccagaaaatgacggtacatgcagccgaatctaacactcgaaccggtcaggcagtaaggatgaatggcacggtcagtttagcaagtcaggtcgaaaataacccagctgttaaggcggcccactaccaggtaacgcaagcggtgcaagcattaaccatggctactacggcagtcaaaacggctatgagtgatctgcaagcggcgcaaaccacgttagacgctgccaacaaaacgttagccaagaatcaaaagattcagacgcatatgggcgtacttaagcaagcagccactgaccggcacgtcaaggcaacgaaagcacttgatgaacaattggcaactaaaaagacaagccaaactgcggtaacgacggcgcaagcggcagtgactaagtcacaagctgctgttcaagtagcccagagcaacttcgataaggataacagtgcggccaacaaagtcacgttacaaactactcaggcaaagctgaaaacggtgcaagagacgttaacagcggcacaagctaaccttgataagactaatgagcacgtgatgatggccgaagaagaattagccaacgccaaaattgaagtcagtggcacgagccgcgacttccaaatggcacaaagagattatgatattgttcagccccaagcagcagttaatcaggcgaaagcagcggtgacagctaagttgcagcgcgttgcgggtactcaagatcaggtcgttactgcacagcgggaattgtcccaagctcaagctggattaacgaccgtgcgcgcccggaccttggcaaccttaacagcagcggccgaaaagccaatgactgaaaaacctgtgggcgaacgaccagtcgttagtcattcaactggcacgtcaaccagcactaatcagtcggcggcaccacaagcgaccccggccaagcccactcttaatcagtcaagttcagcttccgtcccaacagcgcagcgggttgttacgacgcagccacgacaagccacaacggtattgcggacgacgacgagtccggcaatggctaagccagtgactcagcagacggtgccaacgaccgcaactaaaacggccacgttaccacagactggtgaacaaaccaatcgagttttgaccgtattgggcttcgtattattggccgcaactagcttatttggttttagcaagcaacaacggcgccataaaacaactgattaattaacaagtgtgtgggcacaattcgatttctcaatgattatttcgaagtgcaagactagttcaatcggttactttagtctgagcgactaagttgacggcggaattaatggcgatttaaaaaagttctttcggagttttagttgttcctgaaagaacttttttgctgggaatgattggtatcgtttagttaataataatatgctaagaacgccagtttttcggccggaaatacttgcttgaaagtagctgctggactactataaacatggtttcaaagagcccaagaattttactaaataaggagttgagtttgtgatgatgacgggaatgatggttctatttgtattgttagttggtttagttttaagtgggattttcttccgatatatggatacaactgccggtatctcattcagctcactgaagttcgctgatttgcggatggaattgttaaacttggtactcgttattggactattgctgtgggcactggttttaattcgttaaagcgacaattaaacttatcaacttagctattattgcgagtccggttaacgccggacttttattttggcttgtgattggcgaattatgttagtgcggccgccaaaatacttgcgcttcaacgtggaacaccgctattatggataagtgattattatctagaagggaatgaataactatgacgcagtcgccatattggcaacggatcgcggccaaagctcaggccgcccagcgaccgttttttagtttagcaccgatggaagccgtgaccggctccgtttttcgccgggtcgtgatgcgcgctgcggcccccgatgtcttttatactgaatttacgaatgcgttaagcattactcacccgaaggctaagtttacaacgcggggacgactatatgttgatgaggccgagtcgccccgaccaatcgttcaactttggggcaatagtggtgaggactttacgaaagcggcccatgaagtgaagaatcaaggttatcaagccattgatcttaatatgggctgcccagatatggcggtcattaaaaatcatagtggtagtgatttaatccgacattttgatcgtgccaaagaagtgattgagggcgcacgtcaagcagagcttcccgttagtgttaagacgcggttgggctttgacgatgtgcatgagtacgagacttggattccatttttgttgcaacagcaggttcccgtgttaacggttcacgtgcgcacgaagatggagatgagcaaggtaccagcgcattatgagttaattgataatttagttcaaatgcgtgatactttggcaccagcgacgctattacaaattaacggggatatcctggattatcaggctggtctgaagcttgccaaagcccatccaggagtcgatggtatcatgattggccgcggtatttttcagaacccatacgcttttgaaccgattccccagcctcattcaacgcgtgacatgctagaattgttacggtatcaagtagatctgtatgatcaatttattggcttaggtctacaagggcatttcgcaccgcttcaacgcttctttaagatttatgttcgcggtatgcgtcatgcggccgaattgcgcaatgaattaatgcagacgaagacaacggatgatgtccgtgcgattattgatcgcttagaggctaagctaccagcggattaggtcgcgttattttaactaaaacggctatatttttgccatttagctgtgcttgattaaaatggttttaatgtcgaacgtaccgcatctaaagtcaactgcaaattaaatgctagcctgtaagtggaccataaaataagctaggtccttcaagaagttaatttcttggaggacctagcttattttgtggtctaaattattgtaaaccggtcatcgagtaaggtaacttgttcaggtgataagccaacgatttgaagctcacgttgtttagtcacaaaaatggcgccgtaaatatcgagtcgctgagttgcccaatcgggaatcggttggcccgcaaagaagagccgcgtcgtttcgatttcaccatcaatggaagctttcgagaaaacggtgacactttcaaggtcgttttgtcggggataacccgtttgcgaatctaagatgtggtggtaggactggccgttaaattcgaggtgccgctcgtaaataccgctggtcacggccgagcaggggccaatcgtaacgctggcaatcgcgttaccgcggtcagtggtgggatcttggataccaacgcgccattgcccatccggatgaagtggggacgtccccaccattaacagattaccacctaggttgatcattccggcccgctgtccaaatgcttcccagtaatcttgaatgcggtcggcaatgtagcccttggcaattgcgcctagatccagctccattcccgtgaccttgagaagcacactgaaatcagcgtcattacaaatgacggcttcggggtcgatcaaggccaatcgttcgttaattgcagactgttcagggacgtgcgcgttagtaaaaccaatgtgccagagtttcacgagcggaccaatcaacgcattgaaaccaaaatgttgtcgactgagttcgacagcttgccgaacgagtgtataggtggcggcgctcacttgaacgggatgttggcccgccgcctggttgattgccatgacctcagaaacagtccggttgacagtcaagcggtcttcatattggtcgataagatcgcaagcaacttgtaggtactggtcactatcactaccaaaaagggtcaaatcaatgtcggtaccgagcgcgtgatgagcttggtgtcgacgctgctgagcgagtgcaggaattgctgtctcgccattataagctaaagttgtcataaaaccagtcctatctttcataaatatcaacgagttcagcaaactgaacatttattcccgctcagttagaagtaggcacaattaaatcagtttccctgcacagtgatctaattcgtgttgaataatttgtgctgtgaagtcgttgaatcgttgttgttgcggtttaaagtgttgatctttatatttcaccgtgatttggtgatagcggctagtcggacgttcaccaggtaaggacaggcagccttccttagtctcgtaagtgccgtgatgatcaattatcttcgaattgatcattgcaattgcaaagggaccgagttgcacgacaataatttgtttgttgaccccaatcatattcgcggccattccaacgcaattatcggtgtgtgcggcgagggtatccagtaaatcagtcaagacttgagtgtctgcaggggttgctaagtcagcagggacactaagcgcggcgggatcatgcacaattggtcgaatcatttgatgttcctccattgattagtcatattaattaattatagagagcacggttgacagaagcaagccgttcgctagttgtcaggccctaaaaaacacaccacactcacacaagtcaacgtgcaaatgtggtgtggccttcaattagtacgacaatttaaatgttggcgttaaggtgcccgcctttaaggcgtcattagttgtggtgggaacctggttgtgttcaggctgccaatttggatctttaatcagtgcgatattagtcccttgataattcatggtcatttgattagcgtcgttgagggtcagttttgcaacattgtgatcgattgtgaacgtggcacgtgtatcacttaacgttaacgttgcgcgactacgaatgggcgtatgtccgcgtcggaaccaagcaacttgatgattggtactgaggtacagactcattgctggtctagcgctgacccagcgacctaagaaatcccgagtcgtgactgagcgaacggcgctgacttttgatgttgctggttgaacggtgggcgtttgtgtgtcagtggcagaatggcatcctgtcagtagccctgtcaacaacaagccaacgattattcccctgcttttttgcataattattctctcctccaatgtccacatccctcaatgaggacttaaattcattatagcgaatccgccgcatgagttaaacaaaatagtcataagttaatcagtttacaacaacttggttgtgttcagcttaatttttaacgaattaaaattcggtttatggcgtgtgaaaaatattgaaagcaagccgtatcaaggttggttcggtagttaacgagattgattaaatattctgatattagataaaaaacagtataaaaaatattttttaaatattccaaagacgcactaaccggacgattaaagcgatttggtgtacacaactgaaggtgacagttaattttggcaatgggcaagttaatggaaatgagctactatatatagtattgattcaaacagaacgcactatcaattgtattcgatcaatgactttgaaaagtggggaattaagatgctaacaacgacaactaacgatatattagaccaattacggccactgaccgtcacaaagcggggtggcgcacaaacgaaatttcatccgtataaaattgactttgtcttacgacggttgttagcgactgatgacgaggtacgggtcgtcaagcaggcccttgttgcccagtatcaagatgctgacaacattgatactcgggagctacgtagtaccatgatgcagattttgaatgcgcaaggcctgaccgcggcagctaaggcatatcaggattactttgaagctgaacagcagcggtttgcggcagcaactaatgttcaaggacggattgaaaagttgtttgagcgcgatgccagcgttgtgcatgaaaatgcaaataaggatagtacgatttttaacacgcaacgcgacttagaagccggtgctgcaagtcgcgccatgggcttgaagatgctaccagatgtcgtggctaaggcgcatctgcgtggcgatatccattggcatgatctcgattattcaccagtcacgcctgaaacgaactgttgcttgattgattttgacggcatgttcaaaaatgggtataagattgggaacgccgaagttgcctcaccccggtcgattcaaacggccacagcgcaaatggcgcagatcattgccaacgtggcttcattacagtatggtggctgttccgctaaccgggtcgaccaattattggctccctatgcggcaatcaactatcaaaaacatatgactgatgcgaaaaagtgggtccctgccgatcagcgggaagcttatgcgaaagccaaaactgaaaaagatatctatgacgcgatgcaagcccttgagtatgaaatcaatacgttatattcgtcacagggccagacgccgtttaccacggtcaattttggtctaggaactagttggattgaacgagaaattcaaaaggcgattctccagattcgaatcaagggactcggtaaggagcaccgaactgcgatttttcctaaattgatcttcacgatgaagcgggggttaaatttaagtccgaatgatcccaattatgatattaaaatgctcgcgattgagtgttcaaccaagcggatgtatcccgaccttttaatgtatgacaagatcaaggaattaacggggagttttaagacgccgatggggtgccggtccttcttacaaggttggcgtgatgaaaatggtgtcgaggtaaactcgggccggatgaatttgggcgtggtgacagtcaacctgccacgaatcgcgttagccgcacatggggaccaacagttgttctgggaaatcttcgaggaacggatggcgacttgtcatgaagcactcgcgtaccgtatcgaacgaacgaaggaagctaagccggaaaatgcaccactcttatacatgtatggggcgtttggtaagcggctaccagcaggtggtaatgtcgatgagctcttcaaaaatcagcgggcgactatttcactgggatacattggaatttatgaagtctgcacgaccttctttggtccgaactgggaacaagacgagcacgcgttagcttttgcggagaccgtggtgaaagcgttacgggataagtgtgcgcagtgggcggctgaaagtggctatcattatagtctgtattcaacgccggctgaatcgttgacggatacgttctgtcgtgacgatattgcgaagtttggccggatcgcagatattacggataaggaatattacacgaatagttttcattatgatgtccgtaagcacccgacgcccttcgataaattaactttggaggaacgttttccacaatatgcgtcaggcggctttattcattattgtgaatatcctaatttgactcagaatcctaaagccttggaggccgtctgggactgggcctatgatcatgtcggctatttgggaacgaatacgtcgatcgaccagtgttttaagtgtgggtttaagggtgagttcaaggccactgcccgtgggttcgtctgtccagaatgtggcaatcacgaccctaaatactgtgatgttgttaagcggacgtgtgggtatctaggtaacccacaacaacgaccaatggtacatggtcgccacgttgaaatcgcgtcccgtgctaaaaatatgtctccggagatgattaagaatgccgcgcgctacgaaaggaccaaacaatccgatgcccaaagaatggctggcagaggacttaagtgaacaatatgttgctgattataaggcatttaactttgttgatggggaaggggtccgctgtagcttgtacttgagcggctgcccattccactgtccaggctgttataatgtggcggcacaaaattttcattatggacaaccgtattcacaagaattggaagatcagattattgaagaccttgggcaagattatgtgcaagggttgacgttgctaggtggtgaaccgtttctaaatactcaagtcggcattcggatttgtgaacgcattcgctccgaatttggaaacacgaaggatatttggtcgtggtcaggttatacttgggaagaattgcaacaagactctgaggataaactgaagatgctatcattaattgatatcttggtagatgggcgctttttacaagataagatggatctctcgctacaatttcgggggagttccaatcaacgtattatcgacgttcctaagtcgctaacagctggtaaagtcgtcatctgggataagttggttaagtgaaattaagactggtaaaaagagcgttatgacgaggtcgtcacgacgttcttttttgttacggtcaatataacggttacatataacccttaataatttttttaattaaagtctgtaactatgtctcgatattttagttaaaagcggttatactttacaggagttgtcaatttatattgacataaagaaatcattaaaagcgaggcttcatgaatgtatcgtttttttgttcaaccccaagttgatcacagccatcgagctgtttttggttatgaattactgttacgtaaagagatgaatggtcactgggccgttccgaagtcgttcactgaattatcattagataaacaagctgaattattagaacaacttgctagtcaattgcagacgaaagcgactaatcaggtgttagcccttaattcaaaccggcaacaagctgaggacgacctgatgttagggacgatcatttacctaaaaaaaaggttgaatccggccgcgctgacgattgagttgacagaatgtccttcattaaacgagattcaaaaatatagtctctttttccaccaacatgatattaaattaagcattgatgacgtggggacgggctcgagcacgtttgagaatattcgccacgcactaccgtttgttgatcaaatcaagtttgcgatgcaaaacttacggatgagtgggcaagcggagcgcattcctcatgaattagcattttggcgtgatattgctcagtcttaccatctggaatttattctggaaggtgtcgaagaccagggtgatcaaaagatggccgaacaacaaggtattgaatggcaccagggttactattatgggaaaccgcggttagtcgatgatggtcggcaattggtcaacggcggatgctgagaaaggatccttacgatgacatggtctaattggcgaatttcgccgttcgtaacgagtattttctttatattaggtgttctaacactttactgggtcctctttaattggattacgacgtggtttcatgcccgtcacattaacattgacgatgataccgtcaatgcttggcacggtgtgatttacatgttggtctttgtgtttgtcatgcaactgtcggtcgtcggtaaagcagatagttgggagtttgttaactttcacttgattgccgtcgtgttctgctcgttttttttgaatattcgaatgccgtattattcattgttacctgtggtcatagtgtacatggttttcgaccagtcgattttttactgggaatcgtggagttacgccgtcgtgttcgtgctatttttctggagcatgaattatctacggctgtgggtacctaagcatcggtatccttggctatattactatggcgcggtcgctttttacggcggaatcttgtggggcctgatcaagcttaaatattcgctggattgggacaatactttacaagaatatggctacttaatgatttttgcaggattattgtacgcctacgttaatatgctgacccaagatagtgagattaaattacggttggcccagtttgcgagtcacgacgctttgactgagactgagaactttgccgcttacacggaacatatcaaatatttattcgatgatagtgccaagaacaatctcaacttatcgatgatgatgttcgatattgatcactttaagcacgttaatgacacgtacggtcaaccttgcaggggaccgcgttttgcaagaagttgccgccacggtcacgacggtcttggccgccaatgacgagaaggtcaagctgtatcgcaccggtggtgaagaattcaatgtcctgtttcccggttatgatctggctagtacaaaagtgattgtccgtcaggtctttgaagcagtcaatcatctcgttgttaagtatgaagacgaggaaatcaatgtgtcgatttcggttggtgtctcgacactgcatcaagccgatggtagtccgattgatttgtacaaccgtgttgatcagaacctctatttttcaaagcggcacgggcggatgcgtgttacggttgaatagtggctgagattaaaaataaataacgttgacttgttgagctcccggaataaaagccggaagctcttttttgctcgcaatcggtctgactgaaattgtaggcctaaccgtcattgcctgattgacgtattggggaaacatgatgtcaaatctacaagattgattgagtgcgacattggggttatggtggccaatttcagctatttagtagcatcgttcgttaattgagtttacgaattaacgctaacagatgtaaaccttaatcgaaaccgttaattatgctggcattctagtttaattatggtatggtttatgttgtaaagataacagtcaatgacttaaactaattgacttacatattaaagaaaacaagttttttacgttacgtttgttaaggttatttaaatacgaatggttgccaatttataaagtaaggaagtgagaagtgtgccagtggtcattagctcattaattcccgtagttgcgccggttaaacgccaagtgatcaatgtgacgacccttgcaaatacggttcacttatatgggttactaggatttaagcagcaaattataccggcaacggatcaaattgttgcgccctttgctggggttatcacagccgtggcagccaatcaacggttaattggctttcgagcggccaacggtctggtgggctggctacggattggtcaattaaccagtgctttggaatcgcctacatttaagttcaacgttaaaccgggtgactgggtggttgctgggcagatgttggttgaagtgatttcactactgacacaacggctccaaccagttaaaacgacggtggtattgacgattagacatgcggttgttcgtgttcgagaacggttgctggcagcaagtaatcaagtcgatccgatgggaactgttatctcaggtattacgaccagtatggctggtaatcatcgggtcgcaacgatcgggccaccccaaggtaattaattgtttgacaataagcaatcgacgtcctagatacggggtgtgtctagacgtcacgcttcgacgcagcccattgaatgggcagtagtggctgaggtgtgcgttttaataacgcagttaggggcagtgctggacgcatgaacagtactggttcacaaggtcgccgtactaggaggtacggcgtcgctgatgttataaggtattaagattaagtagttgtgggtagcagtaattggtcagcgattaagttttggcagacttataagcacaactgctatcacgggtacgattaattgggtgctaacgtaagtatggttacctagttaattaagtttcgtcggtcaaaggttaggccggtattaccgagatggttgtgggggtataactacttcggcgatcgtttgatgtcgtgttatgttcaagataggtcaattatttggtttaagaacggatcacttgcttttacttggcagtccagtttatcatgacggtaaattgtgaaggagtgattcggcatgaattcagcgacatttaatcaaactgaattagcaaaatataatggtcaggatggtcaacccgcatacgtggcggttgatggtgtcgtttatgatgtaacgggggttgcagcatgggctggcggtaagcatcatggtaatcttgcggggcaagaattaactgcagtcatcgacaccaaatcaccacatggacgtaaagtgttaacgggactgaccgtcgttggtcaatacgtgactaattaaattattgaagactggttgattgtgaccagtctttttttgtgtggataggcggctgttgtgattgcttaaacgagctttcacaccaaaatttttcgtactgcgaggcaagtattgaccaattttaggcggctgtttgtgggtttgagacattgtgtaaaataagtgcgtgatgataatcgatattccaagtaaacgaatagataacaaaaatactaacttatgattagttaagacctgtaatggttgctggcacgtctattgacagtcatccactgtttatataacaatacaaaataaattatataaagagttgaatgttgtatgaaaaagcgtgaaaatagaattgaattaaaggaaagttaataaactatattttaggtgggtaaatgatggagcgaaaacggacgaattttaaaatgtacaaaattggccgtcgctgggcgtttgcatgtgccgttatcttgacgatgggcacaacaacgctggtggctcgggctgatgatggaacgactgcaacggggactgatacggcatcaaccagttcaagcacaaccaaatcagtcacggctaagacacaaactttgaagactgcggccacaactgaagcggatgtgactaaccaaaatcagccggttttagataccgatggttcgaattcaaagactgctgctggcacagtggctggaactaaggcggcaacggatactgatacaaacgctaccaccaatttggatgagacaactagtgccaatactgaaactggttcagatacgacagctggttcaaagacggcaaaagagacgaatgcgacaaccggttcagagtcgacaaaagagacgtcgaccacaactgattctgccactgcaacggctgcgcggacaacaaccagttctaataaaggtgcgactactgactcagctaccagcaatgataccgcggcaacggctgctaaaactaccgatgctagtgctaagattgccggtacgacgactagtgatagtgtagcccagcaaacgacgacaactaaagaccagtcgacgacaactgcaacgccccagaccgtcgcggtggcgcttagtcaagctgtgacccatgcaaacgatgccgttgccgatggtggtaatgtgacggacgattatccggatctacataacatgctcggggtttcgtcccaattccatatttttgcacgggaagcggaactacatgcccatacgaatgggaacgttgcggtgcaaaacttagtgggcaacgttaactttggtacgaacattattgaagaattattagataaagatatttcgtatattcaaaatatcagtaatattgctgggagttcgtttgtttcggctggtgagacgcggagcaataaagttatctttggcgaaaatattgagattgatgtttcgaatcctaatcggccgatggtcaacggggtctatatcgaccatttacttgcctctgaagtttatcaagacaaagatggtaacgtctatattgattttgacaaagagtttgctaagttggaaaaattgagcgctagtcttagcgaagcgtccgcgaacgccacctatacgagtgacagttttgaagatatgaatcagcgggtcatcgatgtgacggatatgcaacctgatgcggatggacacattgtgatcaatctgtcagcggatgttttaaacacgagtacgccgctgacaatcaagggactatcggcagatgcggatggtaatacggtcattattaatgttgatacggcaggtgcgaccaactatcaagttaactcgcagatcaaaatcatttatgatgacggtacggagcggaataataaagaaactgaagactttggtgataaccatttgctttggaacttctatgattcaaccgcgagtgacaagttagcaactggtgtcattagtgtcgaccggccatttcaaggcagtattttagccccagcggcggaaattgatgcaaatcaaaatattgatggcaacatcattgctaataaagtcaacgtgaaggcggagacccatcgttgggatttacaggataatgttgataatgaaaatgatccagaaccagttccggactatgagaaaccggtacatccaagtattgatgccgaattaccagatggtggcgagggcgaagagccagaatacgacaaaccggtacatccaagtatcgacattgaaatgccagatgacggcgagggggaagaaccagaatacgacaaaccggtacatccaagtatcgatatcgagatgccagacgatggcgaagaagaagaaccagaatacgacaaaccggtacatccaagtattgatatcgaaatgccagataatggcgaagaagaagaagagtacgacaaaccagttcatccaagcatcgatgttgaaatgcctgactttgacgagattgaggacgaagaagaagctgaagacgcagaagaagaatttgaagacgatattgaggatgaaatcgaagctggtgtgacgccagacgaagttgtcgaccaaatcgaagaagaagtcgacaatgaaattacagctgactgggtcacggacgaaactgcgactgaattggaaacggcgtttgaggaagttcaaaaagaagcagtggttggcgatcagattaaggatgaggaaacactgatcaacttgattgaccgggcaatcgcacaagctaaagcgcatcataatacggcgttagtagcgcaattacaagctctacgaactaaggtggctagcgcgttggcagtggctaaggggcaagcattaccacagactgatgaagcgccaagtcagatgattagtttagcgggaatcgcattagcaagtacattagtattaggtgctgcagcggttagccggcggaagcgtcagtattaagcttaaaattgtattttgaagcaactgttgattcggcaagtttaatcttgcgaatcaacagtttttttgcataaaaaagtcactaaaccaaattggtctagtgacgctcaattctctctactccatgaccgacctaatctcttgaccccaaatgcgccactagtgaaacgtggtataaatgctaacccccattagcatttatgatatttattataaataattcagcacattagtcaacttttattcgaatatatttttaatttatgttgaaacctattcacagataaatttaattgaccgactgaattggtctaaagtaagtaaccataataaaaagctggatggtccggatgaccattcagctaagtaatgttggtaaggtttaattacgaattaattcattgaagttaaattcgttcggaataaagtgggattcagtgtattcaacctggcgtccttcatcgttaaatgcgatgctaatcatattaccgacgcaattattatcaccgagcgctagctgagctttgtcgagttcgttggcggattcgactcgtagcattcttttaacgacagcaattttcagaccattttttttgaagtgttgataaattgagtgttgggcaatggtcttagtcagagtgggagtgcgctgggcgttaaaatagttaatgtccagcactgcccgaataccgtctacgatccgaacccgttgaatagcatacactggaatacccacttcaaaagcggtatgtgtgctaagcggctggtcaacgattcgttgctgaaaggccacgacctcggtctgataatcgaggtggcgctccgcgttgaggctctgcagaccgttgagattatttaaagccagattgaattgctgggtttgtggcgtgtgctccaataagaccaccccgcgccccttaacgctgtaaactaggccgtctttggctagttgtgcgattgccttacgaacagcatagcgactgctatcaaattctgtaattaattcgtcttcaatgggtaatcgcatcttaacgctgtagtgtcccgtgagaatgcggtcctttaaaacgtgatagatgtcgctgaatgtttgtttccccattttaatacccccgctcatcatataattaatttaattatagcaaataatagtcattagcgagtaaacaagcgaataaatatcgatatttattcgaataaaaattgacaagcaatcatgtgacctactataatgaaagcgaaatcaattcggtaatacgggagtaggagggggaacatatgcaagttgaacagcgcacattaaatactgcggcacacccatttcagatcacggcgtattggttagaccaaattagtgattttgaaacagctgttgattatccaatcatgattatctgcccgggaggtggttttacttatcattctgggcgggaagaagcgccaattgcaacccggatgatggccgccggaatgcatacggtggtcttgaattaccaattaattgtgggagatcagtccgtctatccttgggcgttgcagcaattaggtgcaacaattgattggattacgacccaggcgtccgcgcaccatgttgattgtcagcggattattcttgctgggttttcggctggcggccacgtggttgcgacttataatggtgttgcgacccaaccagaattgcgcacacggtatcatttggatcattatcaaggccagcatgctgccattattttaggctatccagtcattgatttgacagcggggtttcccacgacttcggcggcgcgtaatcagattaccacggatgcccggttgtgggcagcccagcgcctggtcacaccagctagtaaacccgcttttgtctggcaaacggcgacggatgagttggtcccgccaatcaattcgttaaaatatgtgcaggccatgctacaacatcaggtcgcaactgcgtatcatttatttggtagtgggattcatgggttagcgttagccaatcatgtgacgcaaaaacctggcaaggacaagtatttgaatgaccaggctgcaatatggccacaattagcattgcggtggttacaagaacagggattgttagctggtaattattgaaaataaatctgggcgatcagtcgtgcttcactgatcgcccgttttttgtcaacgatcctgacaccaattaattttctgcggtataataatacgaataagcttattaagtaagaaggagcgattgagatggcaacaaatcaacacttggtcattatttccttagatgcgttaggatttcgtgatttacgcgaacatcaagcagaattacccgttctgagtggattgatgaccggtggtacttgggtcaagtcggtgacaggcatttatccaacactgacatatccgtcacataccacgattattacgggacagtatcccagcgtgcatggaatcgttaataatactaagttacaaccgacacgccgttcaccagattggtattggtatcaaaaggacgttcaagtaccaacactatatgatttggcacggcaaaagaagctaacaacggcggcttttttatggccagtgacggctggcagcaagattacatataaccttgccgagatctttcctaaccgcatttggacgaaccaagttctcgtctcgttgaaggcgagttcaccgctcttcttactcgcgatgaatcataagtatgggcatcttcgtaatgggattaagcagccccaactagatgaattcatcacggcttgtgcagtcgatacgttaacgaataagaagccgaacctaacgatgattcacttagtcgacatggatagtatgcgccatcgctatggtgtgcgatccagtgaggccatggcagctttacaccggctagaccggcacgtgggccagttgattgacgcgactaaagctgcgggcacgtttgcggataccaactttgttattttaggtgatcactatcaaatcaatgtggatcacatgattcatttaaatacgttattcgctcagcagggctggttgaccgcacgtcaagatcagacgtttgaagatgactggtccgtgatggcgaagacggcggacggctcaacgtacatttatacgcgaccggaatttgaccagttagatgaattgaaggccctggttagtcaggtggaaggtgttgagaccatcattactggggaggcagctgcacgtcgtggtgccgaccccgcttgtgcattgatggttgaagcccaggaaggctattattttactgatgaaagtcgacgaccaactgtggttgaacccgtccatccagcgacactcggacaaccagaccgttaccacggggttcatggatatgacccgactaagcctgactatcaaacgaccctgttattcaatggaccagcagttaaagctggtgggacgattgaaacggctaacttagtcgatgaagcgccgacatttgcgcggttactcggattgaatttcgatggccccatgccgggacattgcctcgatggtgtttttaaagactagacaaaaaagagagagagaggaaaagcgggcggacatcagcaccactaatattgtggttagtgctcgttccgcctccgattgcgatcagaggttcccgcgaagtaacttaatgaaatttaataaacagcagtggggttggatcttttacgattgggccaactcgggctatggcattattgtcacaacggcggtgctacccgtttactttaaggcagttgcccaaagtagcggtgtgacaccggctaatgcaacggcttactggggttatgccaatagtattgggaccttactagtttcgattttggcgcccgtcctaggtgcactagcagactatccccatgccaagaaacgaatgctcaacatcttttcgatacttggaatggtgatgacgctagggctgagtgttgccccgactagtgcctggaagtggctattaggtatttatattttatcaattatcggttattccggtggtaatctgttttatgacagttttctgactgacgtggcgccaaacgatcagatggatcgattatcgtcatatggttatgggtttggctatctcggtggtgtcttggcgtttatcttattcttggtcttacaattaaccagtggttttggtcaattatcaagctatggggtcgcgcggtggagttttgtcttagccgctgcgtggtggattatcttttacattcctttgttgaaaaacgttcaccaaaagtacgcgttagcacccagtgcgcatccggtgcgttcaagtttccaacgggtatggtcgactttgaaacacatccggaattatcgcgctgcggcgtggttcttggtggcgtacttcttctacattgatggagtcgacacgatctttacaatggcaacttcgattgggatggatatgggaattacgacgaccacgttgatgattgtcttgctggttgttcagctagtcgcgtttccgttttcactgctttacgggtggttagcgaataaaatgtcgacccggacgggcatcttgcttggcattattatttatttaggtatctgcttgtacgcgttgcggttgaatagtacgacggatttttggattttagccatactagttggaaccagtcagggtgggattcaagcgctcagtcgttcgtacttcggtcgtttgattcctaagactagtgggagtgagtttttcggcttttacaatattctcggtaagttctcagccgtgatgggccccgtcctagttggaatcgtgacccaaatgacggggaagtcaacgattggtgctgcttctttaagtattttatttgttgttggattagtgattttcttggctctaccgcatttgaaccagaccaagtcggtttaagccagggtttgtttaatatcatgtaaaaagaacttcttctaatttggagaagttctttttacgttgctcaacctcaaaccatcatgagttataaattcatttccgtattccgctgtaatacaaaataaatgacaagccaacacaatacgcgctaattataacaatctgaaaggcatagctatcagcaagccttgggtcagttaatcagtatgtgtgattaagaaaaagtctgttccagtctggcataatttattgccaggctagaacaggctttcggtgtcaaagatgcttgtgagactgatgcgattggcgataagtctgggcttgcttagtgcgaatattacgaattgcaaataacgtattatcaatccgggggtgatgatgtgtttctaagacgctgacttcatcaagcaattggttgccaatttgccagtcgccaaagtagagattccagatgccaagccagaattgttggctcaaccgcccatcccagtttaactggtgactgtcgatggcagtgaacttggttttcagattttgagcggattgaaaatcatgaaagttcaatttagtttgaaatagtgatccataaaaatcgagtaagtcgttgctgacgtgaaagggatcgccccaagccgtttgataactggcacaattggcggccatacgggttgtcagtggtgttagtgcggccaaaccgtcgatggatgcaataattggaattagaacgggcactaattttagttcctgcagggtccaagtcttggcttggcgcaggtgatcaaaagcgggctgggtcgtggttgtcacgccgactgaacgatggtcataggatagcatcaagatgctggcataactggcgatgagttgttcgtaggcgtgggggctgtgtcgatgttcgcgaatccaagtggctagggcgggaaaatttagcgtttcataagcgtgacgaattgtccaaagggcctggtcatatgctgatggctggtagttttggtgtatgaatcgtaactcgtcggctgaaattgctaagttatccagaattgcaaagagcttactggcgccaatatcgttggcaccactctcaaagcgtgaggcgaatgagcgcgagataataccgctatacacttcttgttgagttaagcccttacttaatcgaatctgatgaatagtttctccgatgtttgtcatctagcactccttaatgtggcatatatgcaacctacttgctgattgtaccacggtaatgacgagtaagctaagtccattatcttaatgggagatgggttaatgctgactttattaaaaaatcggaccctccaaacgattgctagtgcaaatttttttacgacgctgggggtgagtttgttcaatatcattttactcacgtacgcaaagaattttccaaatccacattggtttgttgccatcgtttcggtggtgacagttgtgccgtatgttttcgggggattaacggggcgactcgctgatcagacgcaccgaaaaactaactggctgattggtactaaggtcgttcaagcggggttatatctcgtcttggcccaagtgattactcagcaaactgtggttgttttctacgtggtcgttgcgattaattttatttcggatctactaggacgatatggtggcagtattttgacaattgttattcaagaccggattgggcctgacgatcgccaacaagtgatggggtttaatgcgagcgtaagtacacttgttgagccactgggtcaaacactaggggtcttgattatcgcccagtggcatgattatgcgttagctggaatagtgaatgcgatgacttttattggggccgctagctgcttgttagccggacgttcagcgattcagtcgactcccaaagttgctgtacgaccacgacatattgaggcctggcccgtgattcagcgagtgatgctgacgacgactagaatgggcgcagtcagttatctgggtattctgatgattttaaacgtcgcaacgatgagtattgatgcgattttgaacttaatgtttattgacttggcatcccgcatgcccgtgagctattcggtcgcaattttaatggtcaatgtggtctttgttaccggaagcgtattgggtggcattactaaaaatacttggtttgatcggctctcgctgtttcaattgttactggcagcgattctagcgccgatgctgacctatgtgattttactagtcgttccacaactaatcttgattcttgggggcatgtttgcagtgggcttcatgagtggcaaactggacccgaagatgttcgccatcatgatgccacaaattgaccccctcttaacagggacggtctttggtaccatcagttcgattgtgacgttggcggcacccgttggtagcgtcggcatcgttttattatataacttagttggtgcgacggcggcgtgttcggtggtgattggtatgagtgcgctggcgttgatctgggcagtgatggcgcaccggcagtgattaattgctaatcttttgttattgatatttcaatttggcgttaggatgtggctatcagctttgtgatgacttacgaagggatttagtgaaatgcagtgctcaaaaagccatcttgggacggcttactaactgaaatggtgcattaaggaaaaggacgttagttttgtccgcttcattagcgccatctcggcaaaacaaaagcgtgtctaacccccagccagttaacttgctagggcgttggacacgctttttgattaaatattcgatcaggctgctgtgatgaatgaggtcggtcagcagttcattggttaaacgtggaatagggccaaatgcgtcttcaaatattgccctgttacactagttggattttgactaacggctaatggggtaccggtggcgacaatgttaccaccgttgataccgcccgcgggtcccatatcgataacgtaatcagcgttggcgattacgtcgagatcgtgttcgatggcaatgacggttgccccttgctgaatcagttggtcaaagactttgacgagttgctgaatgtcgagcgggtgcaaaccgactgaaggctcatcgaagacaaagagcgttcccgtttggcgtttgccaatgcgggaggtgagcttcaggcgctgagcttcgccacccgagagtgccggcgtactttcacctaatagtaagtaacctagtcccatatcatgcaggatctggagtgtattagcgatggcggattgcgctttgaaaattggtagggcctcgtcaaccgcaagatctaaaatatccgcaatcgaatagccatgccatttgacggtcagcgtctgtttattgtagcgtttgccgtggcattgggggcagacttcggtgatgtctggcaggtattgcacatctaaggagatttggcccgtaccaccacaagttgggcaagcacccgcagcgacgttatatgaaaattggctagcggtccaaccgtttgcttgtgctgctggggtggcggcgaataattggcgtaggtggtcgagaatgttggtataagtggcgaccgttgaccgtacattcttaccaacgggcactgagtcgacggtaacaacgtgccgaatgtgaccattgtcaaaggccttaacgtgggttggaagtggtcgctttttagctgtggcaatcagtgctggaatcaaactatctagtaccagagtcgttttaccagcgccgctcatacccgtgacggtcgtgaaacggtttttgggaatgcgcgccgtaatgtcttggatgttaaagtgatgagccacctcaatagcaagggccccctttttccagagtgcatcgtcggttaatacggggcgttcacgcagcgtggcagtaccggtgagaaatggcgcaattaaggactttttgtcccgcttgatggctgcgacagtgccttgtccgacaacggtaccgccgtgcttaccagcccccggaccaatctcaataacatcatcagctgcactgataatactagtgtcgtggtcaaccaccacgacggagtttccttgggcgactagcccacggaaagctttgattaggcccgccacgttagctggatgaagcccaacggaaggttcatcaaggacatatagcacgccagtcgtggcgctgcgcaaagtgcgtccgagctgaatgcgttgtaattcaccagttgacagggtcgcgccgggacgactgagtgtgaggtagtcgagtccaagttcttccatgggttgcaggctgagtagcaattcatcaacaagggattgtccaagatgatgcatcttagtaggtagccacgggacaatcgtggtcgcaaaatcatgcaaggcgtcgacagtcatatcactaaccgtcgcaatattttgaccatttaattcgtagttaaacaactgaggattgaagcgtgatccgtgacaatctggacaagtatcaaacttgtaaaagcgattcagccgagtaattgcccgttcatttttggtcgtcgccatactatcttcaacggcggcaaaggcgttctcgtagacagcgttgtccatgtgaaagattttacccttagcgcttggaatgttgatggcaacggtttgcttaggaccatgcaatacgcgtgttttatcggcttcactaaggtttttatacggaatatcgatgggaattccaatttcgcgtgcaacgatcggcataaagttacgtccaggcaggtgccaagaagcaacggccccttcttcgatagtttgattttcatccgcaataatgagtgccgggtcaatttggcgaacttggcctaggccaccgcaagtcggacaggccccacctgaattgaaggcgaaatcttcggcgccgggcgctctgaatttggcgccacaagtcggacaggtgacgtaaccatcattttcagccacatcgagcgttggtagcatgcggtgaccattggggcaaactgctgagctgagtcgtgagaaggctagccttaagatatttaagctttcagacatggtgccgacggttgaacggacgccgggaacctgggggcgttggcgtagcgctaatgcggatggtaagtattgtactgaatcaacactggctttgccgacctgattgattcggcggcgggtaaaggttgacagggcgtttaagtagcggcgggccccctcagcgtacaggacgcccattgcgagtgatgacttaccggacccactgcgaccagtaatcgcaacaaattcgttgagtggaatgtcgatatcgatattttttaaattattgacgtgtgcgcctcgcacttgaatgtgagtcggtaacgtggtttgtggcatgactaaaacccctttcgtgtcactttctatgctacaacaaaaggacggctttgcctaagaaagcggtggcagtatctcgcgccccacggctgggtgagtatgataaactagggctaacgattattggagggggcgatggtgagatgtcgaagaagcgacgattaagttggctgagcgtgctcggactattggcaggattttgttggtggtttagcttagcaatgcgcgcggctgcggattatgatattgaccaatatcaagtcaatgtagctattcaacgtgatggtagtgcgaatgtaacgcaagcgatgacttatcaatttgatgatgattatcacggggtatttaatgttcaagatttgaaaggtattcagggggcccagttggaaggggtcacgacgcaactgaatggtggggccacggtgacggcggcgccaagtgaaatgggggccaacaacacgtatcagttgacccaaaatgctgaccggatgcgtgtcaagctctaccggcaagttcaagaagatgataagttacgggttgtctatcggtatcggcttaaaggggtcgtaacgaactatgcagacacggccgaactgaattggaaagtgattggtagtggctgggatgtaccactgaataatgtcaaaatcgtgattcagttacctgccaagaatgtgagcgcgctacaagcttggacgcacggaccgttgagtggtcagacgaaagttgagcgcgcggcaggccgggtgacgatgacattgggacataatcccgcgaaccaattcgttgaaagtcacctactatttccaactacggtcacggcgacgaatacgcggacgaatactgccaagcgaaaagtgacggtccaaaaacaagaagctaagttggcacaggaagctaatgaaaaacggcgacgtaatcgattactgcgtcgcgttatctttggtgccgcggtggcaggttggttattggtcatgattggctatctttggtggctggctcgtcatccggctaagccacatcagcaaccgattcccatcaaccattcatttgacgtgccaccagtaacaccagcagttgctgagtcattgtgggcacagcggtcgccgaatacggatgctttaacggctgaaattttgcgagcagcagctaatcacgaaataacgattgaaacggttgcgggtcaccgaaaaccggatgtgcggttaacgcaattgaaaccagtgactaactcatttttggctcactgttttgataaaatcacggttgacgggcagttcatgttaacggatctcaaaaaatacgggaagcgtgataaggctggtcggctgggcaaatggtttagccgctggcagaccgaagtagaccaagacgtggcggtctatcaagacgaaactaattatcggcttcgtaatcaatggctgatggcagcagttgtcgtgagtgttatggggatgattgccacgggtgctgggttattagttagtccgaaggtcgtgaccctgatggtgattccagcgatagtggccgcggtggctttctggattggctggataattcaacggcggcggattgccatcaatactgacgcaggcttggaattacgtaatcagatcaatggactacgccgcatgcttaaggatattgggcactttaatacggcccaagtcggtgatttgattttgtgggaacaaatcttgccatacgccgcggcttttggactaaccaatcaagtgactaagcaattggcgattgattttggtacggaagcattggctacggggatgctcgtgtattacccactcttctatgccaatggtgggctggacttcgatttgtccggtgcaatcaacgatagttttagtggcgccttagatgcctctggaagcgctagttcggcgtcgggtggttcaggaggcttctccggcggtagttctggtggctttggcggtggctccggtggtggtgccttctaacaaagtatcagaaaagacttgtactttgcgggcataatcggtaggctaaggggtagaaaaggcttacatgaaatggatgattagtaatgacgattaaattaatagcaacggatatggatgggacgtttttaaatgatcatggtgattatgaccaggagcggtttgccaacgactatgcagcgctacagcggcgcggtattcagtttgtgattgccagtggtcaccaagcggcggaactagccacgacctttagtgcttaccctgagatgtggttgattggtggtaacggcgcggaactgtggcaacgagaagcgggactcaaagccgcgacgttcagtccccaagcgactcagcaagtgttggcggccctggcaccgtatcctgaattacaagtggcattgtgtggcacccaaacggtccatgtgttggcgcacgcgaacccgcagtttgtagctaatatgcgtgactactattaccaattagagacatgtgcggatttaaccacagttactgatccggttgtgaagttcgacgttatttgtcccgcggcaatgacggaccagttagtatatgaacttacccctaagctcgctggcattgccgtacccgcttcaggtggtcagggcagtatggacttgattcagccgggaatgcacaaaggccgcgccctcaaacagcttggtgaacagttgggtattctgccggatgagatgttagtctttggcgacggcaccaatgatcttgagatgtttcactatgcgacccatgcggttgccatgcaaaacgcgcctgaaaacgtccaagccaatgcgacagcggtgacaggtaccaatgtggacaatggtgtattggattatattgaacaacatattttgagttaactttgtgagaccagtattttgctaacttgagttacttggtgtgcgtgatgatcgtcaggcggggctttggtcgcgcaagccggtttgttgagtcactagacacggttaaaactggtgtttacgggtggggttaatttagattgtttatgaaaataatgagatgctttcagaaaatcacgtatggttttgattgccaaacgagctgaaagcatgctaaaattaagattatataattaacgacacagaggtctggaaggtttgtttaattccgacctcttttctatcggacaatttcactttaaaaaagaagaggtaatggaatgctcaccgtaaataatgttagtatgcagttttcaacacgtaagctttatgaagatgtcaatttgaaattcacgccgggaaactgctacggcgttattggtgccaatggtgctggtaagtcgacgttcttaaaaattttggaaggtaaattacaaccgactactgggacggtctcgatggggcctaacgagcggatgtctagcttgaatcaaaatcactttgctttcgaagatgaagaagtgttagcaactgttattcgtggtcacgaaaagttgtatgaaatcatgattgaaaaagatgcgctgtatgccaagcctgattttagcgatgaagatgggattcgggccgctgaattagaaggcgaatttgccgaaatggatggctggaacgcggagtcggaagcggatcagttgttacaaaaccttggtatcgatgaatcgatgcaacacatgaagatgagcgagttgactgaaccgcaaaaggtgaaagtcttattaggtcaagcgctatttggaagccccgacgtgctattactggatgaaccgacgaacgggttggacgtccaatcaattagctggttggaagactttttggctggttacgaaaagactgtcatcgtcgtttctcatgaccggcattttctaaatcaagtttgtacccacatgtgtgatgtcgactttggcaagatcacactatttgttggaaattatgatttttggatggaatctagccagttagcggccaaattgcaagcgaatgccaatgccaagaaagctgaccaaattaaagagttgcaagaattcgtggcgcgattcagtgccaatgcttcgaaatctaagcaagccacttcacggaagaaacaattggaaaaaattacgttggatgatatcaaaccatcatcacgtaaatatccgttcattaagttcacgccagatcgtgagatcggtaatgaccttgtgaaggtcgagaacgtttccaagtcgattgaaggcgttaagattcttgataatattagctttacgctccgtcctaatgaaaaaacggcgttgatcagccgcaacgacttggcaacgacaacgctgatgcaaattattgctgggtcgatggaaccagatagtggcacggtgacctggggacaaacgacttcgcggacttatttgcctaaagatattaatgaagaatacgcgggtagtgaattgccaattattgattggctacgccagtttgcatcgaaagaagaaagtgacaatactttcttgcgaggtttcctgggtaaaatgttgttctctggtagcgatgttgaacgaccagtgaatgtgctatctggtggtgaaaaagtacggggaatgttatcaaagatgatgcttagtcgggctaacgtcttattattagatgatccgaccaaccatttggacttggaatccattaccgcactgaatgatagtctgattgattttaaaggcgccatcgtctttacttctcatgaccatgaatttattcaaacgattgccgaccacattgtcgaagtgagtgcgaaaggcgttgttgatcgtggtgatacgacttatgatgaatacttggcccatgaagcaacacagggccgggtgcaagatctttactagttagtcgtggaatccgagaaatctaaacaaaatcacgtgtgagcgtccctcaatctggtatgattaatgcatatcagattgggggatttttttatgacgccggaaaccgaacaattattacgacgctggtacatggggcagctcatcgtgttatttggtgcggcctttattcaactatttacgtttgatggtggtgtgtttttcccagttggtggtatgcagttgctgatatggggactgttagcttggtggccagctgccgaggaggatcaagcacagtggtggcgtttgcgacatgttaattattacgtccaaacagtgctgcagttcacactcttgccgattttactggcgaacctcgtggcttggttaagtcagctgtcatggttagacgaacagggactgattgctgtggggatggcttatttaatggtcgcattcgtgccggtggtagtggtggtcactaaaccgatcgaatctgtgattggccggattgcggtcttaattacggctatttttagtggcgtcgtcagtgcgcagcagacttttctgattttaccgaatctgcaagcaccatcagtgttcgagatggtcagtgatactggtattttaggcgccctaggctttgtgattgctgttggggtcttactgtggggatggggattaacgggcccatcgtggcggtttaatcgtcaggctcaaactagtttagtggttgggctgatcgtggtggggacggcttttagtttatggaatgcttttagtgcgggtggttcgtgggcgacgacgttcacacattgggacttccagctacggtcagcgacttggaaaatgtttttgagtgggttagaaccgggaatcgcggaggaatggttgtatcgttttgccgttttgaccttgttattacaagcttttcggcatcggcgtcaccagctcgactgggcagtgtggctaagcggtggcctatttggaatgtggcatattacaaacgtttttgcgggccaacccttgtcagccacggttgagcaaatcatttttgcagcgacgctaggctggtttttagcctcgacgtacctgtactcaggtagtatcttgttaccgatggtgatccatgccgccattgatattttgagcatgatggcatcgggtagccagacgatggttaagccgaatgcgttcgaatggcaaacaatcggtgctactgtcattatttttgttggcataacgatttatttcttgaccggttcccggcgacaagttattcaagcacatgtcaatcaacggcttttagctcaataaagaccgactgttaaggccgtagtggacgactttgttcgttaaagataaactgggtgtccgtaatcagagacgattaagcaatactaggctaacttttagttggtttagaccagttgtaacatttttgtaatcttcgtgttatctaaacgcaatgctggctcgctatactaaaggcagagttatggagcaatacatacgctttgtcagcggatttaggttgggagccggatcgatttactttgtcaggacattgttaataagcaattattgatagtgataagtagctcaattagctgaatcataacgtttgacaagcatttatacctctcgggatgggctgggtccatgacgaggcacatacacaatggcaagcttggggtttgcaagtcgatcagagaaagggacggttggttaccggcccttttattgtggttaaaatttgtgggaattggatttaggaggacgaaatgagaacgctacataaaacgttaacacggttattacaggcagacttgattccgattgcgcatgtttcatttaatgagatgtataccggctatagtcgccgctatgataccgtagtttttgttaaagttttcagtccggattgcgaacgtaaatttagaactgagcagcaagtgacagcgcaactcacagaccgggtcttagccagttttcaattagcaagtcgcgagtgggtgttggtgttgcgagattggcaactaactcctgtaccgacaactttgactccagcgctcgtttaccaaatgggtcaggtagtctccaggtttcaccacgcaattcaacttccaacaaccgcagacctgatgccggttctggatttcgatgggatggtcgcccgggtcgagcggttaaagactagtccccattacgacgcgctggtgtccttattaccatactttctcgaccaccggacgatgattaaaaccgcactagcaccgcaaccagtcatgacactgcatggggacatgggtactcgtaattttcgctaccatcatggtcagcttgttctgattgattttgaacgatcccgtcacgggtacgccctcgaggactgtttgaaattcttttttgaagatcttcaacgatcttcaacgttgattcaagctttttgggctggttatgggacagacttacaaataccaccattagtgacacagtggttactgttacaatgtagtactgggatatttacgtacgttaatcagattactgacccccgatttgaagcggtaggaactgcgatgctggcacaggtaactttgccaaatcattgagagtggaacgaaataatttacatttgccagtagattattataattaacgaatcaataataatttggagatggcaatttgactcagtttgaaacggaacggttgatattacgaccaatgacagcggcggatcatgatgcgttagcggacatgatttttgatccgcaggttgtcgcttatttacgttaccgacgggttcagagtccggccacgttcgagcaactgtttacgacgcactttttggcagacacgaccactgtttttggcattgaacgtcgccgtgatcatcaactaattgggttttatgagtttcatggtagtggtgcgactggtgaattgacgtacgctttaagcccagctgcgtgggggcacggttatgttgcggaagccggcaattgtttgatgcattatgggtttgaaacgctgaactatgagaccatcgaggctcactatgcgagtgccaaccctaattctggccgagtgatggctaagatgggcatgcaagcggctggagaactgcacacgtttaccagtgataaaggtgaagtgatccacgtcatgcggtacttactgaccaaagcaacctggcgccaacttagtgcttgacctgaaacgcgtttcagcagctatactaaaattgttgcgacagcttgcaacacacgcttaagacttatgatcaccattctttcagccagaatggtggttttttaggctgttgttgtccctaagtgatctaaagtcaaggatggccagcttcggtccgctgggaaaggggccgtttaatgtaagtttatatgtccacgaatgtgattgttgttagggcgggttttcgatatagtagacctatgaattgagagggcgtgatcaaatgacggcaacaattacaattcgaccgcttcagcgcgcagaattaacaacgctatggcaactaggttttagtgatctagatgcggagtggacgcgctggaatggaccgtattttcatgaccaactaccgactcaaacagactttgagacaattattggcccccgtgattggctgattcgaccgcgtaactgggtcatcacacgggatggtgtgattgtcggcagtgttaattggcactttgtggatggttccctcaaacgctggttagaggtaggcatcattatctatgatcaggagcattggggtgagcatattgggcgcaccgcgttgactaaatggttgacccacttattccaagaggagacgactttgccgcacattggattgacaacgtggtcggggaatacgcggatgatgcggttagcggaagccgtgggattaaagcaggaggcccggattccacaagttcgttattggcaagggcagtattataactcgattaagtatggggttctaaggaatgactggcaagtacaaaaagattaaaagaaaacgtttgttccccttgtgaaagtacggtatgatagaaccgtacttaaaaagacggggtggaagagaatcatggtgaaattaatgcgacgcgttggcatagcgggtctcttgagtttgagcttactgttgggtggttgtagcttgttaacgtctggtacggatacaacgagttcgacgactagtcagcagtctgaatccagtcgtaatcaaacgaccagtgcgactggtaatacgcaacaaacttacaaacaactggcaaaaatgacttatcaatcgggcagtgctgcggccatcaaagttaatagcggtaagagtacgctggcagcgagtcagtggaaaaattctaagattgattacggtaatttagattcattgaatcggacaaccacggacacggcttatttgagtaaggccaatttaggacggtctgaaggacggacggcgcaaacgtggagcccaactggctggcataatcaaccgattaccgttaatggtaagcgggtctatccgcaaaatcgcgggcacttgattgcttacacgttatcctttaacttgacgtctaatgggcagtatcgcgctggtgaagatggtagcttagataacccgaaaaacttggcaactcagacggcctactcgaatcaaaaaacgatgcagatttatgaagatcaggtgcgcacggcgttagaacaaggtaaaaaagtcatttatcgtgtgacgacggttttccgtggcaacgaattgatgcctcgtggttactggtcgcaagcagtttcaaccgatggcagtgtcaatttcaatgtctatatttggaacgttgaacctggcgttagtttcgactatgctactggtcgcgggaaagcggattcgacgatgcaggttgctggggctgataaagtcagcagtagtcagaatacgagtcgctcgtctcaatcgacgaccactagtaagcaagtcgagcgcgagttggttaagtatggttacaaatatgtgaagaaggcgttgaattaagcggcaagacagtcatctagttcagcataatgggcacggtcggctgttaaacgtcgttgtttcatacaacaatttaatctaaatgtcctgttttacgacaaaaggttcaaagtaggactagcaaagtttcactgagcgattatactgtagttattcgagttacttaaccgccgttaatttgctgatgtttctgtcattattaacaagtaacgcgatgtcttagatcatggggccttcccaaacacctatgattttccatacaacggctccggctcccaaccggacgttgctatcaatcgttttgattgctagtactaattacccttggagacgtctgactgcgtggtcaggcgtctttttttgcgtcaaatgcgacaaaaataataatttgtcgcgtttatcgacaaagtgtatttaggtgttgcaaacggattcaaaaagctttatcattgatacattcgaacattagaatataagaatataggaggctaatcgcatggtcagtagtgaagaagcactgcaagaatttcgagaaacaattccgatctttgaagtcttagccgatgaacggcgtcaacaaatcatgattgaactttcgcaacacgcgcagggcatgactgttggtgaattaactgaacggatgcatatttcgcaaccggccgtttcgcatcaattgaagacgttaaaggaacgacactttgtcgcagttgaacatcaggggacccgtaactattatcgggtgacgtttgacgcgccactaacgcaagttgagcatttgattcacacgcttaaggcggacttggaattgaaaccgtacttgcactaaactgcatgaacaccagcaatcgttgcacggggatgcagcggtgtttttatggtaactatattcttctattcgaatataagaatttaaaaacggggtgatggtaatttcaattcgtacggagctggatttacagcggacgatgtaccaattgttggagcaacgttcaatctcacaaattacggttgagcagatctgtaagcaagcatttatacatcgcagtagtttttatcgttattatacggataaatttgatttgctcaggcagatggtgatgcacacgttagatgaactattggctgctgagcgaactgatacggttggttcggcaattatgtcgacgtttatcggggcgcacacgcaagttttacgacatttattagtgacgaacaatgagggtgacaatacccgttctcaacaagtgatcaatgactgttttgtcacggtcgccgagacgggagcggatgatcgggtttttgcgatgattcgccagtcgcagcatcccgatttgacggcgtacttagtcagtggggtcgtcacaagtattgtccagtggctcaataacggtcatcgtgatggtcaggcggccagcacgcaggcgatgattcaggggacgcttgcgacggtgttttcacttgagcaacacacagtttaattatttgaaggaaggtttcaggttgtgaaaatgatacgcgacgaatggcggtcaattcgtcatagcaaaatactatggatttcagtttcagtcatgattttgatcccgtttttatacagcatcttcttcttgaagtcggtgtgggatccatatggggatacgcaaaacttaccagtggctgtcgttaatgaagataagtcagtgaactatcaaggcgaaaagtttgcagttggtaagcaagtcgtgacgaatttaaagaaaaataacgatttagattggcactttgtgtcggctaaaaaagccaagcagggattgaaagaccggaaatattacacggtcgtcacgattcctagcaatttctcaaaaaatgccacaacgatgacggataccaatccgaaaaagatgaacttgcattatgagacgaacgaatcgttgaattatattgctaaagtcattaccgatactggtgtttcacgagttaataagagtattcgggcgcaagtcactaaggcctacgcattagcaattttcaagcagattcggactgccggtaaaggctatcaaaaagccgccgatggggctaccaagcttaaagatggtggcgtcgaactgcaggatggcttgacgacgtatacgacgggtgttcatacgttgaagaacgggacgactgagctgaatacgaaagtgcagcaattacctgctgggattgctaagcttgctgatggtggtagtgcgttgaagaccggtctggatacgttgaatagtaagaccggggcgttagccagtggtgttagtcagttatcagatggttccgggcaggttactagtgggcttggaacgttgaatggtaagactggtgcgttggctagtggcgtcagtcagttgaaagatggttccagtcaagtcacaactgggctgactacgttgcaaggaaaagtcgtcccaatggtgagtggtgtcagtcaattgacaaacggctcagctcaagtttctaatggtctacaacaacttgactcaaaattaccgacaatgcagattggatcgcagtcgattaccgaaggattgttaacattaggcaataaagccgggacattagctggtgctgttaatttgttgacagatggttcaggcaaggtcacgactggactaaagaatttgaatgacaaaaccgggacaatcagtaatgcaacgggacagttagcagatggatcccaaaaggtcaaagtcggagttgccacatatactgatggtgtttatcagctgacgactggtttaactaaattagatggtcaaactggaaaattgtctagtagtgtttcgcaactttctgatggctcaacagaattggctagcggagttgcagattatacagcgggtgttggtaccgccaatgatggtgccagcctattgaaatcaaatactactaatttgagcagttctgttaacgatttaacaaccggtgcgcaaacagtcaatgccggtgttagcgatttacaaacaaatagtgcgaaaatttctgatggactggatcaattgtcagccgcagtaaatgattcagcgactaagacaaaaatcgaaactttgaagacagaaatggcacaatttgaacaggcattggcagctagtcaaaaagaaattgctgctaacacgaagagtagtaataataacgatgctttaaataccgcgttaaaatccttatcaagtaacgtggatgctttaagtacttccaagtcgccaacgcaagctgatattacgtcacaaatcaatagtaaaatagatggtttaaagtcgtcacagaatttaactgatacccaggttgcggcaattaaggaaagtctaaaagatgttggacaaagcacgacgactactactaatgcgcaacaagttcaaaatttgcagagcagcctatcaaaggtagagtcattagttgcggagaacacctcggcaacaagtaattctaatgctgacttagtaaccgagtacggaaagattgaagctgggatgaataccattatttcagacattagttccacgacttcaggaattagtcaacttgccagtggctcagaacaattaaccactgggctgaagaagctgcaaagtgggactgatggtttaagcaatggattgacagaattaaatatgaaagtccctggattagttagtgggattgagtcgttatcaacaggtacaagtaaattggcttcacagtcagctctgcttaataaaggtgctaataatttgagtactggactcaccacacttaatggcgcggttccagaaattactggcgcaataggccaattgagtaatggtagtcagcaattgaatgctaattcaaatgatctgaaccaaggtaccacacaactggcgactggtgctgcgcaactgaatggtggaattccaacattggtttcaggtgtcgagcagttgtttagtggttcccaaacggtcacgggtggattgaagacagtcaacggcagtgttcccgcaatgattaccggtataaataaattgagtactggttctcaaaccctcactaatggtattaacacagcacaagggggagttagtcaattactagttggttctaacaaaattacgactgggttggtaactatgaatggcaaagtccctgagttagtcagtggtgtccaacagttgcaagttggctctggcaaggtaacaactggtttaattaaccttaatggacaagtgccagttctggctagtggtgttcaacaactctttgccggttcaagtaaggtcacaaatggtttagtaacgttaaacggtcaagtaccagtcctagtaagtggtatccaacaacttgacaccggtgccggtcaactaaacagtggtttacaaaccttacaaggtagtaccggtcaattaacgagtggtgtcagtcaattaaatgacggggccacccagcttgacaacaactctgccaaactcctatccgggacaaagcagatcaagaacggtaacaagacactcgcgacttccttacaagaaggtgctgatcaagttaacgcgacaccattaaagaacgcgaatgcgaaaatgatggcggcgccaactaagacgtcctataaagactacacgcacgtgccaaactatggtcatgcgttagcaccttacgtcttgtcactggccttgtatgttggggcaatcgtcttcaacttcgcttatccaattcgacggattgcggatgacgacggcacgccaacacaatggttctggagtaaagttgccgttggtggtcccgtagcacttgcgatggcggtcatcgaagcgacagtgttattagttgctggtttgaaaccaatcagtgtacctgaatactacttgacggcaatcatgattgccttagcgtcaatgttcctagtcatgttcttatcgatgctattcgataacccaggacggttcgtcgcaatggttatcttgatgctacaacttggtggttctggtgggaccttcccgatggaaattaccaacaagttcttcaacgttattcacccatacttgccattaacgtactcgattcaagcgttccggcaagccttaactggtggttggggtagtggtattttctggtcatcaatcgttgtcttagcaggaattacgattgtgtcgctgggattactgtgggcttccatggtcttcctcaagcaacacgatatgcaagttccagccgaggctgaaattcagatgaaagctggtaagtaattactggtaatcatattatcgcgcttccaagacgaaaaaccgcgtcttgggggcgcggtttttttctcgaaaagggttaaattttaattttactgataccataattcgaagacattacttttttctacgagtgagcgcaactaatgaataactaggcacatctaatcgcgtaccaggccaattgtgcggcgataaacccgactccaatgctatctccaaggtatctgattagtaatttagccgctgccttccacgcctttctttggattaatccttgaatgcctccgcgtaataatgcttggaaagtttggtagccaatcatgtccaataattgatttttcatacaggaccaaaaacttctagtttgaatactatttagcttgccttggttgaattgcaaatttcgcttgtattcatatttcattatctcgttgatatgctgcaattggttctggttattggaaccgtattttgatactaaagcgttcacatctaagtttgttgctaatccagtctggggatcataccgaatgatatttgatacatctgctaattcttgagcgatacaatctatggcttgttgtgacgatgacgtcgtattggcagaaattttcaaagttatggtagtagatattaggatactgctcaataaaataatgatcaaagtaaatttgtgaatgttagcttgactggtataattcattggacttcctccttattccggtagtgtacatttttgaattgcgtatgtataataagacaaaacgaaaccggtttcaatagatgggagtaggatatgatggctgtttttaaatcaagtttcaaacaaagcatgattgtttttggaatatcagttatttatttttttgttttacatggtggatatgatcttctcacacaatacaaatattggtttacagaatactgtgctaatgttttgggtatttccattatttattttgtaatgtcactagttttcaattatagcatcataatatggaaactctattttagaaagcattgagatagtaatctgcttaatagtgtgtttactgacgctagagtacgcaaaaaggcccaggtcaaagaaaacctgagccttttcgatgtagatttaaagcatttaaataattaatctccaaaaatgcagcaatcaatccactttcaatacactttgacgttatggtgattcattcaccaatgctagaaatattgatctgagcgatatgtaatcgttcttgaataatcatatcagtaatttagtagaattatcttgggacatattggacacatgctttcaattggttgtgatcagcttggttgcagcatggcgcaatatgtccttttatcatacataaaaatggtgtcgatggataaaattcatcaatattttaaagctaaatatctgaaaaaatagatgacatatgattatcctatgctatcatataaggacaaagtataataccggtaaaaattggggaacgtattatgaaaaggggtagtttaactgtgttacgtgcactatcgttatcggctgtagggctgattgtgtcaatttttttccatgttgtaaatgccaactcgagtacttttacagagcaaagcgttacaactgaacaaaacgtgatttatgacaaagatggcaatcaggttccgctatttgatgcatcatctcaagaaccagttatcgaagaccggggcccgaaacaaccaacagccgtcaagcgattgggtaaagggcaatcttgccaagtaaataaattttctggttcaagaatacgctatggcagatatatgggtggtgtaactggaaacgctaagaacgttagcttttcagaaaaaaagggtgcttttacagggtacattactgatcgtcctgatctaagcactgtggcacagtattttacagcaactccaagtggcggtccttaccacgccgccttccatggtcttctttactttgaggctgacaatccagtacctggtccaaactattttatgcaagttcactaaaaccgtaataatttgcccgcaacggtataaagccgactatgcagtcagctttatgtatttatccaatacgcgttgtgctagttactttgtcatgaaacaattatgacagctgactttttccggttgttatctgaaagtattaaaatcggtgctaatgtcttgccagtggctaagcctaagtttgacgatttgctgaatgactagaataacctatctagaaaataatagtcgattgctgcattcggagttgttcaggtgttaaaaaggtaactgccaaaacgaaaatgttgtgcggttggtattagtgaagttaggcgttagttggtaaatggttttttatatggtacaagaaaggctcgggtacgctaacccgggcctttttggtatagtttcaaagtattaaagaattaatctccaaaaatgcagcaatcaatccacttgcaagactaacgttgctaccagtcaatcctagttttgccctgcttcaagtcgtttaacatgcaaaacactaaccaaaatggcgatcgccaacacgaataatagcaagaaatccaacttgctccccataatcgttccagttacggtggaatgatgaatttcatagccggcaattacagcggacataatactggtcccgattgaaccggcgtattgttgcatcatactgaacatcgagttttgatcggatttttgaggcagagggacgcgggtgctaccatccgaaatcgcagtcccaaaaccagtattaaagccgacgcgtagtagcgcgtaaatgacagccatgatgatgactgtgaaataatcggttgtcagccagaataatagtaaggcggcgctcgccatgatggcactaaatgttaataaggtcgttgggccttgtttatcgtaaattcgaccggcgattggcccagtgatggcgccgacgattgcgccgggaagcatcatgagccccgccgtcatggccgaagccccaaggacggtttgggcgaaaagtggcaggacgaacgataacccgatattaatgaattgtaaaccaaagtaattaaatagccgaagtcgcaagattggcaatttgagaattgaataatcaatcagttggcgacgccccttgatggcgtacgtcaccattgcaccaatcatcacgatgctccacagacaccagaggccgaagttcggcgacagccagccgtgagttcccgcgttgttaaacgtgaacaacagactagtgaaggtgatggctaaaaggattgcgcccagatagtcgaattttttatcgccaacacctaaggccttccccgaaatgttgaacgcccctaagattgccagtaatgccaataacggtacgataccaacgaaaattgcccgccatgaccagacgctagttaaaatcccgccataagttggtccgagagccggggctagagacacgatgacactagctaaaccggtataagttcctagttgattgcgagggacgtaagtgaaaatcaactggaacatcagtggaatcgaaatcccagtggctacggcctgtaaaaggcggccagttaataatacggagaaattcggcgctaaccaacaaagaatgcccccaagcagacacacgagggcggcaaataagaataagggcttggggttaaaccgctttagaacataggccgtggtactcatgacaatggttgtcagtaataggtaaccggtcgtcagccactggacggtatctagtgaaacccccattgttttaatcagcgtggggaacgtcacattcatcgatgtttccacgagaatcccgacaaatgagagtaaaccaacggataagattgccagtttggtttttaaagtgacggtacttggttgggacacaatcaacactccttataaaaataattggcgtattttggacagctcaccaagcccaatagtcggtggtaaaaatcagtaatctgaatttttgcgattgaaagggacgatcgtaatgaccgtcccactaacgtccccagtttaagcttattttcaatctggtgcaatcactttgcattagggatggaacttatcattaaggggtttgcgcgaggtatggtattataaaaagttgtctaattaaattttaattaaattattggaggtgcgctgtgagtatatttttgaaattaggctggtattttcggcgtgaatggaagttgtacctcgcgggggtgcttggactagttttgactgccattatcggcattgtgccgccccggattattggggacatcgttgatgggattaatcagcacagcttgacggcgcacacgctgacggtctatttagttattattggtgtggccgccgttggtcagtacctggcgcgttatttatggcggaatgccatctggggtggtgcagccggccttgaacgaacgctgcgggaacgactcttttggcattttatgaagatggatgcgacgttttatcagcaataccgtaccggggacttgatggctcatgcgaccaatgatctcacggcggttgaacgggtcgctggtggtggcattctccaatttgcggattccattattactggtgggacaacgctgattgcgatgatgacactaatcgactggcgactgacgctgattgcggtggtacctttcccattattagcggtcgtgtcacggtatttgggtaaaaaaattcacgtcgcgtttcgtgcctcccaagccgccttttcgcgactgaataataaggcgcaggagagtatcagtggaatcaaagtgatcaaagcgctaggtcaggaaaaggccgatgttgctgattttaatcaacagattgatcagacgattaagatcaatcggcatgtcaacgtactcgactcgctatttgatcccgcgattaccatgattattgcgttatcttacggcgccacaattattttgggcgggttgtacgtgacccacggtgtcatcacaatcggtaacttggtctcgttcgtcacttatttgggaatgatggtctggccgatgtttgcggtcgggatgttattcaacacgatggaacggggaaacgcctcgtatgatcgggtcatggaattattgaatcagcaaagtgccattattgatgccaaacggggcattgaacagcgcccgcatggtgatattcagtatcaaatcaagcagttcaattatcccaacgatgcaggaaccagtctgagtaacgtggactttactttgaaggcgggacagacgctcggaattgtcggacgggttggtgctggtaaatcaacgattatgaaactgattttgcgtgaatttgatcagtacgagggccacattacttatggtggtcacgatattaagcagtatgcgcttgatagttacttaccagcccttggttatgtgccccaagatagttttctgttctcgaatacgattcgcgaaaatattcgttttgccgatccgactgtgagtcaagccgttgtggaagcggtcgccgccaagagtgatttgagtggtcagattgccagcatgcccgctggttacgatacccaagttggtgaggaaggtatctcgctatctggagggcaacgccaacgactagccattgcgcgggccttactcatcaatcctgaattgctgatcttagatgatgcgttatccgcggttgatgccgaaactgaggcagaaattttagctaatctaaaggcagaacgagcagacaaaacgacgattatcgcggcccaccggttaagttcggtgatgaacgctgatgaaatcattgtgttggatgccggtcacgttgttgaacgagggacccacgcgcaattaatgacgcaacacgggtggtatcagaagatgtttacgcgccaacaattggagaccaaagtggaaggagcggtgcaataatggcagcacgtcaatcggtatgggcacgttccatgcctgttaaggaacaactcacggttattcggcgactattgccgtatgcgaaaccgttcaaatggttttttattgcggccatcgttttttccggtctgattagtgtggttaatatctatctaccgcgtgtattacagacctttattgatcattatctcaaaacaggacacgccacggtaccggtcatgtggtactttgcgggcctctatttcttcggcatggttgtgcgcgcgttgatgcagttcgtacagaacttcagtagtacgatgggggcagaatatatgcttgaaaatgttcgtcgacaaatgttcgccaagttgcatcggatgggcatgcgctactttgatcaagtccctggtggctcaattttgtcacgcctgactaacgatacgatgtcgttttccaatttttgggcgttgtttaatacactatttaccgccttttttgcggtgatttcgtcgtttgtcgcgatgtatctcaccgatgcgcagattgccttgtggttattggttttcatgccttttttggctgtaacgatttggtattatcaacggtatagctcacgggtttaccggcgaatgcgggaacggctcagtgagttgaataccaagttgagtgaagcaattactggaattagtgttattcagcaatttcgacaagaacaccgtatcaatggtgaatttgatcataccaatgatgcctattttaagacccgccaagcgatgatccggacgaactcattattattaagtccactgatcgacttgttttatgcgttagggacggtcatggttctgcgaatcttcggggttcgtggactcaatggttatgtggctgccggggtcgtttatgcgttcatcacgtacctgaataacttctataatccgatgacgtcgatgatggataatttgtcagactttcaagatggcgtcgtcgccggatcacgggttttacgggtcatggatgatccaacgattgccccggcccaacacgccgatcctacggctaagattacgcgcggtaagattgaatttcggcacgtcacctttgcctatgacggccagcatccggtcttaaaagacgtttcattcgtggctgaaccaggccaaacggtggcactagttggtcagacggggagtggaaaaacgtcgacgattaatgttttgatgcggttttatgagtttcagtcaggagaagttttaattgatgatcgcgacattcgtgagtatccggctgaggaattgcgacagaagatggggttggtcttgcaagaaccgtttatgttttatggtgatattaattccaacatccgaatgtttaacgatcagatttcagatgaacaagttcaagcagcggcacggtttgtaaaggccgatgacttcatcaacgatttacctgagaattatcagtcacgcgtcattgagcgcggggccagttattcttcaggacagcggcaattgatttcatttgcgcggacgattgtgactgaccctaagattttaatcttggacgaagccacggcgaacgtcgatactgagaccgaagagatgattcagactggtttggatcggattcaggagaaccgcacgacgattgcgattgcccaccgcttgtccacgattcaaaatgctgatttgatcctggtcttaaatcaggggcaaatcgttgaacgcgggtccaacgatgagctattgcaacagcatggttactactatgatatgattcagttgcaaaattccgctcacgtcgattaaagtgtggtatgctcgatttaaattaattgaggtgatgccgaatgcgtcgaaaattatcgttaatggtcgtgatgactgttattagtacgctggttaaagtgggctggcaattaatcttagcgcgccatcaagcgcctaaaaagttaaaaattaaagtaaaactgaaataaacattgtcgtcgtgtcggtagcgatgcttacggcgattcaatcagttgtcatgaccgaccgttctggaaaaggtgtaacttctagaatggtcggttttgtgttgaaaaattgagttggcggaggtggtcgcggtgagttgtggtggtgcccacaaaaccggtttatcagtggttcgtccttaaaatcggtcggtgacactcactgcaggatgtggcctggtatgcttgcaatcgtgctgttcatttttggcccaacacctggagtacggtgccacgcttgaatgtcgccaggcacattgaaaataatgattggtgactaataacggtcattaattcctaaaacgactggatgacggataactatacggaatggttataattgattatttgaactaggtattttactctgccaacggatcgcgttttaataaagatggtaatgagttaacgaagggagttgtgatgcaatgcaatatcgacaattaggaacatccgatttaaaagtctcgtcgatcgcacttgggtgcatgggttttggtgcggggactggaacggcgcttaatcagcgctcgtgggcggttggtcaaacgcaggcgaaccaggtacttgatcgcgcgatatcactggggattaacttttttgatacggcgccggtctatcaagcgggtgcgagtgaacgtgtcttgggacaaggactaaagaaatttcagcgagatcaattggtactggcaaccaagtttacgaatcggacaacccaagaaatcgaaaatcatgtcagtgggcgtgaacatgtcttgcggtccctcgaccagagtctacagaatttacagacagactatgttgatttatatatttatcatatctgggactggttaacaccaatggctgaaatcatggctgggcttaatgaagctgttcaggccggtaaggttcgttacattgggatttctaacgcctattcctggcagattgcgcagatcaatgcgctagcggttcgttatggttatccacaatttgtctcgatccagagtcattataatttggtctatcgcgaggatgaacgggaactgttcagttatgctcatgagaacgatttggcaacgacgccgtatagtccattagctagtggccggttggcacatccttttggcacccagactactcggcgacaacaggatacgtttgctgataccaaataccaagctaccagcgagatggatcaaccaattattgatcgcgttgaggaactggcccaccaacatcatgtttcaatggcggccattaatttggcctggctacaacaacgagtaacggcgccgattattggggcaactaagccgcatcatttagatgcagtggctgaggcagcggggttggcgttaactgcttcggaaatacagtacttggaaaccccttaccaaccccatgacttggagggcgtgatggcacttaaccggtcacgaactaataattggaatcagtattccggacagtaagcgaacaagttagttgacttaacgtgcagttgaagtaatacactgatcctatcgtgcgactaaaggtccacgtttcagtataaaggagttattgagattaaattgaaaacaatcacacaacagtatttaacgggcgagcgggcactctttaaagctcacgaccttgaaatcgacaatacaacgtttgctgatggtgaatcaccactgaaggaaagtcgcgatgtcacgttgaaacagccaatctttaagtggaaatatcccttgtggtacagtcaacatgtgactgtggatcaaggtttgtttgagacaatgtctcgctctggcatctggtacaccaaggatattacgattacgaatagtacgctacaggcacctaagctatttcggcgggccagccaagttaagttagcgcacgttcacttttcagatgcggaagaaacgttatggaactgccaagatattacgttgaatgatgttcaagcagctggtgattattttggaatgaatagccagaatattcgcattgatggcttcaacctcgtcggtaattacgcctttgacggtgctaagaacgttgaaattcatcatgcaacgctgatgaccaaggatgcgctatggaattgtgaaaatgttaccgtttatgattcacaaatcattggtgaatacctgggctggaattcgaagaatattcggttcgtcaactgtacgattgagagcgatcagggcctgtgttacatggataatgttaagttggaaaactgtacgttactcaatacggacttagcttttgaatattgtcgtaacattgacgctgacgtggtttcaacgattgatagcgttaaaaatccgcttagtggtcggattcatgcgcaagccattggtgaaatcatcatggatgatcctgaagtagatcctcatcagaccctgattagtgttgaccatgaaagccgtgcgccccatgccgtttgattttgagaccgtacttaatcggcggcacacgaatgccgttaagtgggacgtcgcggataatgaattgccgatgtgggtcgctgacatggactttgaaacggcaccagttatcaagcaagcgttgataaaacgcgcccagtttggcgtcttcggttacgaagaagtccccacggcttactatgaagccgtggcagactggtgggcaacggaacacaacttccgtccgcaaattgagtggttgatgttctgcaccggcgtcgttccggcgatttcatcaattgttcgtaaaatgacagcgaccggcgataacgtgttagttcaggctccggtttataatatcttctatcattcaattgaaaacaatggccggcataccttgagtagtgacttagtggcacgtggcgcgtcgtacgcgattgattgggacgatttgacgacgaaactagccgatccgttgaccacgatgatgattttgtgcaatccgcagaatccaatcggcatcgtctggtcacgtgcgacgttgcaacgccttggcgagctgtgcttgaaataccatgtgctagtcgttgccgatgagattcattgtgacttgacccttaacggtcacacgtacaccccattttcatcattgactgcgccagtagcacataacagtatcagctgtatctcgccaagcaaaactttcaacgtggcagccttacacgcggcaacgttgattattcccgatgcacacgtccgcgcattagtgagccggggcatcaacaatgatgaattggctgaacccaattcgtttgcgattccagccagcattgcggcctatactgaaggccatgactgggtagccgcattgcgaaccaaactagctgccaatcaacgtcaagttcagacttacttgactgctgagttgccgcaagtcaagttggtggaagcccaagcgacttatctattatggttggatgtgcgtcaagtgacaaccgacagtgcggctttggctgcttttattcgccaacgaaccgggttgtttttatcagcgggagatgtttaccgtggtgatggcaaccgcttcttgcgactgaatgtggcttgtccaacgactaccctgacggatggattggcacgattaaaagctggtattacggcttaccaacaagttcaagcatagttgacgcgtatggggtgcaattccataatgatttcgctatcattaagataagctggtttggtctagatgaccgctgacagtccgtgataacggaccagataagtcggttaattcaaaccattattaaaagatgaggtggaggatagttatgaaaattggaattattggtgccggtacggtcggcacagtattagccaagacctttgcgcgcggtgatcatcaaatcaaattaagtcggcacagtggtgcggctagtttagcaacacggcgcgccgagtttgctgccaatgtggcttttgtagaagttgctgaagccttacaacagccgttagtcattcttgcagtgccgtttgaacaggcgccggcagtattagcgcaggtcgccgattataagcaacggatcgtggtggacgtgacgaaccagtttacggctgactttaagaaaattaagacggccccgttgactggaagtgaagtcattgctcgtgcagctaacaatgcccgggtcattaaagccttcaatacgattccaccggagtttatggatgggcacgttgatgggcctggaaagcgggtcttgttctatgcgggcgatgacattgctgctaagaaagaattcgctgcgctcgtccggccgttgaatttccgccccgttaacttgggcaagcttcggcatggcggcagtgtcatgcaagttggcggtggactaggtaacacacactttgttcagattgaagaatagtggattgtaaaaaggggttcacttttgaaccaaaatagctagtgctgaccttgtaagaaaaggtgtggctagtgtcactttgattgggccgtgcggtgagtatcaattgacaggtgttcctgccaatcgtcgccgcgtggttaaatttgaatcgtattatgggtcatgaagcctgattcttactgtgtcgtaactgtaagaatggggctgcatggctttttttaattgaggttaattattgtttatacggtttgatgaggacaatggtattgatacgagtctagtcaattaactccgcccacttagctacggaaatatccgataggcacaataagaggaacgtgaaaattcttatgtctttacgctattttggttaaataaaagtgtgaacattacctgctttatatcgtatgagatgcagtgtgcccattcaataggctttgcagattatgttaatgaatttcgactatacgcacaatacatattattatatttagccacgggtgttcttagttcccagctatctatatactagatcaagcaatgatactttcaactattatcgaaatttattggaataatgcaggttttccacttacagcgcctgaatttaatctccgctgtcaaagcaggtgcatgggtaataacccttgtctgacctgatgaatcataatagtgttattcttcaggcgtataatcatttattttctaataccaaaagcgttgtgcttcatttcaatgagaaatctagacacaacgttttttattaaatactgctatctaagctaagatacttaggtgacttcagaaaggactttctaaattaatgtcttcatattcgaatgagctgctcatgctgatttctcgatcgatgctattcaaacaagttatcatacttttcgcttatggttgcttgtactatttggtaactcattttatagataaaaaaattcagcataaaaaaaatttcttattgaaattaagcctagttaaactcaaaaaaagaaataagacaaggtgggaaaaaatacgattgataatgcaactgttcttactggcatcgataccggtcttagtctttagtgaactcgtgctaaatactgattaccagtacatgcttttggtttcttctattatgaagtgtgttggtttcatttcttttgtaattgcgtttgtggatagtttgggtccaataaaggagatgcagcagttgattgctggcgcacaaagcagtgatactttagacagtgataaaaaggcgctagcggtgacgagctttaaaaaaattagatggatgctgatattatatcaggtattaaaagtacccttgcttgtaatttttttgagcttaagtgttgattaccggcgcgacggcttcttttcataaaaatttgaatataactcatttttaatcccgttcctttagctattcttctcgcacgttaattgatagcaagcgtcaagtcgattaaatctgaaaatcttatcacctgagaagaaagggcacgttttgacagattacccagatgaactgctattagtattgtttcacggccaaatcttgaattaagcaacgacaactgttttatatgaattacttttcttgctgattcgtcaaatggtctttttgttgattggaaatcaaggtaagcagattattgagttaaaagccgtcgatacaactactccgcataatacctaatatgttacctaatatgttaaatagttcagtttttaagatacgttaggcctgcgcgcagagtttgctgattatttttgcgtttaagctgttaataacagtttttgcagttgcttaaagttatccacagtgtaagttggggcaattgttgtgtcgttatgcacatgctgtggattgtaccagatactaggtaaatgggcggtggccgctcccgcgatgtctgaacgcaggctatcaccaatcatgacggtattcgtggcattcatgtctgggtattggtcatgaatagcgctgaaaaagtgtgggttcggcttggcataaccgatactttcagagatgaagatatgatcaaaatagggcgtcatatgggcacctgccaagcgactgagctgggtgtgtttgataccgttagtgccgacgagtaaggtcagcccagcgttggtcagcgtgcgcaaaagttcgtgggcgccgggaattacctgataactgtgcgctaataattggtcgtattcttgttgaaccgcaggaccgtcaacggtgatgcccagtgtgcctagaaagacttgaaatcgttggtctaacaagctatcacgatcggcaccttgttcgatttgttgccaaacagtttcgttataggcctgatactcactttctgcacggcgaatatcagtgatgccatgatgctgaaagacggctgcgaggttagccgcttcagcgcggtcaaagtcaaggatggtattatcgagatcaaaaattgcgtattgcatggaaccactactttcaataggtttatttaaaccatcatacagcaattttgaatggtgtggtatgcttaaagtatcatacttaaaaggaagttaaacatggaaatcgataatgacccagcgtatcaacaaatgattaatggtgaattgtacttagaatcaccaatcctacagcaacgtcggcgagacgtgcggacgaagttaatgcaatataatcagattgctgacaatgatgaccggaatactaagatgaaaagcctcctacgttcagccggtgaccggttcttcgttgaaccgacctttgaattcagttatggcgtcaacatccgtatcggcaatcatttttatgcgaaccatggggtcacgttatgtgatgaaggactcattacgatcggtaatgattgcaaattcggtcctaaagttggcttgtacacgcctgctcatccattagatccaactgtgcggcggactgaagcggaacggactgcaccgattacgattggtaatgatgtttggattggtggtagtgccgtgatcttacccggagtgacgttgggcaataacgtgattgtgggtgccggggctgtcgtaacgcattcgtttccagataacgtcattgtagtcggtaatccggcgcgtgtcttgaaacaaaatgcaccgcagtcataattgacaattatgctcaaattgatgaaaataagggtgtagtcagattatcagagaatggggagtggagccatatgtcagagatgagtcctaaggaatttaagcacatcttagtcggcgttgatgattcggatgacgcgcagttagcgtttcggtatgccattaaccgggccaagagtgacggtgctaagttaaccatcgtttcaattttggaacaggataatatgaacgtgtatgaagcaatgagcaaagattttgttcatggccaacgcaaggatttggaagaacacgtccagcagtatcagaagttggcccgtgacttcggggtgacggatgttaacgcggtcgttgatgaaggtgaccctggtgaaaccatcgtgaagacggtgattccagcgttgaagcctgacttactagtcattggctcagttgccaagcatggtgttcgtaaatacttcggttcgcaagccgcatatatggcaaaacatgcaccgatttcagtactggtgattcggtagtgataagatgaattttgattgatcaggccttccggttatggagggctttttttgttgtgtcttgagtatcattttccggcgatggtgttgatgatgaataatagtggttgtgtcttgaataccgttgttatcaaagcagtgttcatttgagcaaatcagatgtttgctagcttctatgacttcgtggtaaagtgaccgtgacatgtcgttgggattaactgaaaattaagttgtgatggaaaggtgtgctgatagatggaagtgagtattcgtaagattggcaatgctcagggaatcatttttcccaatgaactgagccttgaagtaggggcacgttatagaattgagcaaagtggtccggcactgattatgacaccaatcaattcggaactttttgctaatccagatgattgggtgggttttcgtgacagtatctcccaagcagaccgtgaatgggaccagttagctgactcctaaaatggttagtgacaggcaattatagtgttagttacttaaagcgcatcagttttttgatggtactagtattctgatgatgttaaataggattgttcagtagggcgctgggcaatccttttttattgaagcgactctttttgagggattgttttaacaaagagtaaaggaggttaagtataacggataaaaaatagtcattgcaccacacgttagtggcgacagtacaaagaggacggcggcttacatttgatttttacaaaaaacaattagagatacaattaatatcagaaaaccaggtctagcggtggccgatttcctgatattgcttttcataagtaaaacttatcaatgtgggctgaatttgaaattggtctaaaagacgtttgcttgtaagatatgacttgtaagttaaggtgaatcaaaacaagtaaagaggtcaatgaatatgaataacgaagtaattgtgcttttcggtgccggctcaattggtgaagcaattgttcgacgtgttgctgccggtagaaatttattgttggcagactataatgaagcaaaattagttgaaatgaaacaacacttgacggaagctggatttaacgttaagaccatccaagcggatctttcatcacgggaatctattaagacagtggttgctaaggcacaatcgcttggtaagattatgggattggtcaacgcggctggcgtttcaccatcccaagcgagcccagagcaagtgctcaaagtggacctttacgggactgccgttttgttagaagaatttggtcaagtcatggctcccggtagtgcgggaatcgtcatttcgtcccaatcaggacaccgattacccgccttatcacaagcagataatcaagccttggctatgacaccgactgaagaattattggatttaccaattttacaaccggacgtgatcaaggattcattggcggcttatcaatatgcgaaacgaaccaatgttttacgggtcgctgccgaatcggttaagtggcaagctcgcagtgcacggatcaacacgatcagccccggtattatcatgacaccattagccgttgacgaattgaacgggccgcgtggtgcgggttacaaaaagatgttcgagtcaatggttacgaagcgtccaggaacacccgatgaaattgccaatttggcggaactcttaatggatcgccgtggtgcctttatcacagggagtgatttcttggttgatggcggaattaccgcacaatattggtatggtaatgtttcagaagttcgtaacaatggcgtccagaaatagaattttaaggagagtttattatgaaagcagcaacttttattgaaccaggaaaagtcgaagttaaagaatacgacaaaccaactattcaaaagccaaccgatgcaattattcgggtgctccgggcctgtgtatgtgggtcggatttgtggtggttccgcgggatttcacaacgccaagcaggttcaaccgttggtcatgaagcaattggaattgttgaatctgttggttcagccgttaaagatgtacaagcaggcgatttcgtgattgcgccgttcacccatggttgtgggcactgtgccgcttgcttagccggttttgatggggattgcttaaaccaagaagctggcggtaacggtggctatcaaggtgaatacttacgctttaccaatgcaaactgggcgttagttaagattcctgggcaacccgaagattattctgacgacatgctgaacaactttttagccttagctgacgtgatggcaacgggtttccacgccgcaactagcgcagaagtcaaaaaggatgataccgttgttgtgatgggtgatggtgccgttggtttgagcggggttctttccgcaaaattgcttggcgctaagcggatcatcgcaatgagtcgccatgaagatcggcaaaagttagcaaaagcatttggcgccacggacattatcgctgaacgtggtgatgaagcagttgccaaagtgatggctttgaccgaaactggggctgacgcggtacttgaatgtgtaggtactgaacaatccgttgacacagcagtcaaagtcggccgtcctggtgcggttgttggtcgcgttggggtcccacaaaaggctgaaatgaataccaataatcttttttggaagaacattggcttacgtggtgggattgctgctgtaacgacggatgacaagcaagttttgttagatgctgttttgacggggaaaattcagcccggccaagtctttacgaaacggtttatgttagatgatattcaagctgcgtacgaagcaatggaccaacggacggcgattaagtcattggtcattgtcagtgataaataggaggaaaatatgaagaaagttttaattattggtgcaacggggactattggcggtgtagttcgacaaacgcttttgaatgaaaccgataatcagttaacgttgtttgctagaagtgccaatcgattaaagactagtgagcgtgaaagtgttatcgctggcgatgttactaaagatagtgacttagacaaggcgattgcaggacaagacgttgtttttgttgccttgagtggttctttaggtcgctttgcccaaaaaattgttgcggcaatggaccggaataaggtttcacgattgctgtttattacttcaatgggtatttatgatgaaattcccgcttcggttggtgctagtggaaatttaagtagtaatccaatgctacgcacttatcgggaagccgccgatgttgttgaagcttctgatttgaactacaccctgattcgtccgggctggtttactggtggtcctgttgattatgaaatcacgaaaaaaggcgaaccatttggtgggcatgatgtctcaatcaattcaattgcggattttgtcaagaatgcgattgtcgataatgattattatgcacatgatagtgttggactaaatgcaaaataatattcaaaaggtcattggctagattgctagtggcttttttcgtttataagcatggtagggaatcggttcaggttctgctgcaaaacatttctcaaattgttgattaaggttatactaattaaaataatatgacaaatttgaacattcaaagataattttgtaaaggttgaggtgccattaatgtttcaacagatgcagtattttatcgcaatcgttaataatcatagttttactcaagcggccgtggactgccacatttcgcagtcagcgatttctcagcaaatgaaggagctagaaagtcaacttggtgtgaagttattgaatcggaaaggacgcagctttgaagttactgaagcgggtcaatacttttatagtcatagtcaggatattttggtggatgtggaccaacttataaagaaaaccatcaaaattgaaaagaatgatgaggtcgagttgcgggttggctatttaagaagttttgggactgccgagtttttacaaactgtttcgaagtttactcaggagtttcctaaagtgaaaatcaaaattagtagtggcacgcacgaagaactctatgaattattacagacaggaaaaattgatttgaatttttctgatcaacggcgggccttatccaatgaatatcaaaatgaatttttgaccgctagtgagtttatggttgccgttaacaattcgttgccagttgaggcacaaaaaatcgacgttgctgacttagtggatattccttgtattttgatcattgatggcaatcagcaagtctcagaaaaggagtactatcgcaatgttttaggtgtcaaaagtgagtttgtgattgctaaaagctatgacgaggcacaaatgttgatcgcgtctaatcaggggtatttgatcatcaatcagcggatgagaacacaattagataaagatattgttaaaatgatttccttggttaaaggggaccgaaaattgattcagaactattacgcttattggcaagctaataattcaggttattatatcgaaacttttgctgaattattgaaacaaacctttgcataatttttacttatgaatgacccttgatttctgaatggttttggcatagaaaagttggtatcatgcttgatgtaaataaagaaagcgtggtaagaatgacggataaagaaataattattaaattgtatcgtgatgaaaatattgctatggttcagaaaaacctcagtcggttaaatgaaattttggcaccaactatgaagttaacccacatgacggggtatgtgcagtctaaattagagtggattgaccaaattcaaaatgaagaaatgcaatattttgcttcaaaagaagataccatcaaagctattcaaattgaaggtaaccgggcaagtttaattggtcagaaccaagttcaggcaagaatttggggtgggggtacgcatacttggcggttgcagatgcagatgttttatgagaagaagaatggtgattgggtcattagtgcgcagaaagccagtacctactaaagcgactagtgattagtggtcagtaaaacggacgcattaggaaaatagtatttgttggcttggctagactgtcaactaaaggcaacacgcctgtgctttgtgacaattcctgaatagaatatattaagcgaaccataatacctttaatttctgatgactgtggcatataacaattatggtgattaagaccaatgttcgatattatacatctaacgctactaatgaagagaaatacacaatgatggtgttaagcttaccatcaaaagacgtgtggtgacttgatgagtattcagcatggcgattttcgctaattctcggttagccaaaatgaacgagctgttgccgcacaataattaaggtcgggataaggatgcacatctgattcttatcctgattttttgtttgccagctatatgttttaaaatgatagttgtttcattcttgattacaattctactcaaattcatattaaacaagtcctagagtccgtttgtccggccaagtttttatgctaaaatagttgaataatctaaaaaaactaacggagaattaaccatgaaatcaatcaccttacacttagtcgttgctggagcaacgtactttaatcaacttgaccggttccagggttggagcggcacgccgttgacggcgactggcgagcaggcgacggccaaggttgcgcagcagttggcgtcgacaacgtttgataccgccttcgctagtgatacgagtcgggcgattcagactgcgcgcattatcttagactcacgagcacaacccgttaagttacgaacggtagtcgcgttacgtgcgccattctatggcggttttgaaggaactgaacgcgcggcggtttggtcagggtttgcgactaagttgggttatcagagcgtggccgcttttgctgcggatcagacccccagtgagttacagacattgttgcacgatcacgatgcggatggattggcggaaagtggccaggagttctgggatcgctatcagaaggggctacaacaggttatgacggcaacgcctgatcatggtcaggtcttgttggttgtggacggcgcaacgttgcgaatgatgcattacgtcgcaactggtcgtgcggcaacgagacaggcattggcaccaagtgtggtgacaacgatggtttacactggggataagttgattgtaccggtcacggaataagttatccactgtggacaactagcggcttgcggtttatacaaaagtgcgctactgtgaaaattgagtttaaaaattttaacgaggagcttttaaaatgcaagttaatgttattacgagtacggtggccggccaagagacggtcgcaactgcggatgtgcaagctttcatggccgccatggaaaaacaattgggcgcagatttcaacttcacgttagatacagattatggtcagagtttgacggaccatagcgcggacgtttacctagtttattttggctcccaagcgaacttatccccagaacaacggtcccaaatgatcatcttctattccgatgaagatgtggctaacttaacaatcggacgttttgtggatatgctacaacagttaaacaagcagtaggcactgcgttaatcacaagttaggaagtggccccatgcaattactgattttaggtgttattgcaattgttatctttatcttagaagagtacctgtttacggctagtcgctacttttgggtcggcggtatcgttccggttttatggacggtttttttggcgtaccttgtcgtggtcaatgccatgaacttaacggtgcgcgagtatgctttagcaattattgcggtcatcattccttatgtttgttggggtaacggctatcagcggcatcaaaggcggcagtcatgaaaatccaacccctagcggcagctcaaattccacgggatttactgttattagccgatccatcttgggcacaggtcacagcgtacttatcgacaggccaatgttatggttatcaacaaaatggacaagtggtgggtgttgtcgtgttgacaacgttcaaaacaggggtgtgggaagttaaaaatattgcggtggcgcccgcctatcaacatcgcggcattgctaaggccctactagcaacggcgattgcggtctgccaagcagcgccaacctgtgatgaactgcaaattggcactggtaattcatcgttgcggcaactagcgatttatcaacacgctggttttgagatgattgcggtgtgggtcaacttttttgtggataactatccagacccgatctatgaagctggcttgcagtgtaaaagtatggtgcgattgagtatgtcaacaaccggggaggtggcacaacgtgtggaaaacgagtcatttactaattagttggttttacggtgcaatcgccgtcttcattatcatgttttttacggcccgtcaggaagtcaatcggatcgtgttagaatttaatccgttcgtcatttacagtattatttgtgcgctcgtgctgtttccaattgtgaagtatcgttggccgcgggtgtttcaagtctggcgtaaacaacccaaggaaacaccgtcaacgcgaccagacgatgagcaaatcattcaggactctggccgaccatggtcagtagcagccaagcggacaaagcccaaacccgttccaaccgcattaacgccacaagtcgaggctaagagtgacttcatggatggttttatcaacttctttaagaatattttgatggcagtgattttggttcctttaagcccgattatttgtgggtattttggggtccgggattggcgtcagcgccaaaagtagtcgaaactgataatctgttcaggaaactgatcaaatgagtggaagacttatgcagatactgttgataacgacattgagttatcaactgtggataaaagtctggttaacgaaaaaaacgaatcaacaagttgttcataactttgttgattcgttttttttgttagttttgaaaatgattgatgtattgttgccgattctgcctaatgacgccaatgatcttacatcggcaataaatgaggacaatgtaaatacaaacgagtcatttgtataataaaaaagcaagtcgcagttaacgacttgctgataaggtgttcaaatcttaaggttggtagttattaatatattgtttgcggttctgccatggccatgctttgacgaccccaatcatcttgctcttaggaacgagcccccagtaacggccatcgttagaaacgctccggtgatcaccaaggacaaagtagtaacccttcggcaccgtattgttggtcacggacttggcccagccttgatcatggctcaaactattgagtgtccaaccagtgaacttgctgtgactattagccatgaaggacccagtcgtctgttgatacttatttttgagataggtttgcttgactaatttgttgttcacgtaaagtttaccggaacttgtgtagcggaccgtatccccaggcatcccaatgacccgcttaacataaacggcgtttttgtcggtttggttcggatcgagtccgtaggcgttgaagacgacgacagaacctgctttgattttgctagtcttaaaagctacgacgcgttcgttattttgtaaattcggttgcatcgaagtcccatcgactttgaccatagtaaaccagaactgacgaatcagtaaggcgatgatcaagccaatcgcaatcgggaccacccagctcataatgcttttaaatgttttcaatggttaaaactcccttaattgtgtgtatacctctcattataaacgataatgattttttcgcagtataaaaaagcttaaaagttcaacgatactcaaaatgggggcggttgctttcgagaatgcgtgttcatggtgataattgcgtgctatgctggtgaaagtaaaatgcgattgatgggaggaactgggagtatgaaaacacagaaagaacgaatgctggcgggtgagttgtacgttgctgatgatccagaattaggacgtgaaaatcatcgtgccaaacggttagtacgggaatttaatcaaacaaccgaagcccaaccagaagaacggcaacgattgttaacggcaatgttcaacaaaattggtgacgggggctatatcgaaccgccatttcataccgactatggaagcaacacgacaattggcaagcacttttacgccaattacgatgcgatttttattgatgtgggtcggattacgattggggacaacgtctttatggggccgcgggtcggcttatatacggcgggtcaccccattgacgccgccattcgtgctgaacaactcgaatatggttggccaattacgattggacacgatgtttggtttgggggcaacgtggtcgttaatccgggtgtcacgattgggagtaatgtcgtgattgggtctggttccgtggttactcatgatatcccggataacgtggttgcggtcggcaatccttgccatgtcttacgagaaatcaccaccgctgaccatgaatattgggctcggcaacgggccgcctattttgctgatcgtgatgatgattgatagaaattaattgtactgtgttcatgtcattaaagtttggattagaaataaggccgcgatatttttaataatagacattacaccccctcagccttaaaattaacttagaaacaggataagaaagaggcggtaagtgcaatgctaaaagatgatcagatcgtgtgggcaattcaccaaatggaagcagacatcggaccagtgggaccttccctggactcgcggacgccgtttcagtatttgatttcagtaattctgagcgctcaggcgaccgacgtctcggttaacaaggtgacgccggtactgtttgagaagtatccagaaccaaaggacttgatggctgccgatgttgcggatgtggaagcaattatcaagagcgtcggattatttcataataaggctcgcaacatcattaaaacggcgcgcattgtccatgaagaattagccgatgtcgtgcctaccgatcgtaaaggcatcatggcgttaccaggtgcgggccgcaaaactgccaacgtggtattgagtgacgtttttgaacaaccgacgtttgctgtcgatacacacgtctcggcaatctcgaaacgcttgcactttgtcgctcagaccgcgacgccgttacaagttgaacaaaaaatcgtgagtgtgttggcaccggcagaattacatcaagcccatcacacgatgattgaatatgggcggaagtattcgatgaagttgacgccagacaaagaagtttgtcaattgatcattgactgtgacaagttgaatgaggaaaatgaagcgttgatctagtagcgtggggcgacagcgagcatattttagccattggtagaactgcctgtaagtcttgctagacgtgtaatcaaagccaggttacgctaaacaacctcttttccgacaggccgaagttggctgcccttgatcttaactggcagtcctatttttaacataatacgtactgatgcgagcattaagacgagtggtggtcttgatgttcgcgttttttagtttgttcacggtcgtgtttttcgatgcgtctgaaaaataggctattcagaaagtaagtaaaaccgaacataaaaacaattagcattaaaacagtcgcaatggcttgggcaatcatagttggacctcctcggataacgggtgataacactggaattatcagtgtcagtgactgttgtcattgtacgggcaatgcgaggcaaaatgcaagcggtggcttaaatgctaaccgtgaatcttgaaaatacggtatgataatagtaaccgattacatataggaggctaaattatggcatacatcgaagtgcagcaggcaacgcgccagtttaaaaatggtgagcaggtcaccgttgctaatcgtgatatttcatttgaagttgaccagggtgcggtcgttgtgattttaggtccgagtggtgcgggtaagtccacgttactcaatattttaggtggcatggacagccctacgagcggccgtgtgctggtggatggtgtggacattgcgcaatttaactcacggcaattaacgacctatcgtcggcaagcggtcgggttcgtttttcaattctacaacctggttccgaacttgacggcgcgtgaaaacgtcgagttggcgtcgcaaatcaccaaggacgcacgcgacgttgatgagacgttggccttggtaggactgacgcaccgggcagataactttccagcccagttgtccggtggtgaacaacagcgggtcgcaattgcgcgggcagttgcgaagaatcccaaattattactctgtgatgaacccactggcgcgctcgactatcagacggggaagcaagtcttacaggtgattcaagatgcggctaagcagacgcagacaacggtcatcattgtgacgcataatagtgcgattgcgcagctgggtgaccaagtcattcgtatcaatgatgctcaagtgcagtcggttgagcataatgctcatccaacgcctttggctgagattgaatggtaggtgcagcgatgacagcagcttattttaaaacaattatgcgtgagatttggtcgtcgaaagcccgttttgcttcaatattactgatcattttcttaggggttgctttttatacgggaattcgggcgaccggtccggatatgtcacaggcagctaatgattattatgcgaagcaaaagctggcgaccaatagtgtccagtcgacaatggggctgactaaggccgatacacgagtactgaatcaacaccgctcacagctcacttaccaagcgacacgctacgctgatgttaatcagttgaacaatagtcaagtcgtgcgggtgatggcgttaccgacaacccaacgactgaatcggttacggatcgttaagggacggttaccgcggcatgccaatgagatcgtgttagacgcgcaagcacagcgattgcagccgaagctaaaagtcggttcaacgtatcgaattagcagtacggctaagcgcaatgcacagttcacgcggcgaacattcaaggtcgtggggtttgtcaattcaccaacgtatgttgaaaatacgaatcgtggtgtcaccaacattggtaaagggactttggactacttggtctatgtccgtccgcaggtgattaagtccagtgtgataacgcgcattgacgtgcaattcaaaaatttgcggggcgtcaccccctacacggcgaagtatcggcgcttgaatcgcgagaacaccgcgcaactcaaacgctggttaaaaccacaagcgcgtaagcggcagcaggcattacaagcccaggcccaggctaagctgaaaccattgcggcaggcgacccagcaacttgctagtcaagtgccagcgggaacggcacaactagtcaagttacaaagccaattaaaacgcgcgcagtcccaggtcgcggccatcacaatgccgacttatttgtacactgaccgtacggataatccgggttacacagaatatcacgaaaatacgcaacgagtcgtggcactgtcgactgtctttccgctgttctttattgcgattgccgcgttaatttgtctaacgacgatgacgcggatggttgaagaattgcggctacagatggggacgttaaaggccctcgggtatacgaataccgcggtcggtagcgagtttatgatttatggtggtttagccgcgctgattgggaccgcgctaggtgtcctgttcggcgtcaattttttcccgcggtttatcgcgcaggcctatggtagtatgtataatttgcccgcaatcaacgttcaatacatttggatggacattggtatcgccttagccattgcgttgttgtgcacgttggggacggcactggtcgtgctccgcgtggatttaaacagtttacccgcgcaactcttacagccacgagcacctaaggccggtaagactttgctattagaacgctggcaatggctatggcatcggctgagttttaatcataaaatcacacttcgtaatctatttcggtataagcaacggttgctgatgaccgtgctcggtattgcgggctgcatggcaatgatgattacggggtttggcttaaaggattccattggtgatattagcgtcaagcaatttaacgagttgtggcactacgatgcagtggtgacgcgtagtgggaacgaaacggaccaacaacggcaagcacttagtcgtggtcaactttaccaggctagtttgaaattacaggccaagcaggtgacggtcaaacagtccggggtagcagaacagacggctacgctcggtatcccagcaccccaccaatcgctaagcaagttcgtggtattacggcaccgacaaagtcatcaggccattcatatcggtaatcgcggtgcggtcatcgatgaaaaattagctaagttatatggcgttcatgcgggcgatgatttaacaatcaagttggccgggcaaaccaccaagcggattcacatcagtgcggtggctgaaaattacgtcaatcactttatctatatgagtccgacttattatcgacgtgtcttcaagcaggcaccagtatataacacgaactatgtccggtttaagcaggcaacgaaaaagcaagaaaatgcttatgcggatcggctattgaaacaggcgggggttcagaacgtgacactgatgagtacagagaaagccactaattttaaaatgctggatagcatgaacttagtcgtattgatctttgtcatctcggcgggggcactagcgctagtagtgctctataacttaacgaatattaatgtttctgaacggatccgggaattgtcgacaatcaaagtgttgggcttttacgatggtgaagtgacgatgtatattttccgtgaaaatctgatattgacggttttaggcattattgccggttgtttcttgggcaactggttgcacgcatatatcttgcaaacggctgaaacgaacgcgttaatgttttcaccaacgattcatccgttgagttacgtttacgcggcattattgaccctggcctttagtttattagtcatgggaatgatgcatcgtaagttaaagcgagtcaatatgctggatgcactgaaatctgtcgattaaacgtgtctgacaacggccaacggtagccgaagtggtataattaaattgattggaacagtttaattaaggatgactaggggatgaatggcatggcagaaacggcacagttagaagctgctgtacaggcattaagcgatattgtaaaaatgaatacggtaaataaccatgagcaattggtggcggattatttggtcacacttttaaagcaacatggtattgaagcacaatcaatcgagtacgctcccgggcgggtgaacttggtggccgaaattggtgatggtcacggtccagtcgtcgcgttggatggtcatgaagatacggtggcgttgggtgatgcagataaatggcacacggacccgttggcagcaactatcaaagataatcggttgtatggtcgcggtgtgacggacatgaaggttggactaatggctgaagttttcgcgatgattgcattgcacgatcaagacgtcccactccatggcacggtgcggttactcgcaactgtgggagaagaagtcgaccatttaggtgctgaacaattgacggaactcggttacgccgatgatattcaaacgttgatctgtgcggaaccaagcggtgcggacaaacagcttttactgaccaagtcgattcaagccatgttaggtgttgacgacgatacggcgcaacggatggcggatgcgaatccgacgaccgaacaacacttcatcgaattagcgcataagggttcactgacttatacgattaaagcgcaaggggtggcggcccacagttcgatgccagcgattggtcaaaacgccatcgatatgttgatgacttactatcagaaacaaaccgcctattttgacagtttcaagactatcgttaatcccgtattgggcccaaccgtacctgtcgtgacgttaattagtggtggcgaacaggtcaacaccgtcccagccagtgccgaaatgtcagtaaaaattcggacgattccagaattacggaatgaccgcttgattaatgatttggaagccatcattgctgaatgcaatgcggatggtgccaatctaacgatggacatcgcaagttcgttctacccagtgcatacgccggaagatagccagttggtccagttggcgaagaaggttggggaacaagtcttacaacagcggctcccgtactttggtgctcctggtgggacggacgcatcgtcttatattgtaaagagtcctgatatgcaagtgatcgtcttcggacccggcaatattacagcgcaccaagttaatgaatatgttgatttggatatgtatgggcgcttcatcgagatttatcaaaaaatgattacggaattgctggcttaacggaaacgttaataatcgtgaattaaattatgctggaaaaggtttcaaaaaaagtaatagtcgtttcaagaattgattcttgaaatgactattacttttttgagcaaggcgactgaacctcggtgtatctaacttaataatgattgtggtgacggttgtgcgttattcaggttattcgtgatgcccaaaccgttgcaagtaactcgaaaaatcttcgtgatcctgggtaataccagcttccttttcttcataccaattaattttgtcgttgagaatctgtagatgatgctggacttcgttgaactggacgagaaagtcttctttaacgtgcttgagcagtgctaatcgcttgggaatcgtgtcgtcgccggctgcgcgccaggtaacgtattgctgcaattcgctaatactcatacccgttcctttaagatgtaataagaatttgacccagttaatatcggcagtctcataatagcgccggccattgtctaagcgatgtggttcaatcaagcccgctttttcgtagtagcgtagtgtgggggcgctgagaccaacggctttagcgaagtcaccgattgaataacgttctgtagtagtccttaccaattttaaaattctccttattctaacttttatttgaagtaactttagcaataacaataccacgaaatcctattttagcaagtttaaactttattgttgacttaaagtgtactttaagttgtaagctgtattcatcaatcagttagcaagcaaataattaaggagtgtttttaatatgacaacaactaataatagcggcctatttggattaggtgtaaagaatgaggcctaccaacaatactttatcggtcaaagttacctgaatgccttagccggtgatgagcaggtcgacgtgaatgtttccaacgtgacgtttgaacccggctgtcggaataattggcatatccatcataacggataccaaatcttattggtgacgagtggtgaaggttggtatcaagaggctggtaagccagcccagttattacatcccggcgacgtggtcacaattcatcctggtgtgaagcattggcatggtgcaacaaaggatagttggtttgcccacatcgcgattactaagggaactagcgaatggctcgaaccagttgacgatgaagcgtacgcaaaattataaaagttaaagcagttattgaaggaggaaactaatatgacagttaaacaaaccgcaggacgcgacaatttaggcaaattagcaccacaatttgccgcgttaaatgatgatgtgttatttggtgaagtctggtcacgcgaaagcgcactaagtttacatgatcggagcatgattacgattgcatgcttaatgactagtggtgattttccacaattaaaggcgcattttaagatgggcaaggatcatggtatctcaaaggatgaagccgttgaaatcgttacccacttggctttctatgcggggtggcctaaggcgtggtcagcactggcgctgattaaagaagtttacggtgaataggaggaatagttagatgacagttaaaaacaaagtcgttgtgattacgggggcctcgtccggaattggggcgacgaccgctaagcaattagccagtaatggtgctaaagtcgtattgggcgcacggcgtgaagaacgcctggccgctttagttgatgaaatcaaggcagccggtggacaagcggcctatcaggtgacggatgtaacgaagtcggccgatgtacaagcactggttaagctagcgcaaacgcaattcggtgggtttgacgtgattttcaataatgctgggattatgccgacatcgccaatcagtgccttgcacacggatgaatgggaccagatgattgatattaacatcaaaggcgtcttgaacggggtggcagcggtcatgccaatctttaccgctcaaaaatcgggtcagattattacgacatcgtcagtggctgggattaagtcctttgctggctccggcgtgtacggtgctacgaagtttgcggttcgtaatttgatggaagtcattcggatggaaagtgcccaagaaggtaccaatattcgaacggtcagcttatatccagcggccatcaatacggaattattgcacacgattacggataagacggccaaacagaatatgactgatttttatcaacaagtgggaatcagtccagcagccgttgcgaacgtggttaactttgccattgaccaaccagaagatgttaacgttaatgaatttacgatttatccgacgaagcaggcttaacttgatttagctgttgttaacggttgtttgagctagttgccgataagtcgaaaatgtgaattcaaaaaatacaagcacccggtctagcgcataatggcgttgctagaccgggtgcttgctgttgttatattgtattaataatattcaattagtgggcttacttcaaccgtaagccacgctttaagttgccccagaaaccgagttcatccgtttgtaacattagcccaccatagattcggccgatgtagatcatacttccaatgattgttgcaatgagaatcaggagtgacacgattgcagcgggcatcgttgccatgccgttaatgaggcgcaatggcatgaagtatgatgagaagaacggaatatatgagaaaatcttaacgaagagattggtgggtgtgttctgaaaggctagggccatgaaaaacgctagcatactcagatagatgaccggttgtgctgccttgctagcatccgcgacccgggtcaccaaagcaccacagaaggccgacgctacggtgtagagtagtacggccagtaatgcaaacaacaagttgattgagaccaagttgtgaatcacttgattgatcaaatcggtattctgttgccaaaaatcaattgtgagtgagctacgtttaacgaattgcatgacggcaaagccacccactaagtagacgagcagctgagtcacaatgactagtaagacaccgtaaattttaccattgaagtatttccgcggtgtcgtactcgagaagatgacttccataatcttggtgcctttgtctgcggcaatctcttgtgctgtgattgctgaataagtggtcaaaatcaagtagacaaagaagacgacaatatagaaggagaccgttttagccgttttatctgaagcagcgtgcttctgtaattgttcagtaaattttggctgtacagccaacgcctgggtctgtttggcacttagttgtgcgcgctgtacgttacgttggctttgggcagtggctaagaactgctgaatcttagccttgtcaccgctgctgacagcattaggaccagtgaactgcgcttgcaactgttgatttttggttgttaaaacgaggtagccggcgatgtcattgcgcttcgtcgccgccttagcgctggcgagtgtttggtatttattagcggtagccacatgactctgcttaatgaaacttgtgcgtaattgtgggctagtgctaacgaccgcgatgtcattcttactagcgctgggtgcagcaaaataagaaaaggcggccacgaacccgaagaacaagaagggcataaagacgagtgacaaaaagctccaggacttgatctgccgcaagtaggtttcaaaagtcacaatccaagtcttattcatggttaacacctcccgcttcagttcggaaaatctcatccagcgttggtggctgctgactgaactcttcaatgtaatgaccagcagtgacttgatcaaaaatcgctgggccaactgaagcatctgcaagttcgagtcggaatcgctgggcaccttgttgagtaacgttggtgactcctggtagatcggccagttgcgcttgtgaccagtcagtcgtcaagaagagacgggtacggccaaactgggcgcgaacgtcttcaacggtacccttaaggactgcttcaccattacgtagcataacgagtgagtcacagatcgcttcgacattactcatatcatgactggaaaaaataatcgcggcgccccgttgcttagcatctaaaatagcttgcttgagcaggtcggcgttgaccgggtccaaaccactgaatggttcgtccaagataatcagtttgggatcatgaattaaagtacaaatcagctggaccttttgttggtttcctttagataacttatcaatcttatcggtcggctgccccttgaccgcaaagcgcttcatccatgcggcaattttgcccttggtcacccgtgccggctgatttttcaaacgggccaagtacacgatttgttgtgtgatggttaatttggacattaggctacgttcttcgggtaagtagccgatttgatcgtagtcatcagcggtcaacggttgcccattccaagtaatttgaccgtcgaatgatagaaaatttaagatgctgtgaaacgtggttgatttccccgcgccattttgaccaatcaatcccatgatttccccgtcatggacgtcaaatgacacgtcatttaatgcttgaacagtcccgaaacgcttctgaatatgtgcgatggatagcattagtttgtcccccaaattcttgaaataaagtcattacgtgttgtgcgagctgattagtcatgaaataggatcaaaacgtgccaagtttagattgttattcgtcagccggtgtgcgttctatgccgacctccggggctgggtgacaattgctggaacgtagccgacgtcgatttgagctaacgcccaacccgcgtcatctcaaatacgagtcttattctaagccggaagcaacccacttccagctaagaataatttggctactgagcattgtcacccagcccctccagtcgggaacccgctcgaatggctgatgaacggctacttaacttggtgaaatttgtcgttggctattttgatacgggaactttaaataaaacatcagggtgcataacctactttgtcgcaacattcaattttgactacagcggcttaagatgttgagctattccaatatcattttcagtctgatagttgctgagagaaattactatttatgaaaaacaatgacgaattcaccaaaagttgggtccgcacatgtccgccattcgaacactgtcccgactggaaggcgtttcggccaatgctcagcggtgaaattccacttagcaagcgtccttggcttggttagtggaagaccagtatttaagacgtggtcttcggcttaaatctgtgtccaccgcgttccagcaattggccgaaatgcctggaagtcggcataggacgcgccaactaagtaattttacgttaactcgaactttttccagcgggcctaagctggctgcttttgaacttacacaacttggcacgttttaatcctaattaggcctaataactattggcacaattagcaatcattgtttgattttatgatgacatagttgattcggtgtgacaagggcgtgcgcttggttctaaatgaagcttatttgggcaagcgggcgttttcaagagctaatagggcgcgtttcattggcaaaccaccacgatagccgccaagttgaccgtctttgcggcggatacgatggcaggggatcacaataaggagtggatttttaccaacggcgctggcgacagctcggactgcggtagggtgattgatcattgtggcgagttgtgaataagttgcagtttgaccgtatggaatacgggttaaagcttgccaaacttggtgttgtaaaggggtgcccgtcgtttggtcgaggggtatgtcaaaatgctggcgttgaccagttaggtaatcatgtaattcttgacaggcctgttgattagcttgttgatcataatgaatattagcggatttgaagaaggcttgccattcgtcgcgtggaccgttggcacggccgacaaaggctaagccggtgggcgttgtgcccagccagtaagtttgctggttaatggttgtttgggtcaatgttaagtgcatgtgtgagccctccgtctcaattaggatagcgttagtataacagaattggtggtgtgacgacctgattaaatcagaacatcactgctatatcttaatgaaaaaagccagtgcgaacgatgagtcgtccgcgctggctttgatgtcaatgataaagcttgaatttgataattgcagatgctgattagtaccagccgtttgcttgccagaacgctttagcagcagtccatgagccgtaacggccagcgacgtatgcgtcggcagtcgcttcttggttggcggcagaataatcgccatttaagagggattgaccaagttgatatttaccatagtaaataccgttggttacggtgtaggagccaccagattcgcgagcagcaatccaggccttggcagcagcctcagatgtactagtcgagctggttgtcgtgcttgttgttgaactggccgtgcttgagctagcttgactggcagttgtgctgctagtacttgcactactagttgcggctgaactagcggtggtcgtcgtgctttgactggttaccgttgtactttgactagccgcactttttactgaactagcactggcttgactagtactgctttggctagcggccgacgttgcactctggctcgtcgtactagtgactgaactagcactggcttgactagtactactttggctagtggccgacgttgcactctggctcgtcgtactagtgactgaactagcactagcttgactagtactgctttggctaacggccgacgtcgcgctttggctcgttgcactggtaactgagctggcgctgttttgactcgtgctgctctggctaacggctgatgtgctgctttgactggctgcactggtaactgagctggcactggcttgactcgctgtgctttgactaaccgttgacgtggcggtaacggtgctagtaggattttgaacggcggcactagttgttgtagtcgtcgtgcttggcgtggctactgaggtggtggcccgtgtcattttaactgtctggtgtttgttaacttgtagtttgtccccgacgtagattaagttgacgttcttcaaatggttcaacttttgaacggcggcaacggttgttttgtgagtgtctgcgatttcactgacagtgtcaccagccttgaccgtcaccgtatcggccttagcagcagttgcaccaagggcaatggcaccagttgttgctaatgaggataataataggtgtttaattttcatataattgattcactcccaaactagattagacttcccttaaagtttaccatcatgtaagcggttcgttaagcgcaatttgcttactgacggactttttagaaaataaaacatgcccgattaagacatagtgtaacagattaacgcttacattaccgctaatttgcaatgcaatcttagtgacgagtgtgtcaatgtagtgacctgcgtaacgtgattacgttgacggtggggggcatggtagaattggacttttgaaaagccctcccaaattgactgcggcttgcacgtgttcgactttaccagcagaccatttgcatagtggttgatgaaggactgcaataagggccgatcatggggggattgccagtttgcagtcaggcaagtccgatgcacctatatggcaacagaaaaacgcggcccccatataggaccgcgctgattgtatgttcagttgtgcatgaatgtgtttagtaataaccgttggcttcccagaaggccttggccgctacccatgaaccgtagcgtgaagccacgtattcgtcagcgacggtttcctgattagaagctgagtagtcaccgtttagaagtgacttgctgagttgatacttaccataatagttcccgttagatgcggtataggagccaccggattccttgttggcaatccaggcttttgcggcagcttcagcactacttgatgtgctagttgttgatgaactgctgctagtgctcgttgtggtgctgcttgaagtggtagcactattgctggctgccgtacttgtgctggcggcactggaagcagtggtgttgctcaacttcgtcatagatgcggaagtagcggttgaacttgacgccgtgctagcttggctcgttgcagagcttgaagtggcactgctagttgacgaactggcggcactgcttgaagcagcactgctggttgatgaactggtggcactacttgaggccgcgctggcggttgacgtgctggtcacgctacttgaagcagcacttgtgcttgatgagctggcagcactacttgaggcgacacttgtcgttgacgaactggtagccgtgctagctgctgacgtacttgtactgctgctaacggctgcgctgctggcactttgggtgctagtactgttggccgttgaactggcagtactggtcgaactagccgtacttgaagcagcactagttggtacttgggtagtaaccgtggttgcgtggtgtttgccgttgacttccagtttgtcaccgatatagatcaagttaacgttctttaaatggttggctttttgaatcgctttgatggtcgtcttatgcgttaaagcaatttcactgacagtatcgccagctttaacgacaacggtatcggcattagcaacggtagtacctaaagctaacagaccggtagctgccaatgaagttaatagggcatttttaattttcataagttaatcagtcactcctataaaagttgtgttgttatttcgattgaatggtgattagtataccgaccgcagattgcaaagcaataaataacagattacggtttgagccaattttgtaataaagtaacatggtgtaacaagttaacactttcatcatgttttcgccacattatcatcacactcgcggtaaaattcagaaggtaacttaaaaaatggtttaaagctgtgagcgatattcttattaattcagtaaaatttgttataatcgagaccgttaagcagaacgtcgtgtaagggagcgagtaataatgtattattttgtgaataccagcattaacccgaaaaaatcgggaattgaacatgctgagatgaaacggctggcactttttaaccagcatcacgttcctgctaagatggtcacgcgatttttttcattatcgttacaccagacactgacagcagcggggattgcggctgaaaatcaaattaatctgtttgatttcattcagcattccagtgaacggccaacgactaagatgacgattgaagacctgcatctagcaccggacttgcgggtgcaacccgttgggcgtcattatgaagtttatcaaaatgaccaattattaatgaaggtcaatacatttctgaacactcaaaaacaactgaacaatgtccaatattatgatcaaaatggtaagttagtgaagaccgattggtacgatacccggggatttaaagggcttgaacagttctatgccgctgatggacaagtagcaagtgaacaagtctttaatccggacggggaggtcgtctatcagacatttcatatggcagatcgacaaaatcaggtccaaaattcactttatcgattcattaattatgaggggcaagactggtcatttgctggtgaaacggcaatgacaacctttttcctcgatgaacttaatcggaggacgccgcatgcggtctttgtcattgatcggacgtatgagttggcttacgccgcacttcacatgcgaactaaagcgtttaaagtcatgcacttacacagtaatcacgttaatgatccagcacatccgaagacggctagtctcaactttaattatgcttacgcgctcaataacctagaccgatggaatggcgttattgcgtcgactaagcaacaaactgctgactttcaagcccgctttggcaatcaacccgccgtttatacgattccagttgggattgtcgatgacgcgactttgaatgcgcccaagccatcttttgatcagcgcaccgcaggcaagattatttttgtggcgcgtttagccgaagaaaagcaacaagatcaggtgatccgggcattcaaaaaggtattggcccaagtgccgaatgcgacccttgatttctggggctatgcaaatggagataccggcaaacaactgcatcaacttgtggaacagctgggactgaaagcggcagttacgtttaatgattatacgaccgatttaacagctgtctataatgatgcgcagttggcgatgttaacgtcgcgggcagaaggttttgcacttgccttgcttgaaggtcaggcccacggggtgccccagattgcctatgatgtcaaatatgggccacgtgatattattcgggacggtcacgatggtcaattggtgccggtcaatgatgaaaatgcgttggctacggcgatgatcgacttgttaacgcagccgaaaaagttagccatgtatagtcaacaggcttatcaagatgcccaacgctttagcacaacggctgtttggcaacagtggcaaccactcatgaaagccgcagccgatttttatcaagttgagggggcaacacagcgatgaatttttttgtgaaccaatatttaatggcgttaaattctggtgtggaacatgccgaatttaaacggctccagttgtttaaagatcatcaggcaccggctaaactagtaacgcgtcaattcgatggtttgttacatcagaatatgcggcgcttcaatattgccgatgatcagatggccaacttgtttgacttttttcgtgaaacgaccagcttttccagtcgggtcatcaagatggctgatttgaactggccaactgcctatgacattaagccggaccccaatgtcagtgaggtacgagctggtgatcggctggttgctaaggtccactttgttcccagcacggtggggcacgtgtacttcattgaaatttttgatcacttcaataatcttgttcagcgtactgattatgatgaacggggctttaaagcccgtgatgaattcttctcgtcagccggggaaccaatcacggatattttctatcgaccagatggtagtcggatggccgaacagtattatgcgcatgataataatgggactaattatgtttcgttgtgccatcttatcaattatcatggccgtgactactactttaatggtgaacaagaatggtaccggttcttcttagatgaactgaacaagcaatatgatgaaaacaacgtctttattgcggatcggccgttagctgctcagtggccggtggtgaacatgcagacggcggctaaaaaatatttgtggttacccacgccacatgcagtcgatccgcgtgatcaagtctattctaatttgaataacgcgtatgtttatggcctgcacgagtttctgagtgcttgggacggtgtgattacgagtaccgaacaacagaagcaagatttgacgcagtggctcggtggtcaaccgagtgtcccaatcctgacgatttcagcagccattgtttccaaaaagcacgctcaacacgcaccaatttcgatcagtgaacgtcatgcgcatgaaattatttataccggccgtttggatgcggaacggcgcgtcgatcagctagtgacagcttttgaccaagtgcaccataagattacggatgcgaccttagtgatttacgggtatggtggtgagcttgaccgtctaaaacagcaagtgtcccagttgcacctagagaccgccgtgacttttgctgggtatcaaccgaacttaacaatggcttatgatcaggccggtgcttacgtttatactggtgaaagtgatgcgcagccattatcgttaattgaagcccttagtcatggtgtgccagcaattgcttatgatattaactatggccctaaggatgttttgaaggatggcaagaatggttatctggtcacggatggtgccgtcaaccaactagtcagagcgctgacccgaacacttgaaagtccgcaacgtcagcaacgacttagcaagggggcctatcggagtagtgaacaatatagtgatgaacaagtttggcaacagtggcagccggttgttcagtgaatatcaaaaatggtctgactttagtggtcagaccattttttaaacgctaatgtcaaaaagacctaataacaacggcggggatcgctaatctgaccacgttgttaggtactgggtaattgcagtctgtacggggcgcagtgccgctgccggttgcgtgttagtcagtaaaaagaattggcgttggtaatgagcacttagctgttcgatgggaatctcgttgcttaaaacgtgacgtgaaataattgtttggccgataccatgagcgaggaggtccgcgatgatttggttactgtggatgaccatgacttgtgctggctgaatgttgcgggcttttaaaaaggcgttggtataatgacgcacaccggaattaggttcacgtagcagccagaggggactggcaaagtcgcccgcatggacgagctcatcgtgaccaaatggcaagcgattgagctggtcagtaacgagtggcttttcaactaaaccaaagtccagtttgtgttgggacatagcggtcaaaatttcggccgaattggcaagcgtcacttgaaagtcaaagcgatcactgacggcactcaaattggctaataaagtgggtagaatcagacgcccggttgtgtgtgaggcaccaatccggcaaggaactttcactaagtggcgtggtgattgcaccgctgttttggtagcggcccaagttgttaacagcttttgagcctgttgatagaggagctgaccactggcagtaggaacgatttcttggcgcccgttacgtgttaagagcgtggtttgtaaatcggcttcaagttgtttgatttgtgttgagacggtcggctgggaaataaaaagttgctcggcggcatgggagaagttgcgagtttcgtataccgcacagaacgtttccaattgtttaaacattgtgttcacccctaactattatttttattaatagtaactatcataatgatttatttctcaaatgtaaataactttcgtatacttaaaagcatcgagatagagatgggagaaagcgaatgaaggtcaaagggattttaccggggttagtgaccagtctggtcattgcaattattagtcaaggattggcgcaatttgtgccagcgttaggtgcggctactatcgcgattctattaggaatcattggtggcaatacgtttctgaaacaaccgcaacttggtcgggggactaagttcgcagaaagtaagctgttggaatattccgtgatgttgctcggtgcgacgatgacggtacagacaatcggcaaaattggtgggttcggcgtgctctttattctttgccaaatgacgattacgatcgttggggctttgtggttagggcgtaagctgggtttcagccagtcggtacgtatgctgatggccggcggtaacgccgtgtgtgggtcgtcggcgattgcatcaatcgcacccgttattgacgcggatgaagatgataaggggactgtcatcaccttagttaacttgatggggacagtgctgatgttaacgttaccggtcttaggaatggccgtgtttggtggcagtgtcattcttaaaggggcgttgattgggggaactttacaatcagttgggcaggtggtggccgcagctagtatggttaatcaaacaacggttcaatttgcaactattttcaaaattatgcggattatgatgctagtcgtcgttgttttgatttttggccggttacaccaacgcacgattgaaaatgaattggctgaggatgctgtcgtcagtggtaatgggaacggtcattggttaccatggtacgtggctgggttcttaatcttatgtgcattgaatagcttgatttcgttaccagcaattattggcgcaacggctcatacaattagtagttggtttgaaatcattgcgttagcagctatcgggttacgtttgaatcttgttaactttatgaaagctggcaagcgcttagcactgtatggcttaggcgtggggacgattcaggtcgtcagcgccttgattttaattacgttattactacaacattaattgaattttgagacacttaaatcgcaatcagggttaatcatttaattaatcatgattgcgatttttcatctaagagagtaggaatgttcatgctaacttatcgagtcacaccagcgattgaattgcgagaaccactaccccaaagcgatgcgccggcattactagcattattaacagctaatcgtgcgcagtatcagtattatttgctatgggtggctaaaattcaaacggtggcggataaacaacgctttttaaccgcggcacagcttcagttacaatggtcgcaagcgctcaacctagtcattgtcgttgaacaacgggttgcggggatggttagctgtgaccacttcgatgataacgaccacagtgccaacatcggctattggttgggacgaccatttcagggacgcggcgtcatgacggcagccgtccgtggcgtttgtgacttgggttttaatcagtatcatcggcaatgtttgcggattcgtgtggcggtggacaatcaggcaagcaatgcggtggcgcaacgggcgggctttgactttttgattcagcatccaggtggtcagcacttattggatggcgatcatgatgagaatgtgtatcaggtttcagcggttgattggctggcgaagcgccacaagtgatgacgattaaacaaaataaaactgactagccaagatggttagtcagttttattaacgtctaatttttaactgtcaccacttgccatgttttaggaattgtaaacaaatattgtcgttgaacaatttttgtcttggtatttcctaggctgaataacacgtgtgtcaggtgatttttgaactgccaagtcgtggtctttagttgaacctgcgcgggtgaaccgctagtcagtttagttgttgtggtggttgcggtcaccgtgtgactgactttagtggcggctgcaacccggtaactgatgacacgttcagaccctgttccgagttgctggacccgcaacgctacttgtttggatttgagcggggctaagtcttgaatctgcgtgcgggtgacctcgtgcatgccccaatggtaattgtcgtttaggacgagggtgatgaggctagtggcaataatgaggccactaatgataatggcaatgagacggttgcggcctgccggtgaaaaaatcatcgtgccagcaaagacaaaggttgccagaattagtaagacaatgatcatgcggcatcatcctcctgactaatggtttttgaatgattggcttttaagaagaaggtaatcccaaagccaatcgcacaaaaaatgagtgagacaacgaacgccacgtgataaccagttaaggttgcggtgattccgtcctgacggtatttcaagggtgcctgtgtcagtaattgatgtcccggcatttgccacttagcgacgctggagtagacactgattaaaacggccgtccccattgaagctgcgacttgacgcagggtgttgttggcggcggtcccatgggaaatcaaccggaaaggtaacgcattgatcccagtcgttgtgacgggcatggtaaccatggtcaggccaaacatccgaatggcgtaaacaacgatgatccataagattggggtcgtggcactaattgataggaagaaagcagttcctagcgttaggagtaacatccccgtcattgctagtctgcgggcaccgatatggtcaaagatgcgaccagtaatggggctcataatccccatcatgattgcgccaggtaataaaatcaatccagagtccattgctgaacgaccgaggaccgtttgaatatacattggcaaaatcatttcgacgcccatcatagccatgtaagcgagggcagtcaggattgcggatagggtgaaagccggaatcttaaagacacgtaattccaataatggctgatccatgtgaagttgccgccagacgaatagaccaatgaaaatcagaccaatgactaaagttgtgagaacgactgggtcgccccaaccagcattaccaacggatgaaaaaccgtataacatactgccaaaaccaattgttgagatcaagactgaccaccaatcaattggttgtttggaagttggtaagactttccgcaaagtgaagaatgaaacgatgatgactaggatattgattggcaggatgaataagaagagtgcccgccaggaatagttatcaataatccagccagagagtgtcggtccgatggcgggtgctaagccaataacaatgccggctgtccccattgcggaaccccgtttttcgggtggataaactgaagacatgattgtttgaaacactggggcggaaatcccgacgcccattgcttgaatcattcgggcaatcagcaacatctgaaagttgacggcaaagtacgccagcgtagttcccagaccaaaaataagcatggctgttaagtacaaatacttggaattgattcgggtcagcaaccaggcactgacgggaatcataattcccatgattaacatgaaaccagtggtcaaccactgaacggcggttgctgaaatatgaaaatcggccattaacgttggaaaagctgttgttaatagtgtttgggtaatgaaggtggtgaacgtcccgacaagtaaagtcaatacaagccaagtccggtgatagggctggccgttggcatcaagcggcaacgttgaattttgagttggcataataccgtcctttcttttataaattctgtaataatgcacaatcaataagtatatcacgatgcaagtcctaggcctattaattggtaccggggcggtctgctgagtgttcggtgtcgtggtaaaataaaatagataatattagttaatttgtggtgagtcgtgctaatgatagccagcacaattcatcgacattcagtaaggaagctaaaaaatatgaccaaaaaatatttaacatttgattgttacgggacgctaattaatactgagccgctgtatcaatgggtggctaatttaggattggcgattggtttagacccactaacggttcgcaaagcctacgcgacttatgaggacgatcctgccagtgtcaatccttatctagattattcaacattagtccgggctgatcttaagcatttagatcgattgtttgaacagaaacacttctttgaaagtcattacgttgaatgcttggaagtgcaacgacacctattaccatacgccgatgttataccgaccttaatagcctggcagcaattgggctatcaattgattattatgtcgaattcttcctgggatattatgccggccaacattgctgctttaaaggtgtcgttcacagcggttgttacggctgaagacgttcaagcttacaaaccagcgtcagctttctttgaaacggttcaagagcgttttaagttaacggcagataatcattggcatattgcacgtggctatgaatccgatgttgttccagccagtgctatgcagtggccgatgatttggattaatcgtgatcagcgacaaccgactagttctgaacggccgacccatatggttactgatttggccgctgctaagcagtgggttaactaggcgtgcgcggtagtgtccccgttgatcaacagttaaaacactggttgatcatcagggttgaacaagctttctaattttgactaagctgttaaatctcaaaattggaaaggaaattaacgtgaattcaaaatctttaaataaaagtacggtcctattaatggcgatctccgcagccattgtagtggctaatattaattatattcaaccgattgaggcggacattgcgcaacaatttaatctcccaaacgccgttattggcgcggtggcaatgctgacgcagttaggctatgccttcgggttgctcttaattgtacccatgggtgatatcatgaatcgccgaatgttgattatgcgcttactggtactcgcaatcatttcagcgttactagccttcgtggctcccaatatttgggtgtacgccttggcaagcttactgattgggataacctcggtggcaccacaagttattattccgtacgccggctttctcgcacctcgtaatcagcgtggtcaagtcttgggcaacgtcctgagtggcttgctcgtgggggttctcttgtcacgaactgtcagtggggtacttgcgagctatttgccttggcagatggtctatctgattgccgctatcttgattgcaggattgtggctcgtcttgtggcgaaaattaccgcatgatcccgtgacgacacataccacgaattataaagccatgattcagacagtacctcagttagtaaaacgctatccggttttgcgagcgtcggctgttaacggatttgtcttgtttggtgtttctaatattttctgggcaacactcgtcttttacttgcagcatcaatacgggtggggaagtcgtgaagctggtctgcttgcgttgctaggtgttaccggtgtgttagcagcccctttaatcggccgcctagccgatcgttttcggccccgaacgattatcggcttgggtctagtgttatcaacattagcctacgtagtgttttggctgagtggtacgcatttggtggggttaattattggtatcgtcattcttgatttaggtactcaattcgggcaggtcgcgaatcagacacggattcaaagcatcgatgtccatgtcagtagccgtttcaattcggtattcatgtttggctacttcatgggtggcgccctaggttcattttgtggcaacgtcttatgggatttagctggttggaacggcgtctgcgggttagcggtcgtcgtgttaatgattggcttttatgcccactttgttcattatccacgggtggtgacacgacaagcgcaacattagcagtgtattagttaatcggtcatgaatcatgattaaaacgtgtcaagtttagattgttgttcgtcagccggtgtgcgtcctattccgacctccggggctgggtgacaattgctggaacgcagccgacgtcgatttgagctaacgcataacccgcgtcatctcaaatacgagtcttattctaagccggaagaaaatcacttccgactaagaataatttggctactgagcattgtcacccagcccctacagtcgggaacccgctcgaatggctaatgaacggccacttaacttagcacaatctgttgttggctattttgatacgggaactttaaacgaaacgttagggttgtattaaccactttgtcgagacggccaattattacgatgttgattgaggaatagtgagacatcctaatatcattttcaccctgacagttgattgataaaattattgtttatgaaaaacaatgacgaatttaccaaaagttgggtacgcacatgtccgccattcgaacactgtcccgactggaaggcgtttcggccaatgctcagcggtgaaattccacttagcaagcgtccttggcttggttagtggaagaccagtatttaagacgtgggcttcggcttaaatctgtgtccaccgcgttccagtaattggcagaaatgcctggaagtcggcgtaggacgaacttgaaaagcatgtttacgcccactcgcacctgtttccagcggtttttagctggccgtttttgaacttaaaaaacgacacgttttaatcatgattaatcctaaaatgactagcacgatacctgttgttaagtaggctgttgatgtttgtgtaataacttattaaatcagaaatctgcgtttaagttaactaacataacgtttatcgagaagtacaacgaaatgaggtgttcaagtggcattaagaaaatcaagaaaggatcgcatcttgcttggtgtttgtggaggaatagctgaatgttttcagacttcttcgactttagtcagattagtcttcttctttggcgggggaatcttcttttggatttacctgtacttggcttataaattaccagaggacgagtatctttgaacgaactgtttattataccgagtaggccgttaatgtttgtgtaataacttaatgattggtataggcgctggcagtaggggacagttaattaatatgaagtatgctgatgatgagcttaatgaatattaaccataattggcgttgaacttaatattagtcgtaaatcaattaaaaggattgtatttcagagaaaatggtctaaactctaattattcatgttagaagatgtaacatgaaatctaaataagagggttttgctatgcgaattgaagctgattgtattggtaagttagctgttccggatgatgctttgtatggaattcatacgttacgtgccgttcataattttccgattacgacggaattgatgcatccactgatcatgcaaagtctcgttcaaatcaagaaagcggcggccagtgtgaatgcggctgccggaactttgtctaatgataaggcacacgccattattgcggcatgtaatcagttactactggggcgttacgcggataacttcattgtgccagcgattcaggggggtgctgggacctcggctaacatgaacgtcaatgaagtggtggctaatttggctcaccgattgatgccggcagttgccgttcatcccaacgatgatgttaatcaatcacaatcaaccaatgatacttttccaacggccggtaaaatggcgctttgcatgcaactcccaggactattaacggcactcagccggttggtacaaacgttactggttaaatcgcagcgttatcaagatgccatcaaagttggccgaactcagcttgaagatgcggtaccgacgacgtacgggcggacctttcatgcttattaccaattattcaagcgtgatttgacccgtgtacggcaggcgggcgaacatctccgaatcgtaaatttgggtgggactgcaatcggtaccggcatcaacgcgactcacacgtatcaacagcagattttagtgaaattaaatcaaaatactgatttagatttagtagctgcaccagacttgatcgatgcaacgcaaaactgtgatttgttcgtggaattctctgcggccatgaagacgttagccgttgatctttccaagtttagcaatgacttaagattgctggcgagcggcccacaagctggctttggtgaattgaatttgcccgcacagcaagcaggttcttctattatgccaggtaaaatcaatccggttattccggaggttgttaaccaagttgcgtttgaagtgattggtcatgacacgacggtaacaatggcagcggaagcaggccaattggaattaaacgctttcgagccgattatgttacgggcattgatagccagtgagcagcatttacagcaggctttgactacattagtcgatcactgtgtgcggcaattgacggtcaatcgccaacgctgtgcagatcaagtggcacattcggccattacggcaactgttttggcgccataccttggttatgagacgactaccgcgctgattaaagaagcgctcaccactaaccaagcaattcctgaattattacatcgacgtcgcttgcttagcgatgatttggtcgagcagctgttttcaccggccggactaactcagccacgtccagaggttattgaacaactacgagtggttgcaaagtagccactgttttgcagtgcaatttatggctgagatatgctagtgctggaggttgacaccagccagtttaaagccaatggacgtcgcacgacttagcaaaaaacaaagttagcgcgctttctgccaattgctaaaacgcagtggatctaagcttaagtcgtatctcaaatgctagtcattaaaaatgagccaccagaatgaaaaattctgatggctcatttttagttgtcgtttacttagtcttaactaaaagcagtgaggcacattagtacaagttgaccaaagcaaagacgattggaatggtaacgacacttaaaatcgttgagatgctcattagggcaacggctggcccgggatcaccgtggactttgagcgagaacaagacgacgattccggcgactgggcaagcagccattaacactgtggtgaataatgggataccagtgatacccattagctggaggacaacaatcgccaagtatggaaacagtaaatttcgcaataagatgactaaccaaagacgtttatcgagtgtcgcacggttaagcttaacgtctgccaaactgttcccaataacgatcatggacaagggggtgttgaccgaactgacatacttaatggcgctattggcaatcgttggcagttgcagcgaggttacgaagatcagtagcccaacaacaatggcgatgatattcggattaaagacgatctgtttaagattatcccgccgatttccctgttgtccggtgaagagggtgataccgtgagtccagctaaaaatattgaaggccgctaacgaggcaacagcatagaatacgccagttgcaccgaatagggagctggttaatggaatccccataaaaccggcattagaatatacggcaccgtaacgcataatgcgacgcaaattctggtcagagacgcgtttgaatagtaattgcgtcacaatgatcatgagcacataaatgatcacaattccagcaatgacccgggctaacatttgcaagcggtcggctgaaaatgtcttttcaaaggcttgaataatcaagcaaggtgacacaatgtataacaggatgttggttaaatcagttgaagtctgggcatgcatgaagccgagcttgttaacgagcaggccgacgagcatgagaatgaacatcaaaatgatttgactagttagttgcgttaaattcatttacttcagtccaataaattagaatactctcattattgaggcttggcctgaactttgtcaagattcatttaggccggatgatgcgcctggacaatatccacgtgatgtttgagatggggaaaaacatgatgatcagaccaccccatgatggcaccttgagcaattaaggcaaaggccgtcccgaagccaatggcacgcaaatgacctgtggcgaagaatgaaacgacgataatcgtcagaggtggcaaataactggtccactgggcaatgatagcggaaccatgtaaaaaccgaaagcgtaagatgtacgataaatcatcgttcggatgctgaattaaattacaacgctggtaaatcgagacggcggccgcaacgcctaatagtccaagcacgtttagaatcaagcgtggcaacaggggcagggcgggaatctgtagccaatcccaaaagtagccgataaattggaccaggtaactaaagggcacgatatagagcaagttggagataaaccgacgccgatcaaagtgacctaacagaagttggttgagaatcgtgacaaccacaccgtacattaacaaggtggttcctaatgaaatatgggtccagtcagctagattaacgctggagccagtccagacggcactgcctaggctggtggcgatggtgagcgcgttggcagcagaattcagaataatggaaaaaactaaaaaaccaaaacgttgacgaaaatcaggaatgttcaacacgactaagcgacctttcagttaacagtatatgagttattataaccgctttcataagtagatgtcacggctagacttgtaaaaatatgctatactaattgcacaatagattttacggttgaaggacacttcaagaattcggactacttttgggttgggtagtcagagcttgcggtgcccttttttaggaggtttttaatggattatgttggtagtttagcgttgattttaattgttacggcggttgcggggcacctgagtgtccgaatgggcttacccgcggtgattggtcaattgttaagtggaattgtacttggcccagccgtattaggttgggtctcagcaacaagttttatcaaagacttcgcggagcttggcgtgattattttaatgttcatggccggtttagagagcgatttgaaattgctgaagaagtattggcgtcctagcttgttagttgcggtcctgggggtcattctacccgttgcggtgattgactggtgtagccaactatttcaccttaacgccactgaaagtttgttcttgggcgtaaccttcgcggccacatcggtttcgatttcagtcgcggttctcaaagagttaggcgccctcgatggtaaagaagggacgacgattttaggtgcagcggtcgttgatgacgtcctggctgttttgattctgagtttgatgatcagcttatttggcagtgaagtcagtggtggcggtagtcatgcctcaaccaacttgggactctcgctggcgattcagttggcgttctttgtggcgctgtactttgtggtcaagtgggtggtgccacatttaatggccgtggggaatgctctactggttccaacctccatcacgctgatgtcactagtgatttgttttggactctcatacttagcggacgcaatcggtttaagtgctgtgattggcgcgttctttgccggtatcgccgttggtcagacggactatcatgaagttatcgatgagcatattcaacccattggtaatgctgtatttatcccagtctttttcgttagtattgggctgaatatgtcattcaatggtttcttgaacgatttttggttcatcgttgtgattaccgttgcggcaattgccactaagctcattggtgccggggtcggcgcacggttagcgggttttaattggttaagcggctatgagattggcgccggcatggtgtcacgtggggagatggccctgatcattgcacagataggttatcaaggtaaattactatcagatgatcgttattcggcagtcatcacagcaatcattttaacgacgctgattgcaccgctattacttcgtcaggcggttaaacgccaacgtgaagcttaaagcaattgaaaatcccaacttgtttgcgtgttgcaaacgggctgggattttttaatcacgacattattcagttgttaaacgttgatagtggacttcggcgagctgaccatatcgattggtgtcaactaattcaaagcgctgttgctggtcaattgctttaaataagggaatgccgtcacccaaaatgactggtgcaatctggatgtagagctcatcaactaaatccgcagctaacagcggcattaagacgccagcaccgccaacaatccaaatgttttggccagcagtacgtcgcaagtcttcgacgatcttcgtgacgggggtgttggtgaactgggtacgttcatcaccggtgtgggggtgggaagtcatgacaatattgtgggtcgccggattatatggattaatgagttgatcagtggtttgttccatcgtgtattcgtaagtatggcggcccatgatggcggtatcaacttgctgcataaatgcttcggtgggggcatcgttggcaccagctgttttgaacagccagtccagccgattatccttagtggctaaacaaccgtcaattgaaatggccccataaaactgaactttacgcatgattcgacacctactttatctttagtagtcatattgtaccatgttttccggtcattcacttgctgaactccggtaaaagttcagtaacataattaaataattggttcgaaatgggaggtgggaaactacttaaggtgtcgctgggagcgtatgaatactgcaaataatgatgttgcggggctaatggggatgagtattcacagcgggttaagcaggtcgtggtgatcattgtcggagaagtagcatgcggcaatcaagatgtgagtcggagtaacgattggtggttttcaagggccccaccgtccgctataattggattagcatttcatcacatacagtttggcctaattaggcgagctggcctggttcgtaaacttcccaggataaaaaaccaagaacttcagttatcggaggtaagagaatgaatgcgacgcgtaacgttattattgactgtgatcccgggatcgatgatagtttagcactattattggctcttaaatcaccggcacttaatgtgattgggattacaattgtttgtgggaacgtgccaacccatatcggtgcggaaaatgcactgaaaattttagatttggctgaccgattggatattccagtctatttgggcgctaatcgcccattagaagtcgcctacacgagtgcgcaagacacccacggcgatgatggtttagggaatagtcagattccagcggtaacggcggtacgaccgattcaagatgccgctggttttattgaagagacgctgattgaagcacctgatacttcgattttagcgttgggaccgttgacgaacattgcaacggtactgcaacgtgatccacgcttatttgaacaagtcgatcaatttacactgatgggtggaagttatcggagtcacggtaattgttcgccagtggctgaatacaacttctggtgtgacccggatgcggccaaggtcgtctttgacttgatgcctgttcccattcagatggttggtttagacgtcacgcgtaacatcgtgttgacacccagtttattaacgtatattaaagacgtcaatccagcaatgggggcgtttattgagaaaattacaaccttttattttgactttcattgggaatatgaacgggttattggttgtgtgatcaatgatccgttggccgtggccggaatgcttgacccaacgattctgagtggctttgaaagctacacgacggttgtgacggatggtgtcgcgcgtgggcagtcaatcgtggatgatcatgatttttggcacaacacacccaatagtcaaatcatgacgaaggttgacgtcgtagctttttggcggttgttcttaacgactgtggtcggtgcggctgatcctgatttaacgcaagtcttgcaccaattggtgagtgcatgaagagaataaaaacgcgggcaattacgttattggcgctctgcattgccctgaatattgttggcagtaacattgccttgatgttaaaattaccgatttatttagattcaattggtaccgttttggctgctgctgtgtttggaccactgggtggaatgttggccgggggtgccaccggagttatcgtgggtgcgacgacagacctgtactcgctgttcttcatgcccgttcaactgctgactgggttagttgctggtctgctatatcggcgaatcaagccgggcacgtggcggtcaaattggtggctagctggtgttatttcacttcccggaacacttttatccacggcgattacggtcatcttatttcatggcatcacgtcgtctggttcgagcatgctagtccaattattattaggtaccggtatgggcaaagcgatggccgtcttcttgatacaagtgggaacggattatttagatcggtttatcacagtgtacgtggtcgcacttgtttaccgcgcattgcgatataaattgccgcaagctaattagttgaacggatgacttggtgtcggatgactaaatctaagcatgtttacgctaactcgcactttttccagcgggccgaagcaggctgtctttgagcttggtaaactctagctttcgatttgtagtacctgataagttgtgtgaatatgaacaataaaaatgacctcgcaggaatattattgcgaggtcatttttgttgttatgaggttaaagtgcagtggtcaatatcgctacgaatcgcggcgactcatcttaccatcttcaatttgatagaccacgtcacagtcatcaattagccgctggtcatgggtcaccattacgatggccttttggtgctgatgagcttcgttggcgaggcgcttgacgacgtcgatggagcggggcgtgtccaggctggcggtcggttcgtctgcgagaatgacgcttggatcattgtaaagagcgcgggcgatggcaacacgttggcgttcaccaccggagaggtcacttgggtaggcatcccgaacttcagtaagggctaactctgctagtaattcatcggtgcctgcttgatcaaatttgcgccgggccattttatcgacgagcttgaactgttcacgaaccgtcaggaatggaatcagattggaactctgcaagataaagccaatttcattgaaacggtaggctaagcgctgtttttccgtttgattcgatagtggttgtccgttcagaataacttgaccacttgttggcgtttgtaaaccggcagcaatcgtcaaaaaggtggatttacctgagccagaggggccgataatcgcgacgaattggccagcactgacttcgaaattggcatcagtcaaagcgttaacagcggtatgaccgtgaccaaattgtttattaatattttgtaaggctaaaactggttgactcattgatatcatcctccttatccaatggcaacgacggggtcaatcttggcgacagtccgccatgagagtaaggcaccgacgactgcagctaacaagagagccacactataaataccaaattgtggccagtcaatggcgaatggtaatccggcgggcatgatttgcgcgaggcctaacgtaattagaaggccgatgccgataccaatgattgccatgacgacactttgggtgagtagggcagccaagatgtgtttggtaccaataccttgtacttttaagaccccgaacaaggcttgtttttgaagggtcagaacgaacatgaaaattccaatcacggctagggcaattgcgaacaagaagtaaatcatcgtgttgagtgtcaactgctcagcgctgtatcctggtaatttttcaataaacgtgacaattgataaacgttgcatgttgccatgatgttgagtcttgaaatgactctttttagtcacaaaggcgttgaccggttgttgatcgccactggtgatgggattacctttgagacgattgagcgtggcaacgtccgtgtagaccgttggcgcaatactataggtactagctttgaaagtaccgacgatcgttaccttttgatcagtggtcccaatgcgaactttctgaccaatccgatagcctttgtcttttaatcccgcggaaatcaataattgattcttgccgttgattcggtgtcctgagatgacttttggcatcagaaaactatcgcgagtggtcccaaaagcgctagcgttagtcttttgaccattactggcagttcgtaaagtaccggacagactagctaagggtgcgacgtcctgacctttgattcgatcttggtctgctagttttaattgggatgctgacagtgtctgattcgcatcttcgttcaaataaactgtttgagcatgccactggtcaacagcctgacgattaccattggataacccgttagcaaggcccgctagcataaagacgacgagggcaattagtagcaaaaccccgctaagtagcccatatctgagtttttcgtgggccatttcttttaagcctaaatacatgtcaattcctcccttttaatttcatttatcaagtgataaatcaatgtggtaatcgtatcacgttcatttttgtaaatcaaattttttatttaattaccaggctaaattatttcgaaatgggtaccaaggctggtatgattaatttattgaatagagaggcaggtaattattaatggtgaacaagcaattcaatcatcgggccgcagttattgctggtgtgactggtggtgtgatttctggtttagttaagttagggtgggagaatatcttaccgccacgaacgccacagcgggatcaaacgaatcccccacaacaattattgcaacaaattgggattcccgccagcgttacgcatgcaacgtattcatattctggtcatgatttaccaggtgtcagctatgtcatgcatttcggattctcaacgacgtttgctgtggcctatagtttatgggctcgcaagcacccccgggcaaaaggtggcagcagcgcgttgtatgggttaggtatctggacagcctttcaccatggtatcttgccagcactggggaccgttcccgctgcgaaggatcaaccaatgaccgaacacgtgtcagaagccattgggcatgttttatggatgtggaccgctgattgggttagtgccgctgtctatgaccggatgacccgttccaaatagcggtttaaatcggttagtgagtgacgacatgatgaggtgttgtagccgcagccgttgaataaagttgttgcttgaaaaactagcttggttaggaatgattacaactactaaccaagctagttttaattgtcgctattttggttaatgttcggattctgatggtaacggaaatagtgattcaccgcgacaattacgtgattatgaggaaagcaactgagattaacgtctattacaatgggaccatttgattttaatgattgattttttaatttaattctcatattgactgaaaatgtgctaaaatattaatattgtgtgcaatatttcataaaaacatccataaatgagaatggggcggaagtagcttggaaaagcaggggaagatgaagcggtatcgccagttccgattgagcttgggctggcagatcttaattgggctagtgcttggaattgtattaggggtcgtcttttatggcaataaaacggcgattactgcgatgcaaaacatcgggacgatgttcatcagtctgattcaaatgatcgttttaccaatcgtggtggcatgtctgattaccgggattgctaatatgggcgacctcaaaaagttaggtcggatcggtggtaaaaccattatctatttcgaaatcatgacgacgattgcgatcgccttagggttgttaatgggtaacatttttcaccctggtgactatatcgatattcatcaactacatgcgtcgaatattagtcagtatgtgcaaaccgctaagacggtctcacacaatggtatttggtcgacggtcatgggcattatcccgactaacgtctttaaatcattgtcagctggtgacatgattccagtcatcttttttgccgttttctttggtttagggacggcggctattggcgaacaaggcaaaattattctggactttatgaacgctgtcgccgaagctatgttcaaagtgacgaactgggtcatgcacacggctccgattggcgtctgtgccttaattggggtcacggtcgctgaaatgggcttgaaggcgctggccccgttaggctatttcattattcttgcttatattaccatggcaatctttattgtggttgtgatgggcattgttggtaagttattcggtttaaatatttggcacctactacgggtcattcgtgatgaaatggtgcttggcttttcaacggcgagttctgaagcagccctgccccgcattatcgataagatggggaaatacggtgttagtgaaggaattgtctcatttgtgatcccaactgggtatacgtttaacttggatggctccgcaatttatcaatcgttagcggcgcttttcttagctcaggcttatgggattcacctgtcactcagccagcagatcactttattgattgtacttatgattacgtcaaaggggattgctggtgtgccgggggcttcgtttgttgtcttattggcgacgatttcaacgattggcgtgccagtacaaggactcgcttttattgcgggaatcgaccggctagttgacatgggacgaaccgtggttaacgtggtcggcaattcattagctgcggtaattatcggtaagtcagaacatgaatttgatacggccaaaagtgatcagtatttagctgagattcgggcggggcatgcgcgcgcaattacgaaataattgaaaacagctctgtcagttagttctgcattaataatgcgatggcgatgatcactgatgattgatagacccaaaagttgtatttcagaaattaatttctgaaatgcaactttttttatgatatcttattctggttacagcaattacttcagcgattaagttatgataagacctataggggaggatggcgatcggatgacaactgatttttcgattgggcaactcgcacagttatttgatatcccagtggcgactttacgctattatgacgagattgggttattgacgccggcacgagtcaatccgcatagtcactaccgatattatgggacgcctcagttcgaacggttgagtaccattaaatatttgcgagcactcggcttaccattggctacgattgccgatttttttgcggcccgtgaactgtccaagctgacgagtatgttaacgacccaacagcagcaggttgaggcgcaattgcaattattaacggcggtacaacaacggatcaatacacgcttggcccagattaaaacggcccaaagtgccaattttgatgtgactgaatgcgtgacgttacctgaaagagcgatggtggctttacgtcagccttatcgccctcaagatgatattgaacttgttattgctaagctacgcgcacagaccggcgcgacgaacgaaatctttctcggcaaggttgcgctgatgctcgaccagcaagccatccaagccggacattttgaccgctatgcgggaatttgtttattatttgaaccgggtgatacggtgccaccccatcaagaacacttggcggctggtagctatgcgcagcggatttttcacggcactcatttggatgccccgatgcagtatcgacaattgttagcggattgtcgtgctcgcggctggcacgtggcgggaacagctattgagacagcactgattgattatgggattacagatcaggttgcacagtcggtgacgcagatacaattaccaatcaagacttgaccctcaagtaactttagactttatactaaatgataattaattattttaaattgaaataagcgctagagattaagctattgattaggagtggcgatatgattggagcgatttttaatacgagcatgattttagctggttgcttggtcggcagtatctttaaaaaaggaatcaagccagcttaccatgcgatattattacaagcgttagggctagcggcttgtgtcatcggcattaatgcggtcgtgcaacggatgccgcagagtaagtacccggtgctttttattgtgagcttggcgattggtggattaattggtcaagctttggatattcaagggcattttgaccgctgggtgggccgtttggcgggtggcaacttagcggaaggcctagcgactgcggtgttactgtactgtattggatcgttatcgattttggggccgattgaggcagccttaaagcatgattacacctttttgtttacgaatggcatgttagatggcatcacgtcgatcgtattagcatccactttcggatttggcatcgcgattgcggcgggcgtcttgttttgttggcaggggagcctgtatgttttagcattaattttgaaaggtgcgttgagtgcagcgttactgaatgaaattaccattgttggtggtatcttgattctagcatccggcttaggtatgttgaaaatcaagcaattcagtacgttgaacctattaccagccttgctagtgccaccaatcgtaattagcgtgatgaaattattttaactagtgggccaatggtgaagtcaattaagtcttttgattgataaagtaaaagccaccaacttaggacaatcagtgaaagctgatcattttaagttggtggctttgtgtataatgcatcgatttgagagattggcattaaatatggttaaaacggactgttttttaaatcaaaagcaaccagcttaggcccgctggaaaaaagtcgagtaagcgtaaaattgcttagttggcgcgtcctacaccgacttccaggcatttctgccaattgctggaacgcggtggacacagatttaagccgcaaaccacgtcttaaatactggtcttccactaaccaagccaaggacgcttgctaagtggaatttcaccgctgagcattggccgaaatgccttccagtcgggatagtgttcgaatggcggacaaagatgtacctaagcttttgatgaattcgtcgttgcttttcataaacgataattttgttaatcaactgtcagactgaaagtgatattgagatagctcactaatcctgaattggtgtagtaagatgtaatctctcgacaaagtgctaatgcacctaacactttgtttgaagttccagtatcaaaatagccaacgatagattgtgctaagttcggtggtcgttcatcagccattcgagcggcttcaacccgtggcccctcacaggcttgagactggaggggctgggtgacaatgctcagtagccaaattattcttagctggaagtgggttgcttccggcttagaataagactcgtatttgagatgacgcgggttgggcgttagctcaaatcgacgtcggctgcgttccagcaattgtcacccagccccggaggtcggcataggacgcgcaccggctgacggaaaataatgcagttaaacagtttgttttaaccataattcatgtcaacacgcacaatagatgtcaaagtaagacactggttagattaagtggtgtttgatgctgaagagttgacgattgcgttccagatgacggtgaatgtgatcgatgaggacgtcgtgcgaccaatcggtagttgtgttaagtggcggaacgggaaaacgttcatcgatatcgattgtcggtggcgtgatggcacagttggcgactagggcgatggcgaggctcgtaggtgtgtgctggtacatgaggtcatttcgaatcgcaaaactgatgtgctgctggttggctagtttaacgtagcgattcaggatgtcttcatctagcaagccatgtaggagtagctggtaatcaggatgggccgccatttcactttttagttcggttgagtagtcacgcatgagtgcttgggtgaaagtaatgcccacatcgattcgttcgtgaaacgtgccaaggttacggtgttgttcatccggatgtagtacgggggccccgaatattgcggattgtaagtgtttatccatttggtcttcagaattagccatgccagtcaggtcctttcacaattaaccataaaatttaactgcttttactactattgtaataaagaaagcgctttaatcaacataaaattttctaaagctgatcagaagttaaaactttggatgccactaggcttgaaacggatgacagataatctaaggacgcaacggatttgccggggccaatttaatgctgttttgaaaacaaggactcagtgcttcataaaataacgaaggtgcccagaattaggaaagttgacttcatcggcaaataacgaatattcaaggccattttgggaaaagccagcctcggccagataatctcaattataatctaagtaacggtcagggctaattcaacaaattgataataaggttactaatatatcaataaactgattaaagcagtgtgttgcttaatgattagccaggctaaccttaatccttgtcagcattgacttacggctgattatacaagccttttttttaagattgtaaaggtgtattattgattcgtccatggtatgatactacatagtatgttagtaaagtagtcaatcaaattaaaagagaaacggatggtaacaaatgccaagacatttacggaaacggcgccggtcctggacgctgatcataattgccatggtgcttttgggggtcattggatttacaagcacacaagtttctgactggattgatgcatcgtttacaactaaacaaacggatgcagctaagtctagttcccaaacgaagcccaagtcggtcaatcaggtcaagttggacgtcccgctagtgaatcaaatgacaacaccacgtttatacaatggttgtgaagtcacatcgttgacgatgttgatgaattatgcgcatatcaatgtcactaaaaatgaattagcggcaaagattacgagtgtgccactcacttatagtgacggcgaacacggaaatccagagtatgggtttgttggggatattactggtaacgatcctgggttaggtgcctatcataagccaatctataaattggcgaaaactgagactagtcaggtgaaggacttaacgggggcaaactttgatactgtgattgaacagttagaacaaggacggcccgtttggacaattacgacggcttcgtttgcaccggtcagcacaatgcaaacttggcagacaccacagggctccgttaaagtgacttatgatatgcacagcgtggtcattgttggctttaaccggactaaaaagttgatttatattaacaatccgtacggagaaaaacagcaggcagtcagctggaagaattttgaggctgcttataatcagatgggcaagcaagccattgttctgacgttaccacattagttagttaacaacatgctattgtgaaccaattagtttaagcaactaatcttggtcaagatgagccaaaatcttgatgaggattagttgctttttttgtggcggtattttcgaatgaaacggttgtaatatcccgtggtatgggtagttcgggcaccggaaagcgggtgagaaactgctaacaatatcatgattgtaaccaaactgtaattcaaatatcagcctttccagagttgttcataatattaaccataaaggggcgacgctttgttaacaagctgtaactgaattgaaatcgaattgacgccccagcccattaaaaatggcctattattggtagtataagaatgttaaagttatgggtatgtcataaactgtccttgacagtttagttgttggtgattgtgggaatcaccaacaacttatgatgataatttttttaattgcggagcacagtatggggagagggaccgcatgatggggattaaaaggctcagttggttagttggaacggcggtggtcgccacacttggcatgcaaattacggttcaagcacagggacacgcggtggtcgatatttccgagtggcaaggacagctcagcccaagtcaggtgcaggcgatgaagtcgcaagtgctatttgtgatcaatcgtcgtcagtatggtttaaattatgttgaccgggacgcagcgaataatacggcattatatgttcgttatgggattccatttggtgagtatgatttttcgcaatttacggatgccgctagcgcgcgccgtgaagcccaagcgttttatgcgcgctccaataaagctgcgcgtttttatgctttggattttgaagttaatacggtacgttcaggatcaactaatgcggcagttgcggcttggtatcgtgaaatgcgcgcattgactgacaaaaaactgatcttctattcgtatgcttcgttcgcactgacgtatgccaaccaagcgcggcaacggtttgatgcccagtggattggtgcgctaacgcccaacccaccaatcatttcggcggcgttatggcagtataccaatcgctatcatttagctgggctagcggcaccggttgataatagttgggtcattactagtgttcatcccgtttcgtggtggttggggacgacccgtggcgcacccggtgttgcgattaaagctcaaccaagactgaaagttgtgcacgatcgccatttgactatgccggcccacaatcaacagcatggacgggtgggccaagcagttgtcgccattaagaggccagcagttcagccagctgtgaagactcggccggtgcagcagaaagtggtaagcaataagtcgcgttcgcagaccgtggcgcgcgtcaaacggcggtcattgcaaacgatcagtgttaacagccatcatggcaaaataactcagcatcgcgccattcgacgccgagcgactcagcccaaagtgataaaacttaaagcgacgcgacgtacaggaacacagtttaaactgaatacgtccaaagcaactaaacttcggcggcccggtaagagtattcgaacaaaaccggtgactcgttcaaaagggcgaacgcggcagcgacttacgcgacgtcaaccgtcactgaggcagcgagtaacgaaaaacaggcaatcccgccgccgcgcactacgagtaacggtgcagcggcgagggtcgacgattcgtcgtgcaccacgttggcaacgaacacaaatacgtcccgtacataacacttctcgggacaagcgaggacttagctgattgcatggctgtcgctcagttctcattatcatggtagaaaaggtaattatggttaagtaaaatcggtcatttgttgtagaaattaggaggatatttttcatgaactttaagcgcaaaattcaattaggaatcgccactgcaactgggatgttggtggtcggaattgttgccgtaccttcagtaacgaatgtattacacgcggcttcagacagtgttagtttggttagtcagacggcagcgcctacgaccgtcaaggcaaccaatcaaacagtcaaggccatcagtgcaagtgggaccaagggaaactaccgggtgaagtacgccaaagctgggactagttcgacgactgcgacgtatcaacagacgaactacaatacgaaaagtgatgccagcagccaagtcgattacttagcgaatacgcagggtcagcgtacgacacttaattcaggtacagcggcaacggttcaagggacgatgggcaaagtgtatgttcattggaacacgggtagttggtcagtgacaacgattgccaatacacaggacgttgctggtaatccaaccaagtttgctaatcaggtcaataatcagattcaaaagcaagatttgacgagtaaaaatgtcacgagtggtgccgttaccgtgtacgataccccacaaaacggacaggcaaactcagttcaatggcaaaatggcaaacaggttgctaaggttcaaggccagcaagccaataccgttatcaaaattgcggcggatgctaaaaattaagtttttacctgggagctcaataaatgagtgccagtagtctggttatatcactgtgtcgacgtcaaccgcattcacaagccagacactatggttagattagtgggtttaatgcgatgttttgaccgaaaataggattgacttttggcagtggagtgcttatgatgttaggtaataattaaaaagtagtgatcgttaattagtagtcgttgacccaacagtctagcgactcggtgggtggtgcgaaccgagctgtggtcaaagatgaattacataacgtgaactgccattggccggatgatatccgttactaatcaatgagcgatcacatttggtgataacttgggtggtaacgcggaaaactcgtccctgttttgatgacaggggcgagtttttttgtccagcgacaataacgaggaggactaacatgaacattatcgatgatttaaaatggcgtggtgccattaaccaacaaacggatgaggccgggttaaaggaacttaccgaaaaccaatcagtctcactatactgtgggattgatccaaccggggatagtatgcatattgggcatttgattcctttcatgattctcaaacgattccaattggctggtcatcatccctacgttgtagttggtggtgggacgggtgctatcggtgatccatctggtaagaactcagaacgtaagttacagaccatggatcaagtgaagcataatcaggatggcttaagtgctcagatgtacaagttgtttggtcatgacgaaaacttttcgattgtgaataactacgattggttatcaaaaatttcattactagatttcttacgcgattatggtaagttgttcagcgtgaacacgatgctgaacaaggaagttgttgcaagccggttggaagtgggcatttcatacactgaattcacataccaaatcttacaatcagttgacttcttacacttgtaccgtgctgaacacgtgcaactccagattggtggggctgatcagtggggcaatatcaccgcggggaccgatttgatccaccgcttagaaggcaatgacgctaaggcttacggattaacaattccattattgttgaaggcggatggaactaagtttggtaagactgctggtggggccgtatggttaaaccctgaacggacatcaccgtatgaattctatcaattctggatcaaccaggatgatcgagacgtcgtcaaatatctcaagtacttcacgttcttaagtcatgaagaaatcgatcgattggccgaaacggtgaagactgcacctgaaaaacgggaagcacaacggcgcttagctgaagaagtcacggaatttgttcatggcaagcaggcggtagttgaagctgaaaatattactaaggcgttgtttactggtgatgttcaaagtttaacggcggatgaaattgaacaaggtttcaagggtgtgccatcagcagacgtctcagctgaaaagcaaaacattgtcttgtggctggttgatgctacgaaattcgaaccttctcggcgtcaagcacgtgaagatattaaaaacggtgcgattcgaatcaatggtgaaaaggtgacggatgtcgatgccgagattgatccgtccgcagcctttaatggtaaatttgtcattgtacgtcgtggtaagaaacgttacttcttggcacatgttaagtaagttaatttagcaggtggactggacccgttgtggcccagtctttttattattattacaagtaagaactggtgtaaaatttacttaggtcacattaataatgtgtgatcattgccggatgaaaatcaattgaggagatgaaagttttggtgggggttaaatttaatacacggacgattgcaatcctggggatgttgatcgcacttaatgttgttatttctatctttttccatatcccaatcccgatgacacacggttatattaacttatgtgatgcgggaatctttattgcagcactgatttttggctggcgtggtggggtcattgttggcggtgctagcggactattactagatttattgctagggtatccacagtatatgtttttctcactactcgttcatggtttagagggcggaatagcaggatatcttggtgctagcaaatcacatggtcgacagattgcagcgataattactgcggtagtggtgatggtggtcggatactttttgtcagattcgctgttgtatacgatgggaactggattggttggtgtaccgactaatttagttcaagctgtggttggtggtatcttggcattcccaattgttgcgggaattcgaccaatcgttaaacgtcatttgaatttttaaaattagatgtgctggcttaagataagcgttcgtcgtgcttttacgggcgcttttttgctgtctaaagggaatccttaattggaaaacatagtgccatctcacaatgatgttaatcgatgacatataatgtagtaattgtgtaattgacgacagttttgtgccgttcttttcataaaagtgaaaaaacattggattaattgttgacagtttcataactggctggtatattagtaaacgttgctgctacggcagatgcatctcaccaccaaataattattgaaattagttgttgacaacttcttcagtaattggtaagatagtctctgttgtcgcaatggcaactatgacaaattaatcaagttacttcttaaaaaaagttgttgacaagatattgattaagatgttatgatgattaagttgtgttaagcgattaacacacggaattagatctttgaa

SEQ ID NO: 11 - DNA, 115264 bp, synthetic construct
  source 1..115264: mol_type = other DNA; note = Lactobacillus plantarum PDA6 - Contig 11
gacgatggcgagaaggatacacctgttcccatgtcgaacacagaagttaagcttcttagcgccgagagtagttgggggatcgctccctgcgagggtaggacgttgccatgcaacctaaggaatcgttaattcgattcctttttttgttgccaaaaattagcctactgggcgaactaagactaaattttgaaattcaaacggcgggtcggattattaggaatcccggtactcatcagcgcatttggaattcaacccatactattaatcaccggcacgatctacttattggttgcaatcacactcattgtactgaataagtttccgttgagttgaatcgttagcgattgcgctcaatgctcatatttggggtagctggcagtgatgggggagttgtcaaaacgagagacagtagcactcggattttgagagtcaggcgtaaatggcgtacgtttggttggttagaaaaatcgaatgctagttatcaatcgataaggtgattcagctcagtctaaggtactaggtattggtttacgaacttggccattactaaccgcaaatactggctgctgggcctaatgtcatttaatttggacagtatccgtcataaccatgtaaaaatcatgtaaattcgggagcaataattgttattctagcagttacgtgctatgttattatcatattttatgaagtggagtgatagttatggctcagatttctgtgggggatcgggttaaatgtcaaaagaacggcaataccgattatgatttttatgctaaagttgaaaaaatttacgagaactccgccttcgtcacaattactcattatgatttgcgggatgatattaatgtggcagaacttcaatatcgggcagtgatcgccttaaagaagatgaaacccgctaaaccgactgctggtgaagcgaagcagctacaggcagttagtgcggccatgttagctgaataaattaagaatatcgatgcaacatgtaggtaatgggttgttcaagaatttgattcttgaacaacccatttttagtttggctgcaaagcttttcggtgtgatggagtgccctggttgggactgattttatgatgattagaggccaactgacttaatgaatctgtccgttagagctttaacagattggatatttaacaatcattcacgcgggtgttgttacaagctaattgtgcacgtctctttattcggtgtagcaaacttttttgttgccaatctgacttttagcctgtacatcattggtttcaatggtacaatggatattagtagttgataactgttctaaagtaaggaggagttttgaatgcagacagctaatcaaaatgtaacgttgacggggcgtcgacgcttctggttcatttttacgctgttgcttgggacttggaccatgtcgatcagtcagtcttccttgtcgacggtctacccaacatttatgcgcgactttggcatctcggcctcaaccgtgcaatggttaacgaccggctttatgttgacaatggtcgtcatgatgccaatcagtccgtggttgttgaataacattgggtttaagaaattattcttagccgttttggtgcttttcgatattggttcaatcattatttatttcgcacccagttttggtgtgatgatggtcggtcgcctaattaaagcggcggcagttggcgtgctgtttccctcgtatcaatccattttactgacgattacgcccgaggaaaaacggggcagtacgatgggtgtcgccgggttggtcatgggatcagcattagcatctggcccgattatttccggtgtggttttgaagtttaccgattggcacggattgtttgccgtcttcatcacggtggcaactttgttgatcctaattagtttcacaacgatcaaggacgtgatggtcaataagccttcaaagctggatttgctctcaatcgtgacgttactgggctttgctgggattttatacgtcgtgaatgagattggtaaacccaatgtgaactggacgttcggttggctgttattagcggtttcagtactagcggtggcttactttacttatcgccaatttcacttggagacgccgttattggaactacgggtcttaaaaacatttaattatgacttagccattttcctaacagcaatctcgtacgtggcgctgattgtcgtaacaatcatcttcccactctattaccagggtgtcttgaaggtgtcgccattcgtttcaggcatgtcactggtgcctggtgcggtgcttctaagtattttgaacccgcttactgggaaactagcagagaagattggatacaaacaaatcatgttacttggtatgagtatgatcgttgttggttggctgatcttagcactgatcaattcagagttgaacctgctcaccatgattttgctggctgccttaattgaaggcgggaatgcctttgtcatgatgcccgccgtcacattgggggctaattcattacccgatgaactgatttcacacggtaccgctgtgattacgacggttcgtcaaattctcggttcagctggtgtggccgtggcgaccttggtcttatccaacgtgacgcttgctcagaaacaagcgggagcctcaacgttgcgtgcgaacttgcaagggtaccatacggtcttctggatgatgctcggcattgaattggttggcctcgtgcttgcgttacttttgcgtgatgggcgcaagcagtcgcattaataatcacggtgactgactaccaggcgagaatgactgaagttaagtgggatatgctttgaacgccactaattagacattagtgcctgcacaatcggtcggttagtcgtaattaggccaaaagggccgccattcttgtaatcaagaatggcggcccttttttcgtagtgcgactgtgatcgtactgaatcacaggacttggcccaactaaccggggcgcttctacttggctgttgctttttgaatctttgccaattgacgatattgactgagcatccagctttgatacgtctgattggccggtaacgtttcggtgaccttcagtactggcacatcgtatttcctggcgagtttgaccatgttcgtgaccaagttactatcggtctgagtgttttcaacgaaaaaggcaatccggtggtgcttgatgtcttgttgcatttgctggatatccttaggtgatgggtcggaaccctcttcaattgcatgtgcgaaatgcgtattgctgattcggtagccgattgccttcaatgagtagtcaaagaccggctcactgacagcgacacgctgattatttgcatgctgtttcaattgtttgatcatagtggttatagtcttagcgttggtctgatacttttgggcctgctgttcaaaataatgcttgtgctgcggctgaattttgctgagttctgttgcgattttagttgccaatttgggcatcgttgtgggatcgtaccagacgtgttcgttggccccgtcagttttatgagccacgtcggttcccactgtgattacccgggcgcccttggctttgttgacagtaagcttttccatccagtcatcgtagccgaggccgttgtaaatgattaattgggcgctactagcctgcttagccgtgttgacggtcggctcgtagtcgtgggggtcaacgctcggtcgatcaataatcgaggtcacttgaccatactttcctgccaccgccttagccgtttgaccataaaagtcgagactagccatgatattaattttgtcgttagtcgttttactgggggtgctcgaactttgacagcctgctaataggccgctgagtcccagtattattgccaaataaagccatatccgtcggttgaccatgtattgtaaccccattctctttaaatcgtaaccattactgttaactttaccgaaagaaacggtcgtcgtcaagtctttaagataaggtttagactaggtgaaaacactgcactgactgacgaaagctggtaaaataggcgtacctgaaaagcggaaggcggggcacgcagatgatatttacgattgtgattttaattttactagcaagcgcaatttttcgcgggtttcaccgcggatttgtgattgaaatgttgcatctgattgggacggtcgtcgtcctattgtttgcacgactactctatcagccgttagggacaatgattagtaatctattgacgaatttacatttaattgaagcttcagtggcggcaacgttgatcattaacctggtcgctttcttcgtgttaatttcgttagggtggtccgtgattcggttgttaggccgtgtttcacgtagcattacgtggctaccagttattaagcaagtgaacagtgttgcgggtggaatcgtgtcatttgtcgtgatgtatctggttatttttgtcgcgttgtcgttggcgaacatcgtcaatacgagctttattcagacgcaaatgacgcagtcaccgctcgccacctatattgtgaagcagacacctggtctaactagccattacctcagtaatttgattaattttaatgatgggacgaatacggattcctagagttcatggtgggggtacgactgctttaaactaagacaaaggcgttactggttttttgaccagcaacgtcttttttgatgaaccggtttgttagcaacgcacttttttcggttcccgaacgattgctagtttttatggggttatttggctgattactatcatattgagcgtccttcatgctatgattataagtaaaaatgagcaagaaagaggctgggatacttatgggcatgattcgaattaataatttacgctttcacacgtttaacggggtacttccagaagaacggcgtaatggtcaacaactagggctagatattgccattaaatatcctatcgaaaccaaggttcaacacgatgacgttcacgagaccatcaattacgcggcggtccgtaacgtggtcgatgaatttgtaacgacccattcatacaagttgattgaatcgctagctaaccacttattgcagacgttattgacaagttttcccgcggcggatgcaatcaatattaaaattcgtaaatatagcgtaccaatgcctggaatctttgatgatgtggaaattgaggtggaggggacgccgaatggcaagtagggaagaacgggtttatttgagtgttggttccaatattcatccgcgcgtccaaaatattcagcaagcccttagccgattacgagccgtcaatggggtaaacgtgattgacgaatctcattggtatgagactcaaccgtggggaaagcgtgatcaggccaatttttacaatgtttcggtatccttaacgactaatttgacaccagaagaactattggatgaattacatacaattgagcaggcgggccaccgccaacgcttggttcactggggaccacgtacgattgatttggatattattttttggggcgaccggcaaatcaacacagcgacgctgacgattccgcatgcgcaggcagctaagcgcaactttgtgctactgccaactgctgaaatcgccaaaactgatgtgttagttggaccacaagtggcccaattgattgcggctaatcaggatcagagttggattaaaaaagtaagaaatgtgagtgagttagatgattgatgagaagaaccaagcaaagattgagcatgcagtacgagaaattttaagtgcagttggtgaagatcctgaccgaccgggattagtagaaacaccagcacgggttgcacgaatgtatgcggaagttttcgctactaagaccgccgcaccatttgataattataaactgttcaaggttgagcatccgactgaaatggtattacttaaggatattccattctattcgatgtgtgagcatcaccttttgccattttttggcacggctcaagttgcttatgtgccgcagcatgaacaagtgattggcttgagtaagattcctcgcttgattgactattgcagtcaacagccgaacgttcaggagcgcttgacagtttccattgcaacagaattacaacgaattcttgacccggctgggatcgcggtctcaatcacggcgcggcacatgtgcatggagatgcggggtgttagcaaaccgggtgtgcatacggaaagtagctattacagtggtcaattcaagacggatttagacttgaaaagagaattcttacagcgaatcgcaaagtaggtgattgagtggatacagggacgattgaacaacattatcaggacttattagcccaactaaatcaagccatgttagccaataatcatcagcgtgttccgttattacggcgaatcatggcacatcttggccaccctgaccattattaccatgtgatccatatcgctgggactaatggcaaaggctctacgggagctatgttagccagtatcctgcgggcgcaagggtatcaagttggccgcttcagcagccccgcgattaatgatgcgcgtgaacaactgcaatgcaatgggacgtggatcagtccagcggaatttatcgatacgtatcgtgagattctaccggttctgcaaaatatgggactgacagctagcgatgtctccatctttgaatggttctttctcattagtgtcgtttggtttcggaatcaaaacgtgcaatgggcggtcattgaagccggtttgggcggcttgtatgatgcgactaacgccttagccagtccccaactcacggtatttactaagattgccctcgatcataccgccattcttgggcccacgattaccgcgattgcgcaaaataagtcaaaaatcatcaagccccatacaacagcagtgacattggctgaccaacacccagaagccctggctgttttgcagaccgaagcgctcaatcaaggtgttcggctagtgaccgctaagcacgcgcaactgacggtgactgggcaaacactcacgcaaaccgtcgttgatgcgcacagtcagctttttgattggacgcaattaacggtcggactgagtggcacctatcagctacaaaatctgcggttggttttaactgtggttgcagtactacaacagcaacaagttaacttgacgaacagtgcggttcgccgaggcttgcaacaagtttccttgccaggccggttgaccgtgttacaggagcaacctgtcattattgccgatggggcgcataatccggatggcatggcagcactagtggcaagtgtgaagcaattactcgctggtcgtaaattgatttggatcgtcggggtcttacaagataaggcctaccctaaaatgctggctgaactattaccggtagctgacgtcctgattacgaatacgcccgcaaatccagaacgagcgttatccgcgactaagctggccgacacggcgaccgcattattaacgcccacctttatgaccacggctgcgatgcaacgacagccagacttattgactgcaacgacgatcacggatgcgttaacgcaagctcagcagcaagcaaccagtaatagtgcgattattgtaacggggtcattttatgtcattcgtgagctccaacaggctggttggctggggttaagccaatgaggacttggttgatcgcatccaacaacgctggtaaaagtcgcgacttgatcgcgtgtttggcttattatggcttgacttctcgtcagtacttgacagtggcgccgcggctcgaatttcccgtggaaacggcgacgagctatgtcgataacgcggttgctaaagctcgttttggggcgcaacagctaggggttccggttatcgcagatgatagtggcttagagatttccgcgttaccaaacttgttaggtgtgaccacggcgcgcgacttaggggttgcagtcagcggctttgatcgcaatcaggaaattttaacggccctacgcgatattcctgacaacgagcggcaagcggtgatgcgtgctacgttagcggctgcctggccagatgggcggaccttggccgtacaagcttcgatcaccggctacattgcgtcctatcaatttggacgctattctgggggatttgaccgaattttctggctaccgcgctatggtcgaactttggccgaattaccagcaacgtggcgcatcccgctgacacaccggggacgggccgccttaaaattgatcacaaaactttaaaaattggaaggatcggtggagtagatgttagtacaagatatcaccagttcattagcacaagcaacggattttgcgagtcaggcgttgaatgcccaagttcaacgacaacaacaattagttttgcgttttagtgattataatcgggaacagcagctccgattaacccaactatgtcagcaattagatggggtcgtgctggcgagtcctgaacagttgaccgtcttgttgaaccagacagctggtcgccagttaacccaccaatggtcgcgagtctttacggatcaagcaacgactcaaattcaattgacccaaattatgaaacaatatgatgttttttggcaagcgggtgagcaccggtttaatctcaccaagaagccgatgatttatggcatcatgaatattacgccggattcctttttcgacggtggccagtacaagactaaagatgacgtactgaatcacgtggatgccatgttacaagcaggagctgacgtaatcgaagttaatggtcaaacgacacggccgggcttcacggaagtcacgccgcaagttgaattggaccggacgttgccgtacattcgcgccatcaaggctcgtttcccggaagcagtcttagcggtcgatacttataagtatgatgtcatgcaagccgtcctggaagaaggtgtcagcattattaacgatgtgaacgcctttacggacgaccctcgcaagctcaaattgatggctgacagtcgcgtcggcttactgactatgcacagtagtcgtgaccaagaatataccgatctgacgagcagtatgcgtggtttctttgaacaaaatctggcagcattgacgagtcatggcatcgatattgaacgaattgctctagatcaggggatcggctattcacaagtcgcacatggggaacaggattacgtgatgatgcgtaacattgatgaatttaattatttgcgacgcccaatgatggtggccatttcacggaaaggttacttaggtctattgcttggcctgaagaaggaagaccggctaccaatgacgttggtcactgaagcagcgatgatgcttaagggtggccggatcatccgggtccacgatgttgctgaaaccaagcaattgattacgctgttaggtcgaattgagaatggctattggttatcgaataatgattagtccggatgattttgacgatattacagcgaatggggttaaggactacgatgcttatttcggtactcccacgtacgatgatcacgttttatttgaattgttagtggttggaatcttacaagtgggtttaggctggcgggtcgcggctagtcagttaccagtattgcggcaacatatggcggggctgcgggtagacgccgtagccgccctggacgaaccggattttgaacggctgatgttgactcccaaagtgatgcacaatggtcgtaagttacgtgcaatcattcaagatgcgcgtgctattcaacaattacaggccgagtatggtagctttagcaactacctgtgggcgtttgtcgatgcgacaccaatcattatgccggcgcccgatgatgaattaccgacgcgctcacccctgggcgcccgcgttgcgaaggatttacaccgacatggtttgaccttcgttggaccagtcgtcactcacatgtttttgctggcggcgggattgattaaattgaattaggtagaattaggctggcggatgctggccttttttatttgcttatgcctgcgtatttttgtgagtatcaatgtgtgaatgtaagcaaggtgggggctttaatccggagtggttatgggaagtgtgattattagttccatcgcaatatgaagcgcaagttcacaatgagggtaagcggcaaaaacatatttgaatggtcggtgatgctggcgtgtagaaccagtctaaccgttttctaggtaatagtgaagttagcaaaaacacgtcgcaagagcaagttgtaatggtcttatgacgtgttttagaatgagttgattttgtatccctctgacacgactagcggttagcggtcgtcgtcgtgtctggcaacagccacatcgttaccaagccaatcagccaggccactaagaagaacgccatggcagctggtaattgatagccaagcaaccattggcataacaagataagcgtgataatgataccgataacgcgattgatgatgctcatgtaagtgcctcctaggtggttagctaagaatgaagtgaaccagattatctgaattaataaatattacttaaattatataatgaatgacgttatgtgtgctgcaatgtgcgttaatgtcttaatttaacgtacgaacgtcgaaaaatgctgaatatttgaaaaaacgataccgctgaggttgcggtatcgttgaacctgtgactggtaattagcagtgtattgtgactgactcagatactggttagtgataactacttctagtaccataacgtttcagtaaacggtatagcgtttggtgcatagattttgaatgaataagcgttatccacaaaaatcatgctcactgcatcagactgatggttatactgtgctaaatgcccagcatgagcgggttaattgcatgtctggaaaatacagactagtttttttacttaagaaggttgtatttatctgataagacacctattataaattgcaaatataagtaagacatttaggagtgattggttatgattaatcttgttttctacaaatactacagattctgggctgcaatcgttttactattgctaagcgctaacgtttatccagcaattgttaacggtaatgtcttaggtcgcgaattttggcgaaatggcacaaatctgattaatcttgtttttgtaattgttgctattggctttttaattcaagtgttgttttttaagaaaggtgagccgcgtgcgaatgaacgtgcattttgatcaggtcatggtaaaaaagcatgatttttaatcgcgttatggcaaccaaagtatgagggagtagtcgaaagtctgatatgaaattctctgaaaaactaaaagtgtgtaggaagcacgcacaattgacacaatcgcaagtggccgaacaattacatgtatcgcgcaaaacaatctcaggctgggaaaatgaccacagttttcccgatgttggcagtttagttcaattgagtgatatttatgacgttcggctagacgatttaatgcgggatgatcacttactggcttattataaggaagcagaacgacttcatcagaagagccgaaaatgggtggtcgtctcgtatcgatgcaatttcttgttactggtacttggctacattgactatttgcggccgtttggaatacgaacgtttttggtaccgtttttagtactggtgaacgccatggtattattgtcgtatttttcagattggcagcggttcaagtcaggtaaattgcgtatcggtatcgtcatcacggtgtttattgcatttattgctgagattctgatcaatacaatagtaccgagttatctgaacgagttagcacatgccgttgatgatggccccgctgcgataattggtgaagtggccggtcgcttgctggtcacatcaatactgatattaagtttggtattagctatctttttgaagccaaaacaacgagaacggtcgtagtttaccgagctagtcaatattgatgagtttggaagtgagccgtggcgtctcaaactaacgaaaatgtgtaagacaaaaaacgaccgcatgcttaatagcatgcggtcgtttaaggcggaagagatagtttatacagaaacagattcgatttggatgctgtgtatcataacttaactcacgatgaactaaatcgaactatccgttgtttcataatccaccttgccaagttcaatctgaatcgtgatatgagttagtggaaactgggcgcttaggtccttgttcagttgttccaaaaaggcattattgtcagctaatgttgaacgacagagatggacggtcatggctgtttcagtagtactcatgccccaaatgtgtaaatcgtgaatctggttgacggtgggctggctggttaaataatcagcgattgcttggcggtcaacattgttcggtacagcttctagtgaataattcatcgcatctcgtaagagtccccaagtaccaatcaaaatcacgacggcaattagcagggaaacaacggggtctagccagaaccagccagtcttcaagatgatgaagccagcaatgaccacgccgatggagacgccggcgtcggcggccatgtggagaaaagcgcccttaatattgagatcgtgcttttggcccttcataaagagtaatgcggtaaagccattaatgacgaccccaacagcagcaacgataatgacatcccattcggcgacgggacccggattactaaggcgctggatggcctcgactgaaatggccccgatagcgactagtaaaaagacggcgttgaagagggcggccaagattgatgagcttttgtacccatatgtgtacttatcgttggcgcttttttgtccaagccagattgccagccaggagatcagtaagcccaggacgtcgctgagattgtgtcctgcatcggcaactagggccagtgagccgctcgcaaaaccgtagccagcttccaagacaatgaaggcagtatttagggcgaccccaatcttgaaggcgctggtctgttgttgtatttgatggctgtgtgccatatgaatcacctacttcttagttgaatttatccttgttatggctataatttaaatatgaacgaacaaacatatgaatgactgttcatgtgtattgtaacacgcttacatgacaatctcaattagaaattggagtttatgatggaaaatgaaatggaccatgaaatgatcgtcaaacggttggctgaactgatgccgccgactgatgagttgagtcggatcaccgcaatctttaaggcacttggtgatccgacgcgtgcccggattatctacgctttggccgtatctaagctgagtgtgggtgaattggcgacgggattagccctgacacagtcgaatgtgtctcatcagttaacggtcctcaaacaattaaaattagttgtgggaacacgcaatggacgtaacgtgcactaccagctggccgataaacatatcattagtatttttcagcaagtcgcagctcacgctgaagaagccgataattaggttgaataggtgttaccactgatcagttatgatgagtggtaagcgctgtgggttcgtagtgggcactggtatagatatccatggcctagaagaccgcatgatgaccttgaatataagattgtgcttagcatgacaccgcgaaatggttaatttcgcagtgtcattttttgaactagttatgtttttgttaattacctagttttataaactagatgtattgatatttacactatgtgatggtatgctggtgtcaacaataaatatgaggtgattaacatggcacagtcggcgcgacagtatcaaataacaaatgaagtcctcaactcagtgactcatgggattgggattattttaagtatcgttgcatttgtttttttgatgctcaaggcatatgcggatggtcagcccctcgaatgggcggcgtttattatatatggttgttcgttgtttgtactatatacgtgttcgacgttatttcacggattatactttacgcgcgcccgcgaagtttttcgtatcttcgatcacagtggcgtgtacgtgctgattgctgggacatacacgccgtacagtctactggcgattaagggttggttgggctggacgatcttattaacgatttggattttagcgattgctgggattacggttaatgctgtttggcctggacgtttgaaaaaggtcgaaacggtcatttatgtgttgatggggtggatgtgcctcgccggtggtcggcagttatgggaccatttaggtgtcactggcttctggttattagttgccgggggcgttgcgtttaccttaggtgcattactatatagtttcccacggattaaatatttacacgttatttggcacctattcgtgatggtgggaaccacgttgatgtttttctcaatttatttctatatttaaggatgactgtggggaccagctgctgagctggtcctttttttttagatgcgggagatttgagtcgcggatgacgtcttaaatgctgattattgacattttattgcgaaaagtttttcaactggacggtattcgaatcgtaaccattgcgtacgctcgttaagctgaatgagttatcgccactcagctaacaataattttgaaattaaatggctagatcgctgtagcatagtctagaatacgatttatttttgtcatcaaactgtaatcagccaggcgtatcttttgattgcctttttaaataaacttccgtagaatagtaggacaacgaaatttttagtgaggtgattaagatggcatacgggttattatttggtggcattttcatggaagttttagggagctttttcttaaagcgcgcaaacggttttcggaacttaataccaacgataatggtgttggttggatattttagttcgttagtccttgtaacgcttgcaatgcaacgcctgccgttaggggtgacgtatgccatgtgggctggactgggcacgtttgcaaccgttattttagcggtcgtcgtttaccgtgaacggctcagtctctcacgtctgagtggcttaattgcaatcgtagtcggggcgattttactgaacatttaaatcaagggggaatgatgatgcgtgcatggattcaattagttattgcgattggcgttgaaattgcggggaccagcttgttgaagttatcggctggatttaagtaccccttggttggaattgtgggcatgttactatacggcctagcgatttttagtttctcacgggcattgagcaaaatcccactgagtgttggttatgcaatctgggccggagtcggcacagctgcgaccggcctgattggaatttgggcgtttggcgaaatcttgacgggattgaaaacgttgggattcatggcgattattacgggtgtgattctattgaacatgcctgctaaggcgactaaaccggctactgcgacgccgcgcttggcacggtggcggacccggtttaaccggtaactaaaaagatcgagaatctggctgattttttaagcgattacgcttgaaatgcgccggttgattctcgatcttttttagttgttgtaattaggcttctggccagatttccttagccgtaccaatgactaacgacaacttggcccactgttgagcctcagttaactggttaccttcttcagttgaagcaaagccacattgggtcgatagtgctagattacgcaatggcaccttagtggtcgcagcttgaactcgttctttgatcacagtggttttttccaattctggaaacttagaggtaaccagacctaatacgatgcgtttgtggtcatcatggttccaaatctggtctaacgcttcgaagccacccgcccgttcgttatcatattccaagaacagcccatcatagttaagctggccaaggtagggtgcaaccacgtcgtaactgcccgagaagaggtacgtggatttaaagttaccccggcagatgtgggtcgtgacggtcaagtcgctcggtaggtcagctaatgctgcgttaatcactttaacggcatcggtcgcccacttagtgtaggccgcgtggtcagcttcgggatcattgagtttgctaattaagaaagcccacgtcgtatcgtctaactgaatatagcgacacccaaggtcataaaaatgttgaatggtatcgtgataagcttgagcgagatcatttaaataggcatcccagctgtcatagaatttggtccaattgtcactccgattatcgcggaataacatagttggtgatggaatcgtttgtttagcgagtacgccagcgggaacgattgattgtaagtattcaaaggcagcaaagaacggatggtcgggattatacgcgactttgccaataagttcagcgttatccgttcgagtatggtcccccttgaacttatagctttgatggtagtcgtacttgccaacaccagttaagccccaaaggaaatctaagtgccaccagctgcgtgaaaattcgccatcggtcacggctttgagcccgagtttaacttgttcagcgaccactcgtttgatttcagtgtgttggatttcaagttcttgatcacgcgtaatggtaccggcggctaattgttcatgggcctttttcaaactagcggggcgcagtaggctgccgacgacgtcaaaacggaatggggcggttaaagttgtagttgtcattaaatatcaaactccttaaattttattgggaacgaaaaaacgtcgtcctgaataatattaatcattattcaggacgacgttgggccgtggtaccacctgagttctaggctagtgaactagtctactcgatacagctgccaaatgattggcaattgctaacgcgggtaacggttgttaaaccggctttagttaatgctggttgctttgttgctcaccagacactcaccaaaacgaactagggagaagaccatcttcattggttgtgccggtaccgtttcaccaacccgatactcgctgaacagcgacaccaattactcatcttttaatcgttctttaattattgacacctatcatactggtaattattttaaatgtcaaatttaatttaaggccggaatcggtgggcgggattaatccatagtcatgctataatgcaagtaacatgcgattgggggcaaattatggatagaatcattcggttttttaagcgggatgacgttgacttgtacttaacgttggcgttattaatcatcattatttatttaatgcgcgggtttgcgacagttgttctattaacgacgatttttgcgtatttgggcattaagcttagtcggtggttaaacctccgaacgcacttaccttattggattgccgtcattgtggtctacgtcggcgtgattgcgttgtttatcggtgcgctatcgtacgcggcgcctaccctggtcgatcagttgaaggtcattccagatatgctggctaaagcaatcaccaatcacccggtattgaataagaatattgataaatgggtcaaccaagccattcatagtagtgaattgattcaaaacgggaaggcgttactcgtcaccggtattaaaggactgagtgaggttgggactggttttacgcacgtcttaatggcaatctttttgagttttatctttgcagtttcgcggggacgaatgatggtctttggccgccagttcttgcagtcgaagtttaaaaagttcttcacgaacgtttactatttaacgcataaattcgttatgattctggggcggattattgaaacgcaactggtgatttgtacgatcaatacgattttgatgacgattgggttcatgattattgggatgccaagtatcatggtgttgtcgatcattgtctttatcttaggcttagtgccggtggctggcgtgttgatttcaatgattccgctaaccttactggggtttgcgtcgggtggcttgattcgagttgtctggatcatcgtgttggttattttgattcacgccttcgagtcttatttccttcatccacggctaatggcggatcggactgatttaccagtctttgtcacttttattacgttgattattatggaaagtctattaggggcctggggcttgatcattgggattccaattgtttcattcttcctagacattttgggtgtgcagaattctgagccgcgacgcgtgacgtctcaaatagcgaaacgtgaaccttagtgtgattgtaactgtactttaccggtagcagactttgtatggggtcgggtgatttatatgaacagtagcttgtgactgcgcgtaaaggttatcaaagataattgtaagctggtatcttcgaagtggattactttcgaaggtgccagctttaattaattactgcttaaagatgctgatagtgacaattacaagtcagactgttagtgttaagctatcagcgttctaggtggtataaggttgacttatttcgactaagtgttagagtgagcggttggaatctgtttaggagggggcgattacgattaatcaatcaaataatcaacatcccgtgttagatggctggcaagaaattgaagctgaccaaattaagcgaatgcaaggtgcgttgtggcatttgttgggcaatgcgatagcatatttaagtctatttgtaatcgaactagtgcttgcaacgattggtcattcgcaatctttgcacgcggatgcgtttaataattttgcgggtattgtttcatcggggttgttatcgcttggtatctggggtggcattcataatcatcaatcacatcaaagtaaagtgaccgctttggacggctgggaggccgaacgtcgcaatcgattgatgcgatttcgtttacaagacttattcacgttaatgagtggggtcattatgttagttatggcggtacaagttattgtgagtggtgttagtaatttgtttaaatcacacacctttcaagcagtgagcggtgtaactgtttggggagctgcaatcgcgagcatcgttatgttagtcgtctggtactttaatcgtcgcggtgggcaacaattagataattcgacgctattggctgcggcaaaggatagtcttagtgatgcgttaacgagcattggcactttaatctcattaagtggggtcttactattcaaatttgcttggttagatagtgttgcgagtatcgtgattggattctttatttttgccgctgggttacaaatttttcgggacagtgggttgcagctaattaattacagtgatccacaagttgaaaaaaattatattaatacgattcaacaaattgatggtgtgaatcaggtcaatgcaattgatgtccagtattctgggagcttagtggccttgtcgctggttatagcagtgtcaccacgaatgacagtggcagccagctttcagctcagtgaaagaatcgagcaagtgatgcgaaatcagtatggcattattgacactaaggtaatgtttatgccgcaaacataagtgtgttgactgatagattttaataataaaagactagtttcaaggttgaattccttgaaactagtcttttatttatggttggcgcgaattccgttgcggcgtgcgggcatggtggaccgtcaaattcgttagtgtggcgtctgttgctggtttcgtgaacaaaggaatcgtctcttccaagacatcgctaaacgctaagccgtaccagatagcaggagatggggtgatgttttgtagtagaacgcgaccaccaattagtagtcgatcgaactggcccatagttgggttgctagcaaggtccatgatctgctgattctgaacgacaaatttaaaatcgccaacttgacgaggttgtgtgattccgtaacgggaatattggggatcgatgctgtgatctgcaattaagttcgtgacaatttggcgcaaatataaattaatgtgctgtgatttacggaaacctaagttgagttgaacttccacgatatttcgagtgcctagcatgtcaatgctgtaactacaatcataaggtcggttggtttcattaatggtaataaaccagtaaaccttagcgcgtttaggccgcttatctaaaatcgagtacagaattgaccgtttaacccggtgttgatggtcgaccttagccaagtagactaagttcgttgcaaatactggcaaatgatcatcgtggcttagctggatcagttgattacgataatctagcagactaatctgttcatttgcctggttgtaacgcaaacgccggcgattaccaaagaaccaaacgaccataatcaagaaaatgacgagggtcagccccaaggtcaaatagccaccgtgaataaacttggtcagactagccgttagaaagacggtctccagtgcgccaaagccgaataataaagctagcgccagcgcccggtggcccttcatgtgaatccactggctaagcaggatggtcgtcatcaacattgttaaggtgatggctaaaccatacgccgcttccatgtgagctgaagtttgaaatagccaaacgattcctaaggtgaccagacataacagccagttgatcgcaccaatataaatctggctccgaacgttactggggtgcttgataatcatacgtggtaagaactttaaaccgaatgcttcgtcaactaaggtataagagcccgtgatcaaggcctgtgacgcaatgatggctgcggccgtggctaagataatcattgcaatttgaccgcccgcaggaaccatggcatagaagggattgacattggtggcattgcgccatgccgcatcctgataatgggttaacatccacgcgccctgaccaagataattgagaatcaaagtcgtgtatacgaacggccaagtggcgtcgatgttggctttaccaacgtgacccatatcagaatacagcgcttcagccccggtcgttgcaaggaagacactaccaagaatgaaaattcccattttattagccggattgaataagacttgtacggcgtaaacgggtgagaaagctttgagaatgacgggtgcctgactgatgttgatcagaccgaagatgccgatgacggtgaaccagagcaacatcatgggaccgaatgaccggccaacgacggcagtaccaaacccttgaatcataaagagaaccagtaaaataaccgtaacggttagaggcacgagccacgggtactgggaaaaagcccccagtttgggtaatccctttaagccttcaactgctgatgtgactgtcacagcaggtgttagggtgccatctgctaacaaagcggcgccaccaatcaacgcgacgaaaattaaccatttggcccggtgacgaaccagcgcatacagggcgaaaatgccaccttcatgatgattatcagcgcgtaaagcaatcaggacgtactttaccgttgtaatgagcatcaacgtccaaaagattaatgaaacactgccgataacataatcaggtgttgcattcttaagttgccccgcgtcattgatcagggcgttcataacgtatagcggtgacgttccgatgtccccgtacacgacgccctaatgtgattaacatgccaatcaatgaacgttcctgaatccgttgcttacgcatgaattattgacccccacttcaattagaactgtgactcatactatactagcttttttcaaaaggggttaaccagacaaactaaaaatttgctcatgttaacaagtttcaacttacgtttcgttaggtgaactttacttcaagttgagtacaataagtaatccggttgttcgtatttagaggataaaaaatgggccgtttcattccagttgataacgctgaaatgaagcgacccattagttttgaatttattagtctagtcaattatttctcatcagtggctgtattcgtcttcaactgggagtgtttaacggaatagccaaagtaaacgaccataccgatggctaaccataccacgaagcgaatccaagtgacaggcttcaggttgattagtaggaagacacaacagatgattgacatgattggtacaaacgggacccatggcgttttgaagggacgccgaagatctggttgtgttttacgtaaccgtaagatggagaaggaaactagggtaaaggcagtcaaagtaccgatattcaccagttcagctaagtcagctaatggaataaagccacccatgattgcggcaatcgacccaaacaagacggttgatttaagtggtgcaccggtcttggcgctaatatcgctaaagacatgggggagtaatccatcccgcgacatggagaaggaaatccgagtttgaccgtagagacagactaacattacagtggtcataccaagaatcgcgccaaggtcaatgattccggccatccaattttgaccggagtaaataagaacggccgagatcggatgatcaatgtacttggcaaacgtttcaaatgggaccacgccagtcatgatggctgatacagccacgtagagaatggtacagataccaagagacagtaacatggaacgtgggagtgttttggatggttccaatgtttcttcaacgctggatgaaatggcgtcaaaaccgatgaaggcgaagaaaacgctagaggctgcgccgaagacccctttgaagccaaatggtaataacggactccagtttgccggtttgatgaagcgcaccgcggtaaagatgaataaaaaaacaacggctaatttaatcactaccatgacgttattgacgcgtttagtttctttgaccccgagagacaataaagtggtaatcaggataataatggtgaaggccggcagattaaaatagctggtcacaccagggacggaacctgcagctgccgacaaagcagcgggcagtttgaggccgaagcccgccaagaatgattgaaagtagcctgaccagcccgctgaaacggttgagacagcgaaaaggtattctaacatcaagtcccagccgataatgaatgcaacaatttcgccgagggttgtgtaggcataggtgtacgctgacccactttcaggcaccatcgcagcgaattcagcgtagcagagtgaagcaaacaggcaagcaattgcagctaagacgaatgagatcattaggccgggaccagccgtcaaggcccccgtaccagttaaaacgaaaatcccggtcccgatgatggccccaattcccagcatcgttaggtcaaatgttttaagttcctttttgagcggactgtgataagtggctaacatggcattgatatcttttttgcggagtaaccgcgtgtgtgataaatccataatcatcgccccatttcgatgtgatagctttagtttaatcggttttgacaaagttacgatggtcaatctgaccaaaataaatattctgatgggctatagtgactaaaagccaaataattggacgcaatcgcgcgacatcctgcgacttcttgctgattgtctgactaatcgtgattaattagctatggtattcaacgcctattaatagggtgatatagcgaacatggcggggattgtttttctgaaggttaacttaccttgtgattgcgattgtgagtggggattattgaaggaccttaggaaatatggttttggctcactaaatcgccacttgattgatgcaacctgaagaactggagagagtgagcggcttattggaacccttttttattgatatcgattatatgaataaaatgggattatgattatccttaaagtattttgatgaatcaaattggataattaattttcttgcaggtaaaacggcctacgggaaactgatgtgattcgtctcgaccttccaatatcaacatttattgaccacatttgcataaattttattattccaaatacaaacttgattgcaattctaaaattaacaaatacgaatgatattcattagttggtgacaatgggtttggcgtttgctatattcaaaaggagaacgcaaatcaaggcctgaccaatattaaaggccacttgaaattagtggactactgggtctgctgattgttgctggtatcgaagctagtgattgcaatgactggcagatcttgaatcaaaaaaggggatagcaagctgattggtttggtgttggtaataaaagtattgatactagtacgtctgcattcataatgtataaagcattgccagactatttccagataataaagttgggaggcattagtcatgtcgtcatttcttaaagcaaagaccgttacacattacgtgctttttgcaattatccttattagtagcttctgtttatacgggtacgttaaaaatcgtattgagttaaatcaagcgaggactgtactaacaacaatgttaaaaagcagtccttatgacgtgcgtgtctcgagaaacacaataatcaaggaagaatccggcccttttagcggcattatttggtatgaatacacatttgcaaccagccaaacattagcggaaagtaagaaatacaaaaagtttttgcatcagtcatcaaaaaatatgaccctgaaaaattgccccatcgtctatcgcgtaatcgttagaccgccgactaaaaaaataaagcattggacgggtgaaatctatctcgataccaatcaaaaactcagcgcaacgggacgttcgaattacgtccaagctttaagcgacaagtctttgtgtgaactaacgatttcataaaaagccattaaccaggtggttccaatgatttagtttactatcggcctacattgaaaaatggggtaggtaatgcgttaactcaatcaggccatacaacagatgttcagaaggggtggtcgaatcgagttgtgttgattgtctaatcaacgcaacttttttatttgaggatttaacttggtcaaaaatatttgttatgagtttctccggtggtagcagaggtatactgcaatgattgaataaaccgatccgtaagataatgacccacaaaaaaacagctgggagacttcaccagctgcttcaaagatttgatttattaacgatgtcgtcgatagtaacggtagacgaccgctaataaaataataattagtaaaataccaacggccgctcgcggacccgcaatgtgttcggttaagtgaaacatgcgaatggggccgaggccgtgaattccaagcattgcaagcattgaacgcgccctccttaagcataattattagctatttaatgattaaatgcaaaaattatattcgcaaaagattattatctcactactatctgcggtaaaataaaaccatcattaataaattaggtgggtgcctccattgcaatatattcagccaattttctatacaattatcgttttaaacgcggccgcggcgttcgttaccgtgttccgggatcgtaatcgggacatcgcggccacttgggcttggctactcgtgttgatttggttgccgattattgggtttatcgcgtacgcctttgtcggtcgtaagttaccaaaaaaccggttattccggttacgtaaagagacgcaaattagactcgaacagatgattcagcggcaacgtgaagccctgggaacggaattgatgcccgcagatgcggtcactagctcggttcgtgggatggtcagtttattcttgaattccgatggcgcgttactaagccgtaaaaaccgggtcaagatttatacggatggacatgagaagttccatgcgatgttccaagatattgaagcagctaagaatcatattcatattgaatattacacattttataatgaccagattggaaatgaattattacaccttttagagcggaaagcagcccaaggcgtcgacgttcgtgtcttgtatgatccgtgggggtcgatgggcacgttccgcagcttctttaagcatttagaagaacttggtgggcatgcccgaccgttcttgggtgctcattcagcgattttggacttccgtctcaacttccgtgatcaccgtaagatcgtggtaacggatggccgggtcggctacgtcggtggttttaacgttggtgaccagtaccttggtcgtagtaagaagtttggttactggcgtgatacccatttgcggatcgtcggttcaggagtttttgaattgcaggaacgtttcattcgtgattggaacgccaccgatgcggaacatcgaatcgtgccagacgttaatatgttcccagtcattcgcgttaaagggaatacttcattacagatcgtctccagtggtccggacagtgatgcacaacagattaaattgggttatattaaaatgattatgacagctcaacaccgtttatggattcagtcgccatacctaattccggacgattccgtattagatgcgattaaaatcgctgcgatgtcaggggttgacgtccgcattatggtgccggacaaacctgatcatgcctttgtttaccgggcaacccagtactatgcccgggaactggcagatgctggtgttaaaatttattattataataatggctttattcatgctaagaccattgtcattgacggtcaggtggcgtcagtgggctcagctaatatggacttccggagctttaagctcaactttgaagtgaatgcctttttatacgatgctgatttagcacaagagttggaacggattttcttagaagatcaaaaaatcagtagtctgattaccgttcaagattttaagaatcagtcattctggttgaagttcaagcagacgttctcacggcttttatcaccaattttataatcaaacaaatgaacgggcgttgctaaaaagctgattttaaagagtcaaccactctttaaaatcagctttttagtgtgcttaatcgtccaagtacaattggcgcagattatttatatctgcgacggatagaccaagcacttctcgtaaataaccaataccattgccgtagaggtcgtcgaaaacccgaaagaccatcttcatattgtcggcttcaacagccatggcaacgttgaattggctagctaggtcaccagcattggccttggtaatgatcgtagcggtatccatactgtctgcggccatgaagacggcgttagtgagcaggtagtcctgcataatcgtttcacgagggacgtctagggccgtcataatgagcgcacccgcgacccccgttcggtctttaccagcagcacagtgaaagagtaccgattggtcgggctggtcgttggtgaggagggtcgcaaataaattttgccagactttcacggcatgactatccgtaaccatttgcgcatatgtttgtgcgttgaaggaatcatcgacgaccattcgcttgatgagccgttttaaacggcgatcaaagcgacgattgtcagtgaacggatagacagacgtattaatatacttagtattcttgggataacggtctggagacatctcagcttcattggcttggcgcagatcgatatcataacggagtccgtagttatccaagtaggtgagatcgcggttagtgagtagtgacatgccaccgcaacgcagcagtttttgccacttgattgtctgaccagcggtgttctcataaccccccagttctcggaagttgatgccgtgttctagtcgtaagacccgattgtgttccatagtctgattacctcgattagtgatttagctttattataaccgctttcattgctggtgtcaggtgtgattaacaagcagtcgttaaagtcacagccgccattttttaagtaggtacgttggtttggaaacttcacaacagaatcattgtcaaagtgaccggccgtcacgacgaaactttagtgtggtgggatttataagacgcttgatgaggttttaacatgaaaataatgagaaaacatcttgaaatcaaagctctaaccgcttatgattgcggcacgtatttttatttagtatcaactaacgactatacaaaaggtggggacacaatgggagcaaaaaaaggctggttggcagcaaccttctttgctggaacactattactagcggggtgtgggagctccaaggcaagtaatcagaagcaggttaagactgaccatttcaactacgtgtatgtgcaggatcctgataatttcgattacaccgtttcggcaaagcagaataataccgacgtggtatctaactttgaagacgggttgcttgaacggaatccgtatggacaattaactggcgacttagctaaatcgtggtcggttagtaaagatggcaagacgtacacctatcacttacgttcgggggtaaaatgggtcgatagtgaaggcaatacgcatggcaccgttaaggcccaagactttgtgaccggactaaaacatgcggttgcggcaaagtcggagcaattatacgtcgttcaaaatagcattaaagggctcaatgcttatgcgacgggtaagactaaggacttctcaaccgtgggtgttaaagcactcaatgcgacgaccgtgcagtatcggttgaataagcctgagacgtattggaattccaagctaacgtacggcgtgatgtatccaattaacgcgcagttcttaaagcaaaagggggctgattttggtaaggtgactgcggatggcatcctgtacaacgggccatacgtgcttgccaactttacctcgaagtccgtcttaaagtataaagctaatcccgggtattgggataagtcgcacgtttatttaaaggcggttacgcttacttttgatgatggcagtaatccagatggcctttataaatcgtttgagaagggcaattacacctatgctcgggtttatccgggctcagctggatataagacggttttaaagcagaacaagaataatgttctgtggaccagtcaagattcgtcagtctataactttacttttaacttgaatcgccagtcttacaacgataccgccaagaagactgatcaacaaaaggcggatacgcgtaaggcaattttgaaccagaatttccggttggccgttcaatttgcatttaataaagccgattacaacgcgcaggttaacgggaagattggcgctaataaagggttgcgtaatgaattaaccccaccatcatttgtttcgattggtggtaaggattatggcacgcaacttcaggaagacatgcagaatactggcttcagtgatattaagttggcagatggtcaggatggaacttatcaaccgacgaaagctaaacagtatttcgtcaaagcaaaggctgaattgaaagatcaaggggttagtggcccgatccatctcgatttgccagtagatgaaaaatcatcattactcctgaatcaagctaagtcgtttaaaaagtcagtagaatccacgctgggtaaacaaaacgtcatcattgatttacaactgttgagcgatgataagtataatgccgcgactttcaacgcaacgacgggtaaaactagtgattttgatattagtaatggatctggttggacgccagactatgacgatccgtcgacttacctcgaaatctataacccggtttctggggcgaacttgcacaccctaggattagatccaaccgcaacagccggtggatcggcttccaatgcggccgcaatcaaagcagttgattttgatcaatacagtaagttattggccaaagctgaagccattaatactgataccgctgctcgctataaggcgttcgctaaagctgaagcttggttgttgaatagtgggatcgtgattccaactaattcgggtggcgctggggcgattgtcagccgaatcgagccgctcagtggtccgtatgcaccatcagggcttggtgctggtcgctataagtttttgaaagttcgggaaaatgctgtcacgacgtctgaagccaagaaggcgcgggcggaatggctcgcaaagcggaaacaaattgcggaagatatgccgacaaattaggtcggcccttgcgtgaaggaaaagagggctagcaagactagcctttttctgtatctgttgttactaatgtgtcgagttatgaaggaagtggtgggtcgtgaagaaatacttgttttaccgggtgttgcgatcattgctgagcatcttcttggtcacaacgctcacttatatcatcatttattcgttagttccgcggcgtgatatttttaaatccgatccaatgatcagtaagctgagtactagtcctgatcagttggtcgattacgagaataccgcctatggcaagatgaattatatcgactatctggatactaagtcactcctagcgcaagcgtcaaatcgggggcaaacggtgacggctgcgcacactgcggtcaatattaaccggttgcggcagtgggcaacgcggtatcactatgcgcttcatcgctatccgcaaagtgggaattattatgcgacccgtgagttacccttgtggcaacggttggtgaagttctattcgggactaatccaggtcgatacgccatgggccattcacgatccggctaatcctaagttaccacggtatttaaaaatcagccacgatccgattgtcggctggagcttgattgggtctggcacgcgctacaagtatcaattatatgtcaattcgatgtttccatacctacatgaaaacatcgtccatttgaacttagggatttcctatccaacctatgctggcacacgggtcactgaggtgattggtagtcatcagggggaggcggtgacgcaccagtatacgtttgcaaatggtcaaaaaatgttgagcactgatgatgtctatacgcgtcagtaccagccgactagtcggcaagatgcaactgcccgagcgcaatacggtgacaattacactgcggtggtccaagagaatcatgatccgtcgatgattggaacttcctttaaagctggacttggtgcactgatcattgcctatgtgattgcgattccaatggcaattttgatggcccgttataagggtaagtggttcgacaaactcggtacggggattgtgaccgccctaattgcggttccgagcttagcctttatttatgcgttccggtacttcggcagtgccgtctttaacttgccagatacctttccaatgagtggtgcgagcgtactggcatcgtgggtgtcaccgactttgatcctggggttgctatcggtttcaggcttagtcatttggtttcgccgttacatggttgaccaacagtcaacagactacgttaagtttgccaaggtcaaagggttgactgataacgagatttatcggaaacacatcttcaagaatgcttcattaccgatcgtacaaggattgccagggtcaattatcggtttgattggcggtgcgacaatgactgaaacgatttttgcaatgcctggcatgggtaagatgttgccggatgcgattttaacacataacaacccgattgtgattgggctagtctttatctttacgacgattgcggtcttttcaatcttgctgggcgatatcttgatgacgattgtagatccacgaattaaattgacagcaacgggagatgattaggatggtaataggtcgagataaaccgcaacctgaaaaagtcgaccagaatcaagttagtaacgcggattttgaatttgtgacgttgaatgatcaggccaccgaaaagatcgaaacgccgcgatattcttactggcgctccgttgcgaaagtcttttttgccaataaactgacgattgcgatgttcgtactgatgttgataattttattattggcgttcatccagcccttgttcagtggctatagtctgatgaacgttagtaacatcaatgattttggcgcacgctataattggccgagctggcactactggttcggaacggatgctgatgggaagtctttatttgatgcagtctgggcgggagcccgcacatcgatttcgattggcgtgattgcgtcgttgattacgacggtgattggcgttgctatgggagccttttggggcaactccaagaagttagaccgggtgatgctggagatttataacgtcttgtccaatgtgcctaatttactgattattattgttttatcgtatacgtttggcaacggattttggaatctgatttttgcgatgacagtgacgacttggcttgatacggcgtatttcattagggtgaaagtcatccttcgacgcgatcgtgagtataatatcgcctcaaagacactggggacgccgatgggacggttgatcattcgtaatgttttgccgtatctgacgtcagtgattgtgacccaattgtcccaactattaccttcgttcatttcatttgaagtctttctgtcatttttaggagtgggactgagtgccaacgtaccgtcactcgggcggctaatcgcccaatattcaccagatatgaccagctacccgtacttgttctggttaccggtaaccgtactggcgctgattaccgtgtcgttgtacattgttgggcaaaatttggcggatgcatctgacccgcggacacatcgttagccatgtggtgataagtcaagaaagtaggaggatggtgtgatgaaaagaccagttgtattagctgttgatgatctttcggtgggctttcaagttcgcgggcagcaattaaaagcgattcgccatgtttccatggcattatatgatcaggaaatcctcgcattggttggtgaatcagggtctggtaaatccgtgttaacgaagacctttacgggaatgttggaagataatgggcacatcaccggtgggcgtattcagtacggtgatacctgtttgagtgacttgaagacggatcgagagtggaatcagattcgcggaaaagggattacgaccatttttcaagatccgatgacctcactggatcctatcaaaacaattggttcccaaattgcggaagtgattatcaaacatcaaaagaagtcggctgcggaagctaaagcgcaggcaatcgagttaatgacccgggcgggaattcccgatgctgcagaacggtataacgaatatccatttgagtactctggtggaatgcggcaacgaatcgttattgcggtcgctttagcctgccacccgcaaatcctgatttgtgacgaaccgacgactgcgctagacgtaacgattcaagctcagattttggatttgatcaaacaattacaatgtgaataccatttttcaatcatttttatcacgcatgacctcggtgtcgtagctgcaattgctgatcgtatcgcggtaatgtatgccggccaaatcgtagagctgggaacctgtgatgagattttttatgacccgcggcatccctacacttggagcttgttatcggcgttaccgcaactggcgaccgctgattccggcttgtattcgattcccgggacgcccccgtcactatttcacgatatcaaaggggaggcctttgcgccgcgcaatcggtatgcgttagcggctgactttaagcaggaaccacccaaattcagggtgagcccgacccattgggcgaagacttggttacttgatccccgggcacctaaagttgagaaaccggccctgattcagaatctacacgcgcgcctagttgccttgaccaagtcagaaatgcaaattggtcagatacggggagggacgacccatgactaatgaaagaacgccactcttagccgccaagcatctggagattgcctttggccaaggaaagcgggaattcgtggcggtcaaggacgctaattttgacatttatcggggggagaccttggcactggtcggtgaatcaggatcaggaaaaacgacgattggccgcgcaattctaggtgttattccgactaagaaagggacaattgcgttccatgaacaactcattaatcagcacttagcaatcgatgcgcaacgggaagtgatgcgcaagattcaaatgatctttcaagacccagccgcgtcactcaatgaacgggcgacgattgaatatattatttcggaagggttgctgaattttcacctctttcattctgaacaggattgccgtgatcaagttgagcagatgattaaagcggtggggttgctaccagaacatctttatcggtacccccatgaattctctggtggtcaacggcaacgaattgggattgctcgcgcccttattatgcggcccgagttagtcgtggccgacgaaccgatctcagcgctggatgtctcgattcgagcacagattctgaatctgctccggcagtttcaacaggagagccaattatcatacttgttcattgcccatgatttatccgtcgtacgctttattgcagaccgtgtggccgtcattcacaacggccgtgttctggaacttgcaccgaccgcggagttgtttacccatccactacatctgtatacgcaatcgttattagccgccattccaatacctgatccacagttggcacggcaaaagcaactcgtgacttatcacgagtcagttcacgattatacgactgatccagctcaattcgttgaactagttccgggacattttatctatgccaatcaatcggagctggtcacctaccgtcaacaactgtctatgacgtaaggccgaagctggtcacaggtacttcgaactaaaatctagcaagtgaacgtaaaagaaggacacaaaccagtttggcttgtgtccttctttaattagtccccgttgtaaatcgaatttttaactaccacatagtcgcacttagtaatggcctttaaatcccggccaccggcatatgagatggatgattgtaagtcttcttgcatctcgtttaaggtgtcgactaagcggccccggtaaggaaccagcatttgtttaccctcaacgtttttatgttcgcctttttgagtttcactggcggaaccgtagtattgcttataagtcttaccatcgatttttaaaatgttgccgggtgattcttggtgtccggccaacattgagccaatcatgaccatcgtagcgccgaaccgaatcgacttggcgatgtcaccattggtccggacaccaccgtctgcgatgattggtttgcgagcggccttggcacaccaccggacagcagctaattgccagccgccagtaccaaagcccgttttgactttagtaatgcaggccttacccgggccaacgccaaccttagttgcatcggcaccagcattttcaaggtcgcgaacggcggctggtgtggccacatttccggcaattacaaaactatccggaaggacgtctttgatgtgtttgatcattgcaatgacactgtcagcatgaccatgtgcgatatcaatcgtgatatattctggcacgatttgattagcagccaggtcgtcgataaagtcatactcgctggacttaacaccgaccgaaatagatgcgtacagttgcgcggcatgcatcgtttcaataaaagcacggcgggtctcgggggcgaagcgatgcataatgtagaagtagtcgttagtggcgagccacttggcaatctcgtcgttgatgacggttgccatattggcaggcaccactggaatcttaaaacgacggccacccaattctacggtcgtatcggcttccgaacgactattaatgacacacttgttcggaattagttgaatatcttcgtaatcaaaaatctccatgcccatgatgcaaaactcctttaagttaattcacggtgtcgcgttcaattagccccaaatgttgtgatcgataacgttagtttgttcgcgatcgggaccaacagagaaggtggcaattttaacgccgacgagttcttctaatttacgcaagtagttctgtgcattagttggcagttcctcaaaggttttaacgccagtaatgtcttcgtcccagccaggaacttcttcatagataggtttgcaagcttctaattccttcagactagcagggtagtgatagatggtttcgccgtttaagtcgtaagcggtacataccttgatggtctttaagcccgtcaagacgtctaagcagtttaaactaagatgagtaaacccagaaactcgtttagcatgccgtaatacaacgctatcgaaccaaccaatccgccgaggacgtttagtaacggtcccatattcatgggccgtttcacgaatgaaatcaccgacttcgtcaaagagttcagttgggaatgggccgtcaccgacgcgggaagtgtaggcttttaagaccccaacacagttatcgatcttagatgggccaacaccgctcccaatagtaacaccaccggcaactgggttagatgaagtaacgtaagggtaagtcccttgatcaatatccagcatgactccctgagcaccttcaaataggacgcgttgaccgttatctaacgcatcattaatgacaacggaagtatcggtgacgaatggtttcaaagtttgaccataagcgtaatagtcatcaaaaatatcttcaaatttcagtggttctaagtcataaagcttggtaataatttggttcttttcagctaagttgcgcttgagtaacgccgcaaaggtgtccttatcaagcaggtcggctacgcgaatcccaattcgttcagccttatccatgtaggctgggccgattcccttattagtcgtcccaatcttgccaccggctttagctttttcttgagcgccatctaatgtgatgtggtaaggcaagatgacgtgtgcacggttagagattctaaggttgtcaggattaacgcccttgtcccgcaagtattgtaattcttcaactaatgacttgggatttaagaccacgccgttcccaatgacagctaacttatcatggaagaaaatccctgatggaatcagccgtaatttgaaagtttgcccattaaatacgatggtgtggccggcgttatcgccgccttggtaacgtgataccacatctgcttcctgactcaaaaagtccgtgatctttcctttaccttcatcgccccactggctacctactactacgactgatgccatattcttccacctcattaaatagtttaattatgaataattaatcctaaagagtagttaaacgttcaccactccaacaggaaagagtatagcaactttaacgtcaaaacgcaacccaaaaaccgaatgttcttgttttgagcacaaataatcgttcataattaaggcgaattagttcgaaaacaagtccttaatatggaaacgaagtgaaaaataacagtattttttcattgttcgtctctattaattactcgaggggtatgctataataatgttcgtgttttgttagtgaatacctaaaaagaaatgaggattagcaatgattgatcgttatacgcgtcccgcgatgggcaaagtatggtcgttagaaaatcagtaccaagcatggttggaggtagagattgctgccgacgaggcctgggctgaattagggaagattccagcaagtgatgttgctaaaattcgagagaatgccaagtttgatgttgaccggatcgcggagattgaagccgtaacgcatcatgatgtggttgcttttacgcgcgatgtttccgagtcgttgggtgcagaacgtaagtgggttcactatgggctgaccagtactgacgttgtcgacacggcgcaaggttaccggttgaagcaggctaacgcgattattcgccaagacttacaagatttacgggcgacactagcacaacaagcgaaaaaatataaatatacggttgaaatggggcggacacacggcgtccacgctgaaccaaccacgtttggattgaagattgcccggtggtattctgaaattaatcgggatatcgagcgttttgaacacgcggccgcgggcgttgaagcgggtaaaatcagtggagccgttgggacttttgcgaacattccaccatttgttgaagaatttgtctgcaaacaacttggattgcgcgcacaagaaatttcgacgcaagttttaccacgggacttacatgccgaatacattgctagtttggccttgattgcaacaagcgttgaagtgtttgcaaccgaaattcgtggtttgcaaaaatctgaaactcatgaagttgaagaattctttaataaaggtcagaaaggctcatcagcaatgccccacaagcgtaatcccatcggttctgagaacgtgacggggttggcacgggttattcgcggccacatgatgaccgcctatgaagatgtgccgttgtggcatgaacgggatatttcccactcttctgcggagcggatcatcttaccagataccacgattttagtggattatatcttaactcgaatcaataagattattaagacgctgacggtgttcccagaacggatgaagcaaaacatggatgcgacttacgggttgatctacagtcaacgtgtcttgctcaagttgattgatacggggatgtctcgtgaaagtgcttatgacctcgttcaaccactgacggctaagtcatgggatgaacagttacaattcaagccacttattgaaggtaacgccgagattcgtgaacatttggaccaggctgcgattgatgatgcgtttgactatcattaccatcttcgccacgttgatgatattttcaaacgattgggattagacgattaatttaaaaacgatgaagccccagcgatgagtaatcgctggggcttttattatgattaaaacgtgctaaaaagatgggctgtttattcgtcagccgatgcgcgtcctatttcgacctccggggctggggacgattaatggctatttttgagcttgataatggcacggtttaatcatgcttcatactaaacgataactagcgcaatgcgtgtaagtaccttgatttcagttcaagggaccaaatgttaggtgcgtcgcaatcagaccatacccaagtgccatatgacgctgttctttgcgcgtgaggcgctgtaattgggtgtgaacgtattggtagaggtcacgatgctggcgtggtagagtcgttgggaccatatagttacgataataggcttgatatagctggatggttacttgctgtggcgaaacgttgttattcaggtcgattgcagctgccagtagcgcttggcggtaggaatcggatggttgattggtaatcggctgattataagcagcatctactaaggtaaataatttttgagcatccacatccattgttaggaccaacctttcaatcgttgagataggcgcaattatagcatggtcagtatgcttgatgtgcaggcccgagttggtttctaaagtaatggaacgaacataaccagagccgccaatgagtgggggtcattggcggctctggttattaataagggattaatcaagcggcggtcgcagcagtgttttctgttttaagcccggtgccaagctgcgtagccgatggttgggaaaataccaatcaaacggtcgatttgttcgcggtctaattgatattcgatagctggtagtagtgcgttgacggcatcttcagcttgatcactgatttcagtcacgccaacgagatggccgtcttggtcatggacctgtttactagcggcaatcggttccttggagacttgataataccagtaatctgctaaatcgttatcactaacggttaagccggccttttcagcagccggtattttcatgccggcttgcgcaattcgtggtgaagtaaagacgaccgatggaattaccggatagtcaatgggagcactggtttgaccagagaacaaacgcatcaagtatttggactcaaagtaggctgcaggtgtgacctttggcaagtcattggcaaggacatcaccggctgcatagatgttaggaacgttggtttgcaagtggtcgttgacataaatgccgtggcggtcatatttgacgccaatccggtctaagcctaagccatctaagtttggaattcgaccagtcgcatctaggatccagtcggtcgttaattgctggtggtcgccataactaacttggaactggtcatcctgtttggtaaatgcttgcacgttggcatttttgatgaaggttaccccacgttcagttaagtcgtcaaccacttgtgcaacgaatggttggtaaaaatcacggagggcctggtcgccatgtaacatgactgtcacttgggcaccggccgcgttagcgatggtggcaaattccataccaatatagcctgcgccaatgatgacgatactttgtggtaaccgtttaaggttcataaaatcactactatcgtgggcgagcttggtccccggaatatctaaacgatggggctttaaaccagtcgcaataacgattttttcagcggtaatggtttgctgatcatcaacgacaacggtgtgagcgtccttgaacgtggcatgaccatgaatgatcgttgcgccaccatcttccaaacgagctgtcaggcctgctggtaagggatcaataatctcttgtttatgggccacgttggccgtccaattaatggttggtgcactgctcaaaatatcattgaggcgtgctgcttcccgcgttaatttgacaggttcatcaagagtgattttggcgttacaaccacgattagggcaggtgcccccaatcagaccactctcaatcacaccgacgcgaacaccagtcttggcgagtggtgcggcgccatcaaacgtggcgtgacccgcaccaatgtataacacatcgtaatcgtatttgtttgtcatgatttatcagcctccattaaaattttggtaacttaagcttaacgagttttaagaaacctgacaactgatatgaattgctcgcgcccgctgtaatgattatactgaaagtaattatgtcaatagggagacgttaatatgcacgctttgatcgcaattgattcatttaaaaattccatcacgagcattcaggccaaccgaatagtggctaaacgattttcggctcacggaatcaccgctactcaagttgcgattgccgatggtggtgaaggaacggtggcggcgtggctggctaaccatgctggtggacaagctattacggcatcaacggtggatctggcgcaacggccagtgactgcaacgtatggctactttgccactgaaaaaatggcagtgattgaggttgcggctgcatccggaatccagtttgtcacgacgaccttgacgccgttagcaacgaatacctatgggaccgggctactgattaaagatgcgattgagcgtggcgcccggcagattattctgggcttaggcggtagcggaacggtcgacggtggtgccggaatcctacgtgcgctcggttatcgtttttgggctgccgatggtcaagagttagccatgactggcgctgatttaagtcgggtcactaagattgacgatcgacatgtgttgccacaattagctgaagtctcgttcattagtgcagcggatgtgacgaatccgctaacgggaccgaacggcgcagctaagatttttggcccacaaaaaggattaccggttgctcaaattcaggttcacgatgccgctttagctcactatatgacggtcgcagctggtgcggtgagtgcccacgaaggcgatggggctgccggtggtattgggtttgcattacgttactttttacacgcccgcgttcgctctggttttcaattgttagctgaaatgagcaatcttaaaacgaaagtggcccaagcggatctagttatctctggtgaaggccaagtcgacgatcagagttttatgggcaaggtaccaattcagctcagtcagttagcccaagcggccggcaagccttgctatttattagttggtcggcaaaaaggtgcaaatgaaacatttgccaaacagggggtcacggctgttttaccgattgtcgatcaagtcatgaccttagatcaagccatggcgcagggaccagccaatctggaacggatggcggaccgcttagcccgaatcattagccagtcataaaacaacttaagcggtcaaaaaaaccgtatgtgcagtgaatagcgcatacggtttttcgactgaattttatttatcaggaacatagtgattcaaaaaggctgtaacatgtcgttgatactcggcaggatcgatccaaaaactctcggcgtgagtggcgttgggaacctgccacatctgcttggggcccttagcggcctgataattttctttgagcatccaacttgggacgtagacatccttgtcaccgtgaataaagaagatcggtagatggttatgtttgagctgttcgacagaactgacgtcgcttaaataatagcccatacggtggcggttaataaaactaacgatgggcacaaacggatactttggtaagtgaaactgtcgctttaataagtaagcgagttcttcctcgatactcgaataaccacaatcggcaatgatggccttaacttgtgatggaaggtcttcgccgctcatcatttcaacggtcgcaccacccatgctgacaccaaaaaggatgatatccgtgtgacgaccattgatacggacgactttatcgatccagcctaaatagtcgcggcgatcctgccacccaaagctaatgtacttgccggcactttgcccatggccgcgatcgtcgggcaagaggacgttgtagcccatttgatggaacatataagcgtaatttgccatcgtttcaccatcacctttgtagccatgggaaacaataacggttcggttgctggttgttttagcaggaacgtactgtgcgacaaggtgattggcctcgtcattagcgttcagttgccactgttgaacgggctgtcggtgtagccaatcgacataagcgtagtaggcatcggcgtatttttgtttatctgccgaagtttcgggcacgtaatcaacacgcttgaaagcaaaatcgtagagcttctcactcgcgaatagggcggccgaaaaaattgccacaggagcactaattccggctacggcgcgtgtttttttcattaaatatcactcctctaatctctcaataatatgatacgtcgattagaagtgagatgtaactatattattctagtaatataaaaggccatcgcggcgggcgatgacctataaattgcattggtcgctaggtggcatccccagcgagcctgtttttcattaactttggaggagtaaatgaaaaaggttcaagtggctgaaggagatgtccagtcactatatgtttagtatagtagtttgattgttaaaaggtaactaaatcgcttacttgactggtgaaaaaactaaaaattatttgtgggtggtcaatattccggtatggacagatttcgtcgtgccaagtatgataccgattcaagtggcattaagcctccttaagggctagttcatgcattttggcgctaacttgattaaggacctgtgttttacgttcagctgtcaaaaagacgcgctgacttaaaattgggtagtgttgttcacgtgcgattagcaataattcacgataaagcaaagtggcggctaatagcgatggccgggcgacgggatcaatttgtggcatcatggttaatgcagcctcgtacttgttcatggcaatctgtgcttcatgttcccaaagccgaataaaattggcagatgggatggggccatgcaagtcagttggattgagctgatagtgtgccaatagttttgatggcaggtagattcggccacgttggtagtcttcaccaacatctcttaaaatattggtgagttgcatggcgatgcctaattctacggctggtttgacaagtgattgcgggttagttgctagcattggcaaaatcatcagaccaaccgatccggcgacgtaatagcaatagtcttcaagtgcttgctgagtttgaggttgtttaaaagtcgcgtcttgttcttgaccagtgagcatatcgaaaaagacgtcaagattcatatcataagtctcaaaaacgacggccagtgcgcgccacattgggtggtctgggacatgaccattggcaaaggtggtcaatgattggcgcaatgccattagaccatcaatatcatggtcaacatcaacgaggtcgtcggctgttcgacaaaaagcataaacggcgtaaatactccaagcgcgttctagtggtaattgcgagaaggcggtgtagaatgcgctagaagaccttttagtaattgtttgacagtatgtaaagtcagtgcgatgttgttcgaatttaggcattagtttggtcatctttaatcaactcctcaacggctaatttagcactttgcataacaatgggaacaccggccccagggtgggtgctactaccacaaaaataaagatggtcggcatagtcgaacttgttatggggacgataataattactttgttttaacgtcggtcgtaagccgaaagtggctccgttataggcgccaaactgttctttgaagtcaaccggtgtaaactgcttttcgacaacgatatgctgttcaatatcgctgaaggtagccgtttgtcttagtttgttaatgattagttgacgatagttcttcagtgttgttggtgaccagtcattaaactttgagagctcaggaactggtactaaaacatagagtgcctcactgttttcgggagctaaacttggatccatctttgatggaacatagacataatacgagggatcttctggtaacttgccgttgtcaaatagatcggcgacgtttttgctgaaatcttgtgcaaagtggatcgtgtgtaatgcttcggttgggtattttttgtctagtcctaaatacaagacgagacatgagcatgaataatccattttggcaattttttgatctgtgtactgaccacgatcttgctcatttggaatcagtgttgtcatggcggttggaaaatcagcattacataggacatagtcactgtggatcggatgattattgacacgaatgccaacagcaactttatctttgatgataatttcttgaactggtgtggcaagctttaacgtaccaccttgttctttgaataacttaacgagactattgacaactgtgtacataccaccctttaaaaaatagaccccatagaagagctcaatcattggaataatgttgtatagcgacgggccctggtagggagaaatcccaatatacagtgtctgaaaggctaatgaattacgtagattctcattcttgataaattttgcaatgtttttgtaggcattgttaaaggtgcgtagctgtagtcctgcatacagagcgggtaggttataaaagtcacgccagttacggaatgatcgttctaaaaaattaggcttcgcgatggtataccggtgataaatatccgctaaaaaatttaacataccattgacgtcatcaggcgcaatgcggttaatctcggcaattaatgttgggagatcgcgtgacaaatctagactagattgatcaccaaagacaaggtgcatcaaaggttgaacttcttcgaatggtaaatagttgtgcggatcgaccccgcaaaagcgaaagacttcttcgtagatgtctttcatcatgacgatcgtcggccccacgtcaaatgtaaatccttggctaacaatctggttcattttgccacccggttgcgcgttttgctcataaatcgtaacattataacctaatttttgaagccgtactgcagcggttaagccaccaataccagcgccaataatcgatacttgcttcatcagtaaatctcccccttaacagatgaataactaaaaagcatggttaatcattagttatattttggtttaataatgtaaaaagtacaacaaatatgattactatgacgtattaaagtagtcggtaggtgcgaatagagcggacgagaaaacaaaaaaaccaccgtatcggggaatacggtggaaaaaggagtagggtaaacatgtgacggggaatcacatgttactatgaatttcattactttggaggagtaaatgaaaaattttaggttgtgttatagctgattgagttaacctcaattgctatgatgtaatcataccgaggttgtgtgaagaatttgtgactgaacatggcgaatgtcatgaaaaaaagggaaaggctttattaagaagtgtgaagaatcatcaacgttcttacggaatgccttggcgaggtgcgatgatcgactgtttggggccaaagaaaatagtcacttcaaaagttgtcctttgaagtgactattttgattcgcaatcaatgctagtaataacaagtttgcggcgacgctaagttgatagtgaccaagcagattttggtgactggctgtgggcactgccatttggcgcgattagttatcgtcacgattaccaccgaatagaataattagtcgtagtaattgtaagaatgttgacagggctgcagcaacataggttaaagccgccgcgacaagcactttacgcaccatgggaacttcgtcgcgagtcaaaacttgcccatcagataaaatctggagggcgcgtcttgaggcgttgaattcaactggaagcgtgacaagttggaacaataacgccagtgagaagagtaaaatcccaatgtgaatcagtgtttggttgtaactcaataaaacgccgataatgattagtggtaatgataagcttgaaccgatgttcgtgatgggcacgagggcggtccgcaagcgcattggccaatagttaacgtgatcttgaactgcgtgtccgcattcgtgggccgcaactccgatggcggccacagaggttgaatctgctgtggcttctgataggctgagaatcttagtttgaccgttgtaattgtcggtcagatccccgcttatcttttggacaccaacatcattgataccagattggcttaaaataaagcgagctgcatcggtgccggttgtgccagattgactacgataggcatcataatgccggaatgtccgattaacgtaacccgatgcggccattgagataatcagtccaatgatgactaataggtaagtcggatcaaaaaacgaatagaacaaggtcgacccctcctaagtggtttaatgttaatccgattctatcagatttagcgtgacattcctactgaagaaagccattggaaagtgtctttactatcgagaaacgacgtcagattatataattagcccagttaatcgtaattggcaaagagcgaaggagttttctgatggaaaagacgtatcgaaccaaaacgtatggggaaatgccgttaaagttagatactgggaaaggctggatttttcctaaaggtgttgaagtgaaggcgcatgttgatttagaaacgggacaggtcagtttttttattgcaccagaagatctcgataagatgaaataagtactaggaccacgatacgcggtaaggttgagaagtttgtttctcgccttggcgcgttttttatggtggaaattggattggcaatgattatggttaatacggtgttcacgcgtgagccacaactgcttgaaggcaataaaaaacctccgtatcggggaaatacggaggaaaagggaagtaaatcggtaaaatgtaattaagtacacacacatcattacttggggaagtaatcattaaagttagggggtcgttaaggattgggatttccttaatgactataaacatagtatagcggcgacgcgtgaagaaagtgtgacgcgaaaagtttaaaagcatgattttcagacgaaaaagttaggtcatggaacgaaaaaatatgacgatttttacaaagtttataacgaaatgatgaccgtcataaatcaatatgagtggctaaatgctggtgtgacgcagtttttattggtcctagactctgaggtgctataatgaagcacaaattaatcgaaaggtgttttccaaatatgacaattaaaatcgtcaccgattcgtcggtccaattaacgacggccgagattgcacagtataatattaaagtggttccgttactcgtggggttcggtggcgacttgattgcagatacggcagttagtaccgcggaatttgaccaacagatggcagtcagcccagtcttgccaacgactagccagccgccaattggtgatttcgtcagttgctacgatgaattgacagcggatggtagccaagtattatcactacatttgacggagacattgagtgggacggtcaatgctgctcgccaagctgccaaacttgctagtggcgatgtgacagttattgatacccaggcggctgaccgtgggatggcctttcaagtgcttacagcagcacggatggctcacgccggtgcggatatggccacaattttggcgaagataaccgtcattcggcagcatactaagacctacttgttcgtggatacgctcgacaatttggtcaaaggtgggcgcgtccctaagttggctggcatggtcacgaatttgattaaattaaaatttgtctttgaattagaagccggaaaattaaaactttatacgcggggtcgcgggaaaaaggcgctaatcaaagcgcaggaacaaattctagaccaattagcggatgcgactcgagtcgaagcggctggaatttcttacgtcggcgaaccgagcgttgcggaagcgccagaaaagcttctccaacaagttgttccacaggtaacaccactggttgcgcgcactagtccaattattgcgacgcacaccggtgttggcgcttacgcgttgatgttttatacagttgattaaatttgacgaactaacctactattaaaaattactttgatgtgttataattaattaatgataaatgagaaccgtgttggtgcactgttctgagcctaaccaccatttaatgatgactagacccggatggggcaccttttttgtcactcttttcactaaaagaaagtaggaacttatgtgagctatcttctcaataatccgtttttcgggatcggactgtcgatcttggtgtatgggattggcgagtatttatatcacaaaacaaatcgctttgtgttattccaaccgttattttttggaatgctgctcgggattggtttattggtattgattgcgtcgattctaaaggcacccgtgcaaaaagtttatgaagcgtaccaggttggtggcgactggttattctggtttgtggcgcccgccaccgtctcgtttgcggtgccactatataagcgtaatgatatctttaagaaacattgggatgtcattgtgattgcgttagcgattgggttagggctgtcattatttggtatctatgggatttcacggttgctcggtctgacggatgcagcgttaggtgccatgttagtacaagcagcaacgacagcaattgctttaccggtggctgagtcggtgggtggcgatcaagccattgcggcgttcgcagtcattctgaattcagttttgatttacgcgttaggcgaccattttattcgctggttcaaattgcacaagaatccgctcggtgccgggttaggattcggaattgccggtaatgcggttggtgccactaaagcgattgaagtgagcgaggctgcgggcgcaactggtgcaatcgcctttgtgattgccggtattcttgttaattttatggttccagggtttgcgcagttgattggtttaggttagatggtccgggagggattcgatgaaaaaaggcgcgtttattacacaaattgtgatttatggtttgattttattagctagtagtttaatcgctaatttagtcaataagatttggcccgcattcccaatgccgacaccgttgattgggatgattctactatacttgctgttaacgtttaaagtggtcaaacttgagcaggtggcgggtgttagcaactttttcgtccaatttatcagcttgattttcattccatcagggatcgcgttagtaactaagttagacgtgttaaaggcagaaggcgttcagattgtgatcgtcattattgtttcgacactaatgttgttgctttttacagcgggaatcgcgtgggttttaattcaagtcaaggaatggctcattgctcgtcgaacgaacagcaatgttgagttggaagaagattaaatcttggtggcacataatttactcgtgagtagattgggtaccagttggatctaatcgaaacaggcagttgttgaaccgcttgttttggctattacaagataatagcaggccgttgtggggattgcatacccatgacggcttttttagacggcaataaaaaagccaccacatcagcggatgtagtggtcaaggagtaggaaacatcaaagtgggggctttgatgaaccccattcatcagacttgggggagtctatgaatgaaagtgattattagctgcattatggcagcaacgcactaataatcgaaaaaactaaagaatattaaggattgacagtcagttggtcactttctatcaatctgcgactattataattgcaaaagttattggctgcaactaattgagctgattaattagtttaaagtaacgcggggctggaaatcagccgcaaataagcccatgtgatagaggtcgattcgttgcccatcacgcttgatagcacgcttattggtgccctcaaattcaaaaccactattctggtaaacagcgatagcggcggggtttgttgcgatgacgtccaaacagactttgtaaagattcaattcgttaaaagcgtagttcaaaatcaagctgagtgtctcggtaccataaccatggccgcgttcgtcgggatcaccgattgcgatggctaattgggcaacctggttatgccattcgatattgaatagggtgacaaagcctaataagtggtcgtcttctaaactatgaacgtgaaagtagtattcggtattccgatcaaggttacggtaagttcgttcgagttcttcaccggtcagtggtcgggcggcagccgtatccattttacgaacaaaatcggcgtcagtgtaccagtcactgatctcatcaaaatcttctggctggggaacagcaagggccacatggggcccgacaaacatatttttcaaaataatccctcactcgtatgatgttattaaagcttatcttcatggtggcggcaaaaggtgggcttgtcaaccaaaaattatgagattacgcgtcagactagctagctcagtatgaaacacgggtggcatgtgccaagtgctgaggtcaagaacaactagctctgggggacggcgaaataagatgcggatatactgaagacttacagtaaagccgttgggcacgtgctgccgataatgtggtttcagtataatgagggcaatacgggtgatggctgaactattggtgaaaggtgttgctgtgggggcacttttcaatggtgcgtaaagagaggttagcacaaactttacagttactttatatgaagattggtaaaactttacgttagctcgctatattagagataaccatctggtgattaaagtatgagagggaggatcgaattgcgtcctttacaagttattcagatttctgatctacatttaaccccccgcggccaagtaccggcacatggtcagcagtacgatccctggggcaagcttgccaatattattgatgatattcggcgattaccaaccatgccagatttgattgtttttaccggggacttgattcatgacggtagcgctgacgattatcagcggctgcacgcaatcatccatacgatggaagctgaatttgattgtcatgttcgagttatccttggaaaccatgatcggcgagcggcgttttacgaagggtatttgccggctgacccgggaccatactacgcgagtcgcatgcggattggcaacaacgacttttattttttggattcaaaggttagcggttatgaggcaggctggttggcaccacaacagctacaatggttgggaaaacatctacgacaggcaccgacaaagcgggcttttctatttttgcatcaccccctagatgggccgacgatgacaaatatgcactatgcgattttacaaaatacgccggcgctgttatcggtgcttcggggacataatttaggcggcgtattctctggtcacgttcactttgtttcaagttatttgattggagataatattctgaatgtggtggccggttctgcggcctatgcgatcgattgccatgatccacatcatcattatgttcatgagggcagtagttaccaaatcattacaatcgatcgaggacaggtcggtgtgacaacgcgccagttactgcatgggaaagcggttattgatgaattgacgatcccagacactaagtttgtcgggcgagccccacaagggtatgaataaagatagcgctttcttaattaacaaggtataatgttggtaataattaagggaggcgtcaatatgggactatttcgtcatcacaatcaaatgccaccacggatcaaacgtaaattaaagcaacggttgttacccgttgccgccatggagattaccgcaaccacaattgtggttgcggatgtcttgacggcgaagtcatttcgccgaggacatcgacttggctggttgttattagcctttgtacaaccatttggaccgtggctctattttgcgtttggacaggaacgttagggtaattagtaaattaaagtggggttaagttcgggtgaaagctcggacttttttacgttgatgggcgttttttgaacgtttatgaatgtttttttgaatgcaatcataagcgtgtataataaaagtgtatataaagatacctataatttgaaattattatggtaatccgaatcatatagagggggactttattaatgcagcgagaatcagaattacgacaacaagctcaagaggctattaagggactaatcgtccggttaagtgggtggtctgatcagtcgggggacttattggatattattgatgtattaatgcaggtcgataaaaaaattactacgactaagaacccagaagccttagtcaatcgcctagtaaactatattcgtagtgtagccattaagggacggttacactttccagatgaagaagaaaagctaatgatcgacttaggaataatcgggcaaaaggccggattgaacggggcctatatggctgatttctctgacaagtcacagttctatggcatgctggaagaagtcccacaacattaataccggccagggggttgagggctaccggtcgtgtaattgctgattggtgttccgaaagcgtcctccgattgtgatgctgattaaagcgtaagtaagaccagcttatcgtataaattaaaaggaacacctcaggctgtgatagtccacttaaggttgacagggactaatacaggaaaactgaaagtgttccttttgttttaggataaccagcgcgctaaatagccggttgccattgaactggttctattcactgtgcgtcaatttcaatcgctttaaatcagctgttttagttacattgagtagtttctggcagtctgggcataatccatagacttccatattgtgacccgtaaccaagtacccagagagttccgccgccttggcttcgacactgcggaggtcgggttcgaaaacgtcagtaattttaccacaattctcacaaacgacgtgataatgtggtcgaccgaaaaagtcatagtgggtgccagcatcgccattttgtaattcaattacgattcctaagtcgacaaaaagttttaacgtattgtaaaccgttgccaagctcaggttaggtaattgagttgctaattcctgatagatggtttcgacggatggatgattatggtgagtaatcaaataattaagaatgatttgccgttgcggcgttacacggattttatggtcctttaattgctgcaaggcttgggtcaacatatcttctgccacgacgcggttcctccttttatcatattcacccttattaaaccacactttttagaaggattccaatttagaaacattactagataaaacttttgacaaaattaattaacgaaatagctgaaaaggctttactggggctgaagacgtgagtaaactaacgataattaagtgcgtgttgatgggggtggcaaaatgacacaattaattgtaccagcattaccggttgagcgggtccaatacgaacgcgcatatgtacttggccttgaagcaatgatgaaagttatccggcaacttacgactacggaaaaaggacgacaggtacccactaatcagttcccagtatttgcggcgagctatgatgttccccaagcgttggcccaagttgcagtcctaaaagccgctactactcggttgaaggttcgaccgattcagttgaccgtgacccggcagtacgtgacgttacgattccaattacaagcagccgctggacaaccagtctgggtgccgtccgccggggcactatggcgcctatatgatggctttttaagtaatttagtggggatccctttccagcacctagcaaatattcagattggcttacagcgcgttactggaccgctgacagtgactacgccgatacgccctagttttcaaaattatgatgttcgactgaccccaagtgggcaaactggttgcctagtgaaagttcacaaagcaccagcaatattggcacgacgggcaccgatataccagttaagtcattactcggaaacgattcggccggatgactagtcgtcattagctggatgattctaaataatccataatcacactgatagccagattaacagcggccacaaaaaatcccaagctcatttagcttgggattttttgtggccggtatttaaggcctatcaattgacttaattatgcttggtggcgcaacgtcacattatcagttgtggctacttgagcatctgcttgtgcccacactagcagttgagcttgaatgttttccaggattttcatggataactggtagtcacgttcggacccggtgctattgaagctcaatgtacaggttccggcaaacgtgctggcggcaatttccataacgggtgagcactggaaggcacccgagaagacgcaattgacaaccgtcaagtcatgaaatttaagccgttcctggtcgacgacaccaaagttggtataccggagcgcaggctgtggtaaccagcgtttggtcattttacgcatgaccgtaattggcattgtatggttcattttctgtaaattgctaagtcgataaaggaaggcgacccgcgtacgctcgaccgttaacaagtcgtggacttgattgacgagctcactaaaaggtgcatcaatatctaccttgattgtcagaaaaacattgacggttaaattagcgatttgggtgacgttcgcatcttcagtcgtgaagcggcgcaggtcgattgggcacggcaatgtcacggttgtatgaccagttaaaacttggagtgctttagcgtatgccgccaaaatggcctcgctaataccgacgtcttgggccttagccactcgtcggacgcgcatgaattgcgtgctactgagcattacgtgaccaccgtgccgcaagttaattcccggataatggggtagtttaaccataccggtaacaatgggtgcatgaccgtgtggccgtgcaaattgacgttgcaacttagtgataactgggcgtagtcgccgttcattatgcaaattcgtgagatcggcataattgtaggcttgtgcgagcaggtacagatattctttaaacccacgattgtccgttagtaggtggctcataaaggtttgtaagacatcgtagtcaccgtgatgaatgacaaataaccgtagttgcggactattcgtaaaatcaaaatcagtgttttcaggactatacgggctttgaacttcctgaataacttggttgactggttgatcagtaacaacgaaacgattacggtcagcttgataatgaccgaaaatctcgggtacgatttgtgcggaagcgagcacggcagcctttaagcgttccacgtcgatctgactggaaaaaacgattcgcgaacgcattaatggcgcggcacctgtagtatgtagcatattcaaaaagtcaagtgcttcaccacgataatacacgattaaccccccaatcaatttctctaatcaatagtatagcagactctattcatcacactaacaatggacgtttggttttgaaaaaagttaagaaacatttgtgaaagtttattaatcctgtgatggcgatacagcactgcctcgattattatgtctggtagttatttctatgagcaagaaataatctggcctgctaatgaatgcctcacctcgtttaaaattagacttaagataatggcagttacgcggatggggactggaattgctaaactgactgaatattcagcagttaagattaaaattttgatgaaagcagctgattttttgtaaccggttccgactatttaccaaaaaaggggtatactaaaagtaattacaacttaaaggagtttttcacacgatgaagattatcgcactcgtcggtagcattcgacgttcctcatataatcgtaagttagcaacgtttgttcagaaacggtatgccgatcaactggatgtcacgattcctaacttgggcgcgttgcctttttatgatcaggatatcgagctagaagcccccgcagaggtgcaagcctttaagcagacggtcatggacgcggatggcgtcatttttgtgacaccggaatatatccaggtgtcttggaaaatgcgattgattggctatcgcgtgttgaacgaccgttaattgggaaaccagctatgattttaggggccacaatgggacccttagggacagtgcgagcgcagagtcatttacggcaagttttagattcacccggagttgggatgcagattctgcctggaaatgaattcttgttgagcgcggtgcaggacaagatgaatgccgatggggaccttacggacaataaggtcgttgagtggttagaccattgtgtggctgactaccttaagtttgctcaccagttagccgcaaacgactaattcggataaaataattgataaggggaagtttcagatgaacaaagaacgtaagttgatttatgttattttgaatgacgaagatgtggaatatgatcttgaagaattaccagatcaatatgtggtctatattcgccaacaagccggggattcacgcgacttgtcgttagttaatactgagattcagaacctgtttaaggatgccgaattggactttgaagaaaagatcaagcctgaaaatcggaaggctgacattgtgctagctgttaagcgcagtacggtggcagatgactaataaacaagcgtaaacaatagttgtagcggattgatgttttgccgttacgactatttttttgtaagatcaaattattggtctcaacattaaccaattcatgtgaggagggctaacaatgaccattgagacactgtatcagcagatgttagctgccatggggccccggcactggctccaagccggaataccacctgccgagacgccttgggagattctctggggcggtattctcgttcagaataccaactggcgcaacgtggattacgcactggctaatttaaaagcagccactgactttgagcctcggcggttactagcattgactgatactgaactgacgactttagtcaaacccgcgggcttctatacgcgcaaagttccaactttaaaagctttagcagcgtggtgtggacagtatgattttgacttgaccgtgatgcgagccttgccagcagaacaattgcggcgtgaactaatcgctctgcgcggtattggcgatgaaacggctgactactttagcatgtacgtttttcatcagccaacgatcattattgacacgtatttgcggcgcctattcggctggcttaaccaaccgttaccgagcaactacttaaaggcccaacaactgattatgcaggcgtggcattatgatttaacgacggcttgggagtggcacgcactgattgttgatttcggtaaacaggtcaaaacgacggctgatttcgaacggtcctttcttgcaacgcaacgattaacacttgcttcacaaagtttggcaaactaattaaataagttcctaaattcaagtgaaccgccttattttaatcgggttttattgaccgacttaataggggcggctattattatgtttataaaagaaagcgcttttatggttaaggacgttacttgattagttaggagggcctgacagttggtcactggatggattggcaattattagtgattttataacaaccagtgtccgaaattagtttgttaacaacgcgattattgattagtcaaagggggagaatcgctatgaagcaagtgcatttattaacgccggttgcaggacagttagtgccactcgaatcggttcacgatccggtgttttcacaagggatgatggggcaaggattcggtattgaaccgacagatggccaggtcgttgcaccaatcagtggtaaagtaacgatggttgcagcgagtctgcacgcgattggctttacggggaacaatggtctggaagtgttggttcatcttggtatcgatacggtcgaactagcagatcggccaccgtttaaagttaacgtgcaagttggtgatacggtcgaggccggcgaaaaagtggccatgatggatttagcggcgattactagtgcgaacaaggataccacggtaatcatggccgtaacgaatacggcggatatggttaccaaactaacgcccgaactgggtgaagtccgtgccggggtcgtcggtgctgttgttgaattgaaagaacacgttgccgaagcaccggtggttaagggtaagggcggcaagtacgatgaattggcgactcaaatcattgctcaagttggtggaccggtaaatgtgaaaagcgtgattcactgcattacccgggttcgattttacttaaaggacgaagggcaggccaatgacgaggcaatccgaaacctaaagggcgttatcgatgttgcaaaggcaggtggtcagtaccaggtggtgattgggccaacggtgaccgacgtgtatgatgcaatcgtgggtcaactaggcgcaggctttggggatgctgacgcttcggctgttgcgatggagaaggaagcgaaccggttagcgtggcagaaaatgacgccgtggcagaaggtcaaacacggttttagcagcttgattggtgttattacggggtccatgattccagtgattgggttgttggcagcttctgggatcttaaaggggattttgtcgttactaaagaacttcaacctcgtctctgcgacaacgccgacctacgtgattattaatgcgatgggtgattccgtcttctacttcttaccgatatttgttggtttcaccgcagccaagaagttaggggctgatccggttatcatgggaattattggtggggtcttaacatacccagcaattgttagtatggcaacaaccggaaaggttacgggtcacttattgggaatggcaatcaatgcgaacttctttggcattccggttcacgttgcctcctatacctactcgattttcccgatgattgcgggggcgtggttagcaagtaagttggaaccatggctcaagcgggtcatcccgacagtcttacggatgatcttcgtaccgttgtttgaagttgtgattatttctggagccatcattatcatcctcgggccaatcattacagctttgtctggcgcattggccgcaggaattgtggcgatttacaaactcagtccagccatctctggcttaattatcggtggcttctaccaagtgctcgttatcttcgggttacactgggcgattattccaattgttgtcaacgatattacgacaactggacacagttacttgaatgccattgtttccgcaacgatggttgcccaaggtggtgcggtcttagcaattgcgctgaagtctaagtttgctaatattaaagaactcgcttggccagcaacaatctcagccttctgtggggtcactgaacctgcaatgtacgggatcaatctgaaatacggccgggcattcattaccgcaagtatcggtggtgctgtcggcggtttcttgaccggactgtttaacgttaacatgtggggcttcgccggatcattgatcggtgtgacctccttcatcaatcctaaggggcttgattttagtttctacggtttcttgattgcctctgctatcgacttgattgtcgcctttacgttaacgtggatgtttggcttttccgataatgatgtcaaaaacgttaagaaggcgcctgaaaagaagcaccttggtcaacaggttgcaaattagggcttaactatttttagaaaagcatttcttagggctgctcttgtaatgagggtagccctttctgtgtatttaattttaacgatgtagcgacgaaatgtttccgaattaatggcggcaatgggtgacgttaatatcataagcggccgctttatttgacaaatatatcgatatttagttaaatgtaactaataaagttacatgaaagggcgagttaaattgaaatatgcgattacaggtgccactggtcatttaggacaacagattgttgccgcgatgagaccgttagtcgccaccactgaattatatttaggggtccatacactcagtaaggcccaggtataccaacaacaaggtttgcatgttgcggctattgattaccagcagccagagcagttacgcgcatttttccaagacagtgatgtcctgatctatattcctagtaaaagtcatgatagttattcgcgggtccaagaatttgagaacgtcttagcagcagtccaacaggcgaatgtgcatcatttcctagtcatgggtttcattgccgatcaggtgaataatccatttgcattatcagcattttatggttacgtgccccggcgattagctggaagtgatattaactatacgattgtccggaatgcgctttacgcggatccgttagtgccatatttgccagaattaattgaacggcacaacgtcgtttatccaatggctgatcaggctctcagcttcatcagtcaggcagatagtgcggccgcttttgctaaagtcgccacaacgcctgatttattacaacgtggtcgaatctatacgttaacacagtcccgagcttacacgatgccggaactcgctactgtgcttagtcaggtgagcgggcaaccaatcgggtatcgaccagtgtccttgcaagccttcagcgatatgtacaatcagaatggtgaggggccaatgttggcctcgatgtatgccggtggcgcccgcggactattagccacagtaagtgatgattatcagctgattatggatcgtcccgcccagtcattgctggattacttacaaacaaattatcagaaaagttaattaatcacggaaaattccaagcgagttaatggtcgcgacgaaattccatgctataatttatatcaatagcaactttggaaaggagtcgccagtatgactaacgggacgcgtgcagatttacgtgagctttttcataaaggacaattaactattggcattagtgaactaagcagaatgactggtgtctcgccacgacaactacggtattggcaaaaaaaggggtacattattcctaagaacgaggatgagccgggccaggctcgcgtgtatacaatgaaaatggttatcaaggcagccgcgatgagtaatttattgcagactggttataccttgaaggcggcggccgctcaggtggatgagcggatgcgaccagcccaaacaatctatcatctgcttgccgatcgttaccaaggatatgaagtggcggataatggtcagatccttgtcgacttgggaccatttgatcctcagcctgaccaggaactatttgtcaaactcgtgggggataaagttaagtttgaattgaaggataattcgagaccagatagttaggcaccatttgataatgagagttaatactagactgttctgaggaatattgtaattggatagtcttagcagcgtgatttcaggataatgaaatcacgctgcttttttatgattgatatcaatagttaattaattcagtaaatgatttgtcttcctgtaagataacgcgcaaaatcggggtaatattagtcacaataggattcgagattaaacttctaaagcaatcttcaagtatatggccgacagcacaaagaataataacttatgaaaggtacactagctacaagtgtacttttatgagcttaaataatgtatacggttacattatcatatgaattgtaaaagttagggagtgataaatttggcgccgaatagttcaccagcaactcttacacgaatgattattgagttgatattgtcaaaaaggatagttcactatcaagatattatggagtatacgggcacatctcgtaagacgattgctaagtatctgaatgaggtggaaaaggtagtcaaccaacaaggtgtacaccttgttaggaaaagaggacagggtattcgttttagtggtaatacgaagggactgttggctgagtttccgatactgaaggataatagccaaagtgagcaagaacgcagaattagcattatgacattcttgacacagcaatctaaaccagtgttattagatgatattgctgaccacttctttattagtcgtagtacgttggaacgtgatttaaatgttttaaaaatggattatgggttgaagctgacggccactacagaaggcgttaaattcaacagttcggagagtgatgttcgtcgagtgattggtcagctattacagtcatattggggacaagagattaagcaaaatcaacagactggcaaaatgacacgcacatttaaagtgccacagtccctgaaacgatatgtcaataaacaaaccttaaatcagatgcaaaaagtcctgaataaatttgtgaagattttaaaagttgatgtaaatgaatatcaatatgagtctttactgatccatacaactattgcgattcagcgaattaagaatggcgagtttattactcaaacgacgacacagaattttgacactatggcaatatctccgagtaccaacaaattagttaaaatgcttatcgtggccttcaagtgtgaaattcccgatgaagaagttgcttatttaaatatgcatgtcgcggccattgaggatgggtacattgatctggatagaagtggcttagttgaacgaacgatagtcgactggctacgtagcgtgctaacggattatgataatcaattattacgtaatctaacgctacacttacgtccggcgctggttcgcattaaaaatggcattagtattacgaatccgtattgtaatcaagttaaaacgtattttcccgtcgcttttgatcaagcactagcattagcgatggcgattgaaaagcaataccatttacagctaactgaggatgaaattgcatacttagcactgcactttgaatcgttcattgagcgccgaaaggtcttaaaaccagatgttgagcttgcaattgtatgcagcactggttatggtacggcggagttactaaagcaacgtgtcatggacaaactaccggatgttcagattgttggcactttgtctgtgaatgagttgatgacttcaacagtgactgcagacattattatttcgactatcccgttaaagatgagcggtacgagggttattcaagtcagtccgtttttgaatgaccaagaactcaacttattggaaaagttaagtcaagatattcgtcaagaaaagtatacgcggaacgcatttgttaaattattaagtccaaacggtattatcacaaattcaaaggcaactgaaaaaaagatggcgattattcaactaactgatcggctagaaaagtatgggtatgttgataatcaaatgcaaaattcagcgttagcacgtgaacaagttgcatccaccattatcgataaatttgcaattccccatggtgatatcgaccatgttttgcaaccaacgattggaatcatgacgtcgaaaaagggaattaaatgggatcacgaaaatgtccatgttgtatttttcgtagccctgaatcgcacggttgaaacacaaatggatgatatttacagttatttctataatttgattcaagatgggcagcgaatgacggccttaataaaggctcaaaatgctcaagaaattattgatacattagcacagcagtgaaggggaaatgcaaatatgacagaaatttttaaacagaagtatatttttttaaaagaacattttagaacacgtgaggatgtttttagctttattgcacataaagcaattgaacttggctttgcagataacgaagatgcagttttgaaagcgctgtatcaacgagaaaaagaagcttcaacaggaatgcaggacggtatagcgattcctcatgcaatctcagaatatctgcggcaacctgctgtactattcattcgctctacaacaagcattcaagattggccgacatttgatgaccaaccagttaatcaggtaattgctatgctagttccaaaaaatagtgagcaggcacacttacagattctagctaactttgcgagtgcattagtggatgaccgtgagcgtcaagcattacttgaaagtcaaacagttcaggatgtttacactgtattaaccaatagttcggaaaaaattttataaaaagaggatgactgatatggattttgttgcaattacatcatgcccagcagggttagcacatacaccaatggcggcgaaagcgctagaaaaagcagcgcaggaactaggtttacaagctaaagtagaacaacagggtgcaatgggacttaaaaatgaaattacagttgaagaggcgaaaagcgcaaagtttttattgattggttcggatcaaaaaattgaaaagatggatcgatttgaagggattccagcagttcgagttgatattaatatgtgtattaaaaagccgaaagctgttattgataaggtcagcaaagcggttgctgctcgtgttaaataaaatgaacttaatgaagaatggaggagtgagttatgaagaaaatattggctgagtggaagggctacttaatgtctggtatttcatatatgttaccggttgttattggcgggtccctcgtagttgcagttcctaagttgataggtctatgttttggaattacaagttttgatgcgtataaaactggtttttggttttatatgggacaaattgaagccgttggttggattggtgttggcttagttaatttagttttggccggttacattgcatatgctattggcgataagccagctttagccgccgggttcattgggggctcattagcatctagttctaatatgggatttttaggagccttggttgctgggtttgcagctggttatactgcacgttggtgtcacaataagttacatgttggtgaaaagttcgaatctattatgccattagttgttgtaccgctgctatctacaatggttgtggcaatattgatgggagtcattttgaagcaaccgctgacttggattaatgtatcacttgttgcctggattaaacaaatgagtacaagcggtgtaagtgctattaccttagcagttatcatgggcgctatgattggttctgacttaggcggtcctgttaataaggctgcatggatggcaggaaacgttttattagctgaaaagatttacacccctgcaatgatcgttaatgtggctattgctggtattcccttaggatatgcatttgcgacgactttctttaagcatcgtttttctgatgaattacttgatgctggacgaagcgactggttcatgggatttattggaataacagaaggtgctattccgtttacattagttaacccgttgaaattaattccaattaatatgattgctggtgctgctggttcggcgactacgattttacttggggctcaggctaagattcctcctgttggtggggtttatggatttgtcaccattacgaatggttgggcctatttaatcggtctaattgtttgcgctgcgattatcggtgtactggcaccattggctgtggactttaaccaaacacagagcgaagaacaagtcactgatgataatgaggacgacattaacattaattttgaagcttagattgactaaaacgagccgcataatggttaaagagccgtagtgcggcttttgttacctaaaataacagggagcgatacatttatgacaaaagcacattttgtaaatcatactcattgggatcgagaatggtattttacaactgaggacgcacaggtgctaagtgatcagctgttctcaaatgttttgaaggagttagaaacgcatcctgaagctaattttactttagacggacagacatcaatactagatgagtatgttgaaatgcatcccgaagatgttatccggataaagaaattaattaaccgtaatcaattatttgttggaccatggtatacacagactgatgcgatgatacctgatgcagaatcaattattcgtaacttagttattggcatcaacgataccaaacaaaagtatgggcaaccaatgatgattggctatttgccagatacttttggatttaattcgcaattgccaatgctcttaaatcaagttggcattaatgactttattttttggcggggcactaattttaagcgacaaatggactctgtttattttaaatggcacagtctaggtcatagtcaagtctatgctgctaattttccgttaggttactatactggtcaaatcgcattggattcgaagaaaaacttacaagagttcgttgcaaaccgtctagatccaggaattgattttgaaagtcaacagggtcaaaataattcggtcctagtgccttcgggaatcgatcaaatgaatattattcataacgtatctgagactattagtaagataaataaatatagtcataatcagattgtgatcagcaattatccgaagtttatgcgaacattacgacaacgcaacgatttaccggattatcaaggcgagttgcggtatccaacttatgctagagttcatcggacaattggttcagtacgttcgcgcattaaacggcagaatttcaaactcgaacagcaaatattacgacgtgttgagccactgatggtcatcgccaaaagatgtggtatcgatgtgtctaagggtcttattttgaaactttggaaaaagttgctagaatgtcaaccgcatgacagtttgggtggcagtgtttctgataatgttgctattgatattgaccatcgattcaaacaaggttttgaaattgcagacggtatcgaaaactatatcaagaaaagaatcgcacaacggttgaaactggatgccaatcaggtgctagtattcaatactgatccacgcccattcaatggatataagaaaatccgtttcttaacatcatcgaaaaacattatgtttgatgaaaaatatcaagcaactattttaagtgcaaattatgtggctaagcgagaaaatatcatgcaacaaacggctaaaggctttgaatttaaagacgagcctggttactatgaattacaagtacaagttgcagtccagtttgatgggttgggctaccaagtaattgactttaaggatggtgcagaagctttgccagaattacagtctgagcaacaaacggctatccaaaatgaaagttggaaagtgaattatgtcgatggcaactttcaggcaactactaatgggaaaacttacaaaaacatcattagtattgtagattcgggtaatgatggtgatacgtacgattattcaccgcttcgaggcgacaaagaggttgacttgcctttagccggcgttgtagccatttatgttggagctggaaggcaagaactgcgattaagcggcaagtggcagttaccagaaggcttggctgacaggattagtcacgaaccaaagctgcacgatgtcgcatttgaattaacgttgactttaactgatggtgacaatgtattggcaggtcgtttaactgtcgataatcaggttctagatcatcgattacggttaaaaattaatacagcaattgaaagtgacactgcagttgcgcaagttcaaggcggctttcaaagaacacgtaatttaccaattgcggaaaattgggaagaagaatttgttgaaaaaccggttaacctttataactttgataaaattgtcgggatgcaaggggctagcgatggcctgtatttaattgctaaaggaatgaaggaatacgagttaggaaagaaagcattttatgtcacattaatggcaaccactggtcaacttggtaagcctaatttactgtggcgaccaggtcgtgcttcaggcgatacaactagtattggacatcagatgacaccaacgccgttggccgaagaattaggagcaaatacatttgagtttgggttagtttccacgtctcaattgaatgaaaataaattggcaataattgctgaaaagtggttagcacccgatgttagttatcaattacaaaaattgaatttatttgtaaatcgattagacaataaaatttgggatgttgaatttgatgattcattaccaactatctcagagtgcgagtcatttttgaaactcgatccacatgtcacaattagcgcgttgtatccggcctatactgtgccaaatagttttgttatccgtttggcaaatgaatctggtgtggctgctgatttgacccccttgttaaaacaacatttcattcaggtaaatgctctggaagaggctcaaccatgttcggaacaattagtgattcagccttatgatatggttaccttgctcatacacaatcagggggcatagctcatgcgtttgggaagtattgaagctggagggactaagttcattttagcaattactgatgagcactaccgtatcttgaagcgacaacgagtagcgaccacaaagccaaatgaaacgctggcagcctgtgtttcattttttaagaaaaatccagtcgatgcgttgggaatcgggagtttcggcccagccgatattaaggtggattcaccgacatatggtcagattttaaatacaccaaaagctggttggtctcatacggatgttgtacagatgttgagggcagctttgaaaattccaattacttttacaacggacgtaaatgcttcggcttatggtgaatatatgattggacaaggacaagcagtgcgttcactagtatactttactattgggacaggcattggtggcggtgttatccaagataatcatttcataggtggtatgtctcatcttgaaatgggacatacaatggtcatacctatgtcaggcgataacttcaagggtgtctgtccatatcatcaaaatcggtgctttgaaggcatggcttcaggacccgcaattgaggctcgaactggcaaaccgggggaacaattgaagcgaaccaatgaagtatttaagttgatcagttattatattgcacagctggtctttgatgcatatcttaatttcatgcctgaaagaattgttattggtggctcagtagtaagcgaaactgaacttccagtgattagaagagacgttgagcagcttaataacaattatgttgaattaccgaacttagatcatttgattgttttaacgggaattgctaataatggttctgcaacgattggtaatgtcgccctggccaaaaatttgatattttaggtaaaaagagtcgataacaagtaacgttatcggttcttttactttactatgaatgaaaaatggtctggaatacttatttatgacttgattcatgctacagtagaatctataaggatacataatataagtctacgcttagcatagccatgattaacttaacggaggaaaatcaatgatcaaattaatcgtaagtgatatcgacggtaccctagtcgacagtcaaggacagttattaccggctacaattacgggagttcaagcagcggttgcacggggggcacaaatggtgttggcctcagcacgttcgcctaaggggatgtttggaattgcacaacaactaggaattaattcgaccatgattgcctataatggcgcgctaacggctacgaccgatgtgaatgatcgactaactgtttttgaagagcaagccgttgaccctaaactagcacaagctgtgcaaacggtagtagctcatgattggccagctgcctcaattagtatttattcgaataataactggttggtggctactaatggcccgtgggaacagcaggaagcgacgggaattggttatgcaccccatgtcacggatttgggcacatggttgcaacggatgccgacgccagtgcataaaatgatgatcatggccgatccagatattattcaggcgattgaacaacgattaagccgtgatgaatttagcggcttagcagtttatcgttcgaaagaaacttatttagaaatcgttgcggcaggcgtaactaaagcagccgcattaatgaaattattacaggatgatcaagttacccctgctgaaacgattgcgtttggcgataactttaatgatgttgcgatgctccagacagcggggattggtgttgcgatggctaatgcgccacaacccgttaaagaggcagcgaacatagtaacaactgataataatcataatggtattcagctaaccttagctcagtattttgctgatgttacgcgctaattaaaaggccatttacgaatcattaaaaaataggaagcccaacgccatgttcgttgaacttcctattttcgtattgtagaagatatttaagagaaacttacagctagctcgttattagcgcgctaagatttctttaatagctacactggcttccaatggttgacgtcccaagacatgagctaagtcggctgacttttcagccagcgcaccatcattgattggggattggaatgaggcaaacaaagcagcggtatcatgatttagaccagtcgtttcaaggaattgcacgtacgcatcctgactgacttgggtaatcttaacttggttgccagttgcttcttggagtgcttgaccgagtgcggcataagtgaggggtgtcccagcaaattcgtacacttcttgaggggcatctgccatcaaaacggttgctgccgcttcggcatattcacgttccaaggcccagccagctgtattattagcccagtacaaggtttcttggttatgggcaccactttgtaagaagcccatttcgttttctaaataccagttgttacgaagaaaactgtgcgcaatatcagtcgcttttatggcattttcggtggcccgatgatcattggctaaggcgctgactgctgcctgtgcgttgggaaaactagtgtaggcgacaaatttaacatgagcggcgttaagggcagtcacgacgtttttatgagcggtggcccggtcaacgggaccaccaggttgtgatgaaacgaagagcacgcgttcaacgttctcgaaggctttcgtcattgagtcgacatcatcgtaattcccggtacgaattggattatcaggaaacagctgagcagctttgtcctgattacgagcaattactaaaacattttctgcaccaactttagcattcagcgtactaacggcgctttgaccaaatttaccagtagcggcagtgatggcgtatttcataattaaaacatcctttcaaattgctgtagcaataaaaattacagtgattagcttatcacatgtaacttcaaagtcaacaagtttgcttccaataaccgaaaagacaattttcgtatgctgacatttaatgaatggctaagaaaaataaaaacgagtattagtgcgaatttctgtgactaatgaagtttcaccgctattgatttatgtccgaaaaaataggattagacaacttggtgttatctaatcctaatttataaaagtcagcgataaatggtggcgtttacttattattcaacgacgtcaaaattcgctgtggtgcctgtccgttgaagtcattggtttgtagccgttcaaaaacgtctttcataatgtgcattaattgttgatcggacaaaccttgggcagataatgtattgagcatgacttgcagcaagtcgattggtaggaccggtcgctgttcaggatgcgcactgaagaattcctgaacggcttggtcgtgtaagcgccagtaaactgggttttggacatcatcaaaaatcgtttttagttgctctagggccggtgatagcggaatgtttttggcaataatcgtcgttagcatcccatcacgagccgggatacgaacatccgccacgtaatcttttaatagtaagaaatgagtcttgaatggtggccgtaacgtaaaggtcatcgttaatgcaatttgactatcagtagctgccatgatgattccccctcatatgattggcagtgagtggcaaattaatgacgcttcgtgaagcggacgacggcttcgcaacgagctgtttgtgggaacatgtcgatcgattgaatatagtcgacttgatatccgcgggtaagtgcttgtaaatcctgagcaagcgtcgatgggttacatgaaatgtagacgagtttttccggtgcgctttgtaagatggcatcaattaagacgttatctaaaccagtacggggtggatcaacgaccattgcatcaggcgcaaaaccgctcgctaaccattgcggtaacaagacttccgcctcaccaacttcgtaatgagcattagtgatttgattgcgttgggcgttggcattggcatctgcaacggctgccggaatggtatccattccccgaacttccttagccacgtcggctagtgataaaccaatcgttccgacgcccgaataagcgtcgaccagcgtctcattaggcgctaagttcaaagcttcgcgtgctaagcgatagagtttcttggtttgctgcgggttcaattggaagaaggcccgagcagataaatcgaagactaggccgtctagctcctccgtaatagttggtttgccggccagtaatgttgtttggtcaccccagatcaatgaagttttaccagcattgatattttgcatgaccgacacgaccattggcagtttttcagcgattttcatcaataattgatgctttttcggtaacttgggtgtatttgtgatgaagaccagctgaatttcaccagtggcggccgcttcacgcacaacgattgtcttgacgatgccagaattatgttcttcatcgtaaatcggtacttggagttcctccagccaagccacgacttgacgcatgactgtcattgtcgccggcatttgcaccgaacaggtcggtaagtcgactaggtcatgactattttctttatataagccagcagcgacgtgcccatcaattaaacgaacttgaaattgggctttgttgcggtattcataaggattagtcatcccaatggtgggccgaacatcatagtgtcgataaccagctgggcggtatttttcgagtgcttgacgaattaaatcttgcttaaaggctaattgggccgggtagtcgaggtgttctaattcaaaaccaccgacttcgcccgcataggcatcgcggggatcgacccggtcaggactaggcttgcgaatactacgaatcttagcttctaggtaacgtgggtgcacggcggttacttcagcaacaacgacttcttcaggaagggcgcccttgacgaaggtgatgacgtgtttgtaatagccaataccttcaccgttaatgcctaaacgccgaatggtcagtggaaaacgctggccgatgttaacggtcgcttgcactttttcatccggctgttgtcggcgccgatcattgtgcgatcgggattggtgcgaataatgattagattgtggcataagtttgattttgacctcgtttttctgtgaactgtgttaacctccattatagcatgtggaaagacacaggataactgaggaggattgtttgaaagtcgcctaacagtcaggttataatgattctaaattagtaatcgggggtgggcatatgaattcattgattagtttagaaaaagttaattatcaaatcgctgatcaacatattttacatgatgttgattggcagatttcagctggggctcatattacattgacgggaccatccggtggtgggaaaagcacgttattacggatcattgcggccatgatttctaaaacaagtgggaccttgatttttgatgggcagccgattgaaagctatgacccaatcatgtatcggcggcaagtctcatattgtttccaacagccgacgctatttggtgagacggtggcagataacttagctttcccgtaccaaattcgtaagcaagtcatggatacgcaacgagtggtaacggcgttaaataatgttgggctgtccgaacgaaccctgcatcagccgattaccgagctttccggtggtgaacggcagcgggtcgcgctgattcgcaacatcttattcttaccaaaagtgttgttattagatgaggtgacagctggtttggatgaaaataataagcaaatcgtgcacgcctggttacgacagttaaatgagcaggatcacgtgacaacgatcatgattactcatgacgcgacagagattgctgcggcagatcaattagcgaaagtggttgctggcagattggaggtacatgcatgaatttagcagttaataatacgtcgctatttttggcggcaatgttagtgctcgtcgcgttaggaattagtttgtggcagaaacttggcttggataaggacatcgtcattggtgtcgtgcgggctgttgtacaactatttatcgtgggttacttgctaaagtatattttccgagtcaacaatttgtggctaacgttggcgatgatgggcttcattatcttcaatgcggcttggaatgcgaaaaaacgggggccggggattgaccatgcattagccatttcgttattagccatttttgttagtacgggggtaacactcggcgtcctcgtgctatctggtgcgattaagtttgtgccatcgcaaatgattcccatttctggtatgattgcgtcgaattcaatggtcgcaattgggctggcttatcgcagcctcaatagtcagtttcatgaccagcggcaaggtgtgcttgaacggttggcgttaggggctggtctactcgacgcttcgattgccatcgtgcgtgaggcgattcgtacggggatgtcaccaaccattgattcggcaaagactgtgggtctagtcagtctgccagggatgatgtccggtttgatctttgcaggggtcgatccagtacgggccattaagtatcaaattatggtcacgttcatgctcttatcagcgactagtttggggtcaatcattgcgtgctatttagcttaccgtaatttctataatgaacaaaaacagttgaagtaatgactcctgattgcagtcccgcggggagtcctttatgatggaagctgaaataaaacttaatgcgggggtattgatgtgaatgacgcagcggtttgggttccagttccagcaatgttttactggggctggttagtaccactcatatttggaaccatttttggttggcgttatcatcgcgataaggttcgcctaggtaacggtatttggttttcgctatttttctattcgtttttaaccatgctggcgattacaattttaggtagcaatatccactggttgatcattatcagtgggacgttgtttgtgttgctgatcctgttgattgggctgatttttaccttacaagccttcttgctcttatggaatgcgtggatcatgtggcgtcatgagagtcatacgttggcgaatatgctgaccttgtacttgggactggccattctgattttgccatttttaggcaatctgttgagtagtcatgtgccgcagcccgtgagttattttttgacggtatttccgaatctggtcattttttaccttggtttttggttttataactatctgacgatgctgacgatttatcaattcaattggccccgtctgcgacaagattatattattgtgcttggggctggcttgttagatggagaccgtgtctcgccattgctagggcaacgaatcatgcgtggactgcgcttttatcagaagcaacaacgcaagacgcatcatcgggccgtgatgattttctcaggtggtcagggtggtgatgaaacggttccggaaggccaagccatgctggaatacgccattgcgcatggccttcctgcaacggatggctgggcggagacgcaatcgaagacgaccttgcaaaatatgcagtttagtaagcaattgattgcacagggccctgttaaaaatccacgcacgatttttgttacaaataattaccatacctttagagccgggatgtttgccaagcaagcaggtctaaaagcggatggtattggtgcgcggacggcgcgattcttcttaccggatgcgatcattcgtgagtatattgcgatatttgtccgaaataaatggtggcacgcggtggcgatgcttggtatcttgattgtgtcgctattattgacgtggtttgatgtctatcaagcatcgttatagcgattactaaggctgaatcagtaattaaaatattccaagtcaggtgcacactggcttggaatatttttttggctggaatgttaaaaatgaagttatcgaaatggcaggatacttccatttttttactggtggactaaatgttttaagggcaaacgtttttagtgaattcattttgaaaaaccaatttgtcttgacaattacttgaaaggtcgttatattaattatggaaacgattccaaatagggggtgagcttaaatgacaacgattagtgaaatagcagctgaggctggtgtaggtgttgggactgtttcacggtatttaaaccatcggcctagtgtttcagttgctaagaagaagcaaattcaggcagcgattgaaaaactggattacaccccgaatgccattgcgagtcagctacgcgcgcagagcactaatacgattggtgtactggtatcaagaatctctaaccccttctttgcacagttatttgatgcattggaacgggagttaaacggatacgggtttcaagtgatggtaatgcagactcatgatgatgcgttggcagaacaacactttctggataaactcaagcagcaacaagtggatggcgtcattctggcatccattgaaaatcaacaactagtggcacaattgtcggcgacatatgctaatcagatggtgctgttgaatgaagaagctactgatattggtattccaatgatcagtttaaatcattatcaggcaactaaagatgctttggcatacttatatcatcaaggtcatcggcgaattgcctatgccacgggtggtgattttcccagtacgcatcatggacgttcgcggacgcaagcctatttagatttttgtgaagagcagcagttagttgtaaacaatagctgggttttcgcacaacaacatacgattgcggatggacaagcgttggggaagcaattagcgtccttaaaccctattgatcgcccgacagcggtgtttacaaattctgatgaggtggccgttggggtaattgatgagttacagcaacaacattttcgcgtgccagatgatatggccgtgataggatatgacgatcaaccatttgcggcggtggcccaagttccattaacaacggttcgacaaccggtcgcggcaatggctcaattggcggtcgatcagctattacatcacttgggccggttacaacgacctgagttaacgattgatctaagcttagacttaatcaaaagaaaaagtgcttaagcctttttcttttgattaaagtggaatcgattccaaatataggagtagtaattatgcaaaaaaattggtggcaaaaagaagttttttatcaaatttatccggcatcatttaaagatgctaataacgatggcattggggatttgcgtggaatcatccaaatgttaccccggttgaaacagctgggaattacgactatctggttatctccaatatatcaatcacccatggttgataacggttacgatatttctgactaccaagctattgattctcggtttggaacgatggctgattttgatgagttgatggaagtaactaaacgattaggattaaaagtcattttagatttggttatcaatcatacctctgatcagcacgtgtggttccaatctgcaattaaatcgccgacgagtccgtatcgtgatttttatattattcggcgtggggcacacggcaatccgcctaataattggcgatcaaactttggtaaaggctcgtcatggacgttattgccaggaagtcaggatgagtattatcaccatgtcttttctaaacaacaaccggacctaaattgggaaaatccggctctaaggaaacgaatctatcaaatgattaattggtggttggcaaaaggggttgcgggttttcggatcgatgcaataacattcataaaaaaagatcaagattttgccagcattagtcctgatggtgttgatgggttaggtaaagtcaaacgtaaagctgaaaatcgacctggtattgaaaagttcttagctgaattgaacacggctacttttaaaccagctaacgcggtgacggttggagaggcttcgggggttagttatgaccaacttggacaatttattggtaaaaaaggttacttctcgatgatttttgactttcattacgcagatattgatattgcatccggatcagagtggtatcgacgagttaagtggacaccgacggacttacggcgcgcaatttttaaaagccaactggcgattcaaaatgtcggctggggagctaacttttttgaaaatcacgatcagccgcggagtattgataaatatattcagacaccagcttatcggaatgaaattggtgccaaagcactagccttactttattttaacttgcgcggttgtccatttatttatcaaggacaagagctgggggtgacaaatgcacggcgtgactcaatcaccatgtttaacgacttgagcagtcacgataattatgatcgtgctattgaagagggatattcagcaagcgaggcacttgcctttgtaaatgctcgttcccgggataatgcgcgattaccatatccatgggatgattccgtcaatcaaggctttaatcagggtgccaagccatggattacaccaaaacagtcacatgatagggtaaactggcaaagcgaacaattagattcaaattcagtttggcatttttatcagtcattgattaagttacggcaaatatcaaatttaaatcaggatttaatagtcggtgattttaggccaattacttgtgattgtgaccaagtgattgcttatcaacgtggtcgaagggtacaggtgtatgttaacttaagcgcaaaacggttattactaacgttacctaatggccgacctcgattaaataattacgcacattatcgactcaatacgttggaaccatatcaagccattctttttgaggtgaattcaaatgagtaaaaactatcaggtacttgcgaaaaaaattattgatattgttggtgttgacaatgttgaatcggttactcattgtcagacacggttgcggtttgttgttaaagatcctaagcagattgataaagcagcgcttgaagacttagatgaggttaagggagtctttttcggttcaggacagtatcaggtcattattggcactggtgttgttaacgatgtgtatgacgcgattgaaaagttacatttagttaatgcaatttatagtcaggaaacgacgactacgccgactcctgataatcagaagtcaccattgcaacgattcatggcaatgctttcgggaatctttattccaattattccggtgattgcagctactggacttttcttgggattacaaagtgctttgactaacaatcaggttttacagttgtttggaacttcatctgccgcgattccggcaagtcttaatacagtaatttcagttttaacggggactgttttttcatttctgccagctttaattgtttggtccacatttcgctattttaaaggtacaccaattgtcggtattgtgattggactaatgctcgtttccccttcactgcctaacgcgtattcagttgcgggtggtacagcgaaagcgattatgctttttgacaagattccagttatcggtagtcaaggatccgtattaacagcgttagttgctggttttcttggaagtaaactggagcattactttcataaacacgtccctaacgttctcgaccaaattttaacgccctttttaacgatgttagttacttttggtattatgattttaggggttggcccggttgtacactggattgaaaatgtgatgattagtggtgttgaagggttgattaacttaccatttggaattggtggttttttgattggagccgcttatccgttaatggtgctagttggtattcatcagatgatgattgccatcgaaacgtcactattagcagctaccaagctcaatccgttaattactttagaagccatgtatggctttgctaatctgggggtagctttggcgatgattttacgagcaaagtcacaaaaggctaaggctaattttattggcgcattttcctcgcaactatttggtgtttcagaaccaaccttgttcggggtcttgattcgctataatttcaagccgttggttgtaaccgttttaaccagtgggataggtgctggcgtactgagtgttatgagtgtggcagcaaattcatatggtctagccgttgttccctcttatctgatgtatatttacaatgctcgtgatttgctgatttatacggtcgtctcgttattgacggtagcagtggcttttattgccactaatatgtttgcgattcctaaggacatattaaaatctgatcaagtacaaccaaagattgtagatgatacgatattttcaccagtttctggtaaaagtattgccttgagtacggttaacgatccggtctttgcatctaagatgatgggggacggcattgcaattaagccacaggaacaggggccggtaaaagtctgtgcgccacaaagtggtcagatgagtgttgtagccgatacaggacatgcctatgggttaacaaccaataatggagttgagttgttgattcacatcggtattgatacggtgtcattaaaagggcaaggctttaaagttatcgttaaaccggggcaaactgttcaaaagggtgatctcttaggtgagtttgactcaacggtgttaaaagctgctaacttagatgacacggtcatggtgattgtgacaaatagtaaaaattatcaacggatagaatcagaacctaatcagtctattcagtcgggagcagcactgctggcgattcaagggcgtccggaaatgacgactgcaacagcatcctaaacgtaagtacgataaaaccgcgatttgccatgagcaagtcgcggttttattttgaaaatttgagtaagtgcagtactagcatggactagctagcactaaccgtaatatcaccattgctggtcgtcagtcggtattgtacggctgccgattggttgacctggtaatcaccgccatcggactggagatgattgaaaatatgcaagtccccatcgctagtgctagctttaacaccggttgtccgtggcgcggttattcgaatatcaccgtcactggctgtagcggataaactttcagtgatgcgattattattgagcataatatcaccttcgctacttgttagcttaagggctttgaactgattattggttagatggatgtcgctatcagcggttataatttttgaagcagtcttggtaaaatgactgtcggtgatgctgatatctggatcgctattgatttgtagactaggcgccgagacacgagttaaccgtaaattatcgccggtcaacgtcagcgactgattgactttgacatccgttaaattaatatcgctatccgtactaagacttttcaattggtcgacggtgacgttttgcaacgaaacgttaccactttgactagctttggcggttatttgatgaatagtagttcctttaggcaccgtaattattgtcgtgtcagcaaattgtccgacgttatcgaacatgaagcccacggttttggcgttgtgtgtcgttgaagtaacagtgacgtgaccattgttggtcgtaacagttggtaaggcgcgcgtggcggtaaccgtgatattagcagctgtgccttgcttaatagtaatattgttggccgttgcaatcgtgacatcttttagctgactgacgtgatagcgccgcgtcttatgatgaacgatatggaagccttgatcccaataaacgctttgaataccgttattggcgattccaaacatggtcaaaatcagtccaatgactaataaaataatgccaactctaattgtccttcgcatggtggtgacctcctcgttccgcccgatttttcttaacaaatcggtggtataggttttgtacgattttggcaattccttgcagaataacgctaataagccagataaatagtggtaaaactaatagctcggcaccaataatagcaagaccgctacctaggtagaatagtgcgacccatagcgactggccgaagataccgatgccggctgttagcatggcaaatgcgaggatggtcacgccaattaagatggcacccgctgcaatcacgaatgcaaagacggtaacggccaaggcaaagaagaccgctaaaatagctattaatgcgggaattgtgatcggtgttgataataaagcaagcacaattagccaaatcgtgcgtacggttgcttgagatttttgccgtttagaagtattggcattgagattttcgttaaaacgaatcgaataatcggctaacactttccgagccaattgtttaggcgttcccagttcggcaacgcagtcatcataattggcgattgccgcgtctagtaagtattcgcgataaaattcaacgacctcgtcgcgttcatcatcggtaagttgaacgagtaacgcgttaaatttggataagtagtcgttcatggttcatcctccccctgaagtaagtggttaatggccaaataataggtttgccactcttgttgaatcgcactcaattgtgtcaggccggcgctcgtaatctgataatagcgtcggttgcggccttgataggcctgatcgtaagtcttgacccagtcatttttcttgagtcgtcgaagcactgggtagagcgtcgattcggacaccgagatggcggcttgcaagcgctgcgttagcgcgtaaccatagtaatcttggcctttaaggcaggctaaaacgcacccgtccaataactcggaactaatttgaatggccattgctattcctcctgctatattatacgtcgtatagtattgctcaatgagtagtatacagtgaagtgaaactaactgtcaaacttaaatattaaaataatgataaaaggtaaactacctttagccactagtaaacgcaaaacgtgcttgctaacggtgactgaaataggcccgtactaaagcttaaaatcatgatgctcagcgaataccagctgtccggtacgcaagggtgatactatactgatctgataaggcctagaaaaatgactgatttcgatatataatcattatattgaaatattaatacagttaattgtcatggctgagttaattattatcgataatattatgacggagggcaattatggaaacggacatgaagaattgtgtggtttgtggtgaacgaattccccaaagtgcccagtattgtgaaaaatgcggcagtggacaaccgacagttgctgaggataagcgtaaagacgcggaaacgacgactttaaagcagccgcatcatcaaaaaaagagcttacggacgtggtggttttggttgccaccagttatctgtgcgctagtcattgtctttgagattggatttaatttgtatcaggctcgggaagctaatacgcttgcagccaatattcaatcagaaatcagaacgaataaagctgaatatggcaaggttaaagtgagttggaatggtggtgccatgcgtgtgcgaatatcaaagcaagcgccagttattgaaagtgtcgatcaaggcaagaccgcttcgtggcagtcactagccaagacactgcaaagccgctctgaaaaaatcgcgaagaatcacaatcaaaaatattcacatattgaggttttgtcgcctaagaacaccaaatatatgtggttggaagtcaatcatggcaagatgaaattcaatattgcaaatcagttgaattagctgaccgggttcacgacataagcaatggtgtaaatggtcccggatggtttttagcaacacaatgagtgataaaagatggtcgctgaaagacgccgacacacacaaaaagcccggttttccgggctttttgtgactatcaactggacgctatcaaatagattgcgatggctattggtttgtgacgttaccaccaaagtatttattagacagtttctttaaggtgccatcttgacggagttcttgaatcgctttagacagttgtttttggagtgaggcgtgctttttagtgacaattgcgccaatcttttgtgttttgatttctgaaccaccactaatgaatttcaagctggcctttggattctgcttgaggtaagcatagaatgcttcccgtgagttgattgttccggcgacgcgaccttggtttacgaggtcgatcgattgttgaaagccatcggtcggtgtgacggtcgcacctaaacgtttagcatcggtcgcgttattactagtcgttgtttgggcaactttcttgcctttgatatccgtgatcttgttaattgaggaccccttcttgaccgctaattcggatttagagtagatataaggcgtagagaagaggtatttttgtttacgttgcgcagtttcagcgatatcgttgatgaccacgtcgtatttgtcgacatccaggccagcaatcaaggagtcgaatttcgttgggacgaactttgccttgagaccgagcttcttagcgacggctttaccaaggtcgacttcaaaaccagtcaacttaccgtctttgcgatagctataaggctggaaggtgccttctagcccgatcgtcaacgtgccgcttttttgcaatttgagctgactactcgtgctagaagtgctgcttttagatgagctagaattaccgcatgccgtcaaggtgactgttagtgcgagtcctaaaattgttaaacttactgccttgagccattttttcatatcgattacccccgtagagctatatttttttgacaaaaaaagtcgtcctttatcgaaaaaggacgactgctgatcgtggtaccaccttagtttccaagcgcgtgcacaacgcttggctcaatgagctaattcactcagtacactaacgggtacgacgcgttactggcttgctaatgctcaccaataccatttagagaccatcttcgtatcactgtccgaccgttttacaccaaccaacggctcgctttgcgtggcaatcacactactcatctcatcacaatgtttagatattgaggctagtctacaagattaaataacaattgtcaaatcgaaatcacattttatattaatctaaatgccatttgttgtgaatgcgccagatcgatggttgacgtgagacgctagggggtgctaaaaaacgtgcatctgactgggattttccagttagatgcacgttaactcaaatgaacgctattggtttgctttgtctgaaatcgtggtgaacgtcatcgcggctaagaagtcggcaattcgttgcgttggctgcttaaagaattcagcgggtgtcccgtcgaacagaattttgccatcttcaacaaataggatcttatccgcaactgcgcgggcaaattccatgttgtgagtgacgataatcatggagtcttcttcctgagcgagggctagtagaacgcggagcacaccagcttcgagttcggggtctagcgcactagttggctcatctaacaagatgaattcgggatccatcgctaacgagcgcgcaatcgcgacccgttgttgttgcccaccggataattgttcggggtaggcgtcggccttatcttgcaagccgacccgggccaacaattctagcgcggactttttagccgtcgcggaatccttttttaagacttgcacggggccttccatgacatttttaacaacgctgagatggggaaacagattataaccttgaaagaccatcccagttttgcgtcgaatattgagaattgttttattagtcaacggcttagtaaagtcgatagtttcgtcattgaagtggtataaaccttgttcgggccgttcaagcaaatttagtgaccgcagtaaggttgatttaccagaacccgaggggccaacgatgacggtcgtctggtgttctttaaattcagtattgatatcggttaacgcctggtgatcgccaaacgtcttatttaagtgttctaatttgatcattcgacaacctcctaattaagtggccgtaagtaacgtgacgtccgcttttccaagtagccttgtagccagctgagaatcgtacatagaattgcgtatagggcagcaaccagggagtacatcacaagtggttgataattttgagcagcaatttgttggctgacttcgaacatttcaataatcgtgattgaagcggccaaggaggtgtccttgactaagctaataaaactattggatagtggcggtagtgagactcgcgcagcttgcggcaaaataattcgtttgagtacttgtgacttggtcatgccaatcgagtaggccgcttcccactgaccttgaggaatggagagaatggctgctcgaatcgtttccgcacagtaagccccggtgttcagtgaaaaagtggcaatcccagcagtccaggggtcgagctggaccccatttggaaagagccctttgattttaaggtagggaagcccgaaatagacgataaagagttgtactagcagtggggtactccgaaagagccagacgtagaagttagcgatggcttttagaattaaaaaccaaccacgacgagtcgaaatcttgacgagggccgtgaaaatcgcaagtatcaaaccgagaataaacgaaataatggcaatcggaatggtatattttaaacccgctgcagcaatttgcggcgttgatgtgacaatgatgtgccagattgaatccatagggagcctcctgtaacaaattagaatttggtgctatgtatcccgccataatagcgggcaatggtacgttacttatcagtaacgttaccaccaaaatacttattggacaatttctttaacgtgccgtccttacgtaattcttggattgctttcgagatttgtttttgcatcttagggtgttgcttagtgacgatggccccgattttctgtgaggcaatgtgatcgccggaatcaatcagcttaatgttagccttcggattctgcttgaagtaagcatagaaggattcacgagaattaatagtcccagcgacgcggccttgtgagacgaggtcgatcgactgttggaaactatcggttggggtgatggttgcacctaaacgtttagcatccgttgcgttattgctagtcgttgtttcggcaactttcttacccttaatatcggtaatcttactaatcgatgagttcttcttgacggctaattgtgatttagaataaatgtaaggggtcgagaagagatacttcttctttcgggccgccgtttcggacatgttattcatgacaacgtcgaatttgtttgtgtctaaaccagctactaacgaatcgaacttcgttggtacaaatttagcttttagtcccatcttcttggcaacggctttcccgaggtcaacttcgaaaccagttaatttaccgtctttacggtagctatatggttgaaaagtgccttctaagccaatcgtcaacgtccccgatttttgcaatccgaggtcgttagactttgaactgctgctagtgttactaccacaggcggtcaatgtaactgctaaacctaacccaagcactgcaacgcttaattttttaacccatgacttcatgattcacactcctagaaatttttcacaacactcctagtttatccgaaaatgaagctgttaacaaaaaataagcattgagtgtcgcaaacggaccaatgcttattttataatcggctagtatagcgttagtgtagcgaatcagagaaggactgtcaaacccttttttatcagtaaaagcgacgcaagcgcgggtgctcaaactgatacagtataaatggtcgtaaagcgtacggcttatttgatgtggatcctgatataaaaagtgctaatattcaggatcacgaccactcattacagctgacagatgtaatcaaaaaatgcgactaatcgcaattattacggttagtcgcatgatgagtgggtcaagttagaattggggtgcgaacgatgctgctggaacaattactggtgccggttgtaagatgtggccaaggcgtttaattcccagcgtaatcgtttcgacgtcgagactggtgaaattcaatcggaacccgtttttaaccttgcgacttgcgaattggcaagcggatggcacataggcaacgtgtgcttgcggtaaaacaacgtcattgagcaaggttttagcatcaattccttctggcaaggttacccagatgaagaagcccccattaggacgggtgtagtggacattttgcgggaagtattgatcgagtgcggctaacatcgcgtcacgtttaatccggtatgaagtactaatagttgcaacgtgatcgtcgatgtcgtgttgatctaggtagctgttgatagcagccagtgttacatttggcgattgaacatcgattgcggatttcagtccgaccaattcgtgcatgattgcgtcgtcagcaacaatccagcctgttcgcaaggccggggaaagaatctttgagaaacttgagataaagatgacgcggccttcagtatcgtagtgtttgatagccggaatattttgaccactataacggaggtcccggtacgggctgtcttccaaaataatgacgtcgtactgattggcaagggcaacgagtgcttgacgacgtttggcactcatcgtcgtacccgttggattgtggaagtcaggaatcgtgtaaatcaatttgatctcaggatgagctttcaaggttttacgaagttgacgaatattcatcccattatcatcaactggaatttcgtagtaagtcggttcgtaagtgtcgaaggcggctaaagcccccatgtaagtcgggccttcgacgaccatggcatctccatggttcaacatgagcttcgccacgaggtcgatggcttgctgaccaccttgggtcatcatgacattgtcggcactaacttgaacgtcagcatgagtcgccattcgatctgcaattttttggcgtaatgccggcaacccttgagttgatgagtattggaaaatgccttgaccatcgtgttcaatagcatcacgataggcttgctttaagtcgttgtcagggaataagtgctgatctggaaaaccaccagcgaaggaaatgttttccgggtttgcactattcttgaagacctcatctaggtcggaagtgtcattgtttaacacgcgatttgcaaataattttttcataataattttcccccactcagttttttgtacttaaactgttttctttgattatcaatatgataaaataaagcttgtaattagtaaaactcaactttttcaataataagtgaaataaattcacctaagagaggtaaatcattatggcaaacttcgcatatgaagtcttttcaacggtcgttgcccaacatacattctatcaagcggccgctacgcttaacgttacgccaagtgcggtcagtcattcgatcaatcagttggaaaaagaactgggttttccgctattcatccgtaaccgttcaggcgttgaacttactagtgatgggcggcaggttttaccctatgttcaagagattctgaatacggaaagtaacttgcgacaagttgccgataatattcaaggattgcactctggatcggtacggatcggcggtttcagtagtgtctgtatcaactggttaccccgaattattcgcgaatttaatcataaatatcctgatattaagatttcagtcatgcaaggtaactttaatgaaataaccaactgggccaagatcggtactatcgatattgggtttacgtcgatgccagtcaatgagaacttattagtgcattcactgatcaatgatccaatctattgtgtgacgcccgctgattttatcccagaaaatggtgaattcatcacgactgatgacgttgcggataagaactttattctacaacaaagcgattatgaccgggacaccaagctggcactggaccactaccacgttactaataactttttacgattctcgattgatgatcaatctattatttcaatggtagaatccggtttaggcatgggcattttgcctcagctagcactacggaagctaactggagatgttaacacgttttcctttgccgaaccttataatcgtgagattgccttagttgccaacaaaacccaggcagccgctccttcaacggctatcatgattcgtgctattaaacagtttttgaccaaggagtatccggatcagatgttatggcagtagcaaagttaggcagagcgttggcgtagccagcacagacttcagtggcattgagcatgtttcgggaagccactcgaaaggtagatgaacgaccgcctaactggtgcaattagtcgttaaattattatttactactaagaactttgaacaaatgttaatgggacatcaactgttttgaatacctcagtataaagatcatggaacagtcgtaattctattatcagactgacagttatatggcaaagtcgctgtcgctaaaatagccacggccaattcatcagaaacggaatacgcacatgtccgccattcgaacgctatcccgactggaaggcgttgtaggacgcgctcaaccaggcagggttggcactaacttaaacttttttcagcggacttaagctggctgcttttaacgttaaaggcttactacgaccagatcgcacaattaaagctaaaaatagccgcttttccagtagaccaagttggttgtcaggaaaggtggctattaatcttttagatatgttttagataagcactctgagcaaaaatgatggctaggtcgattggacgggtgaaatcagtttataaacgtttgaatcgtattaccgatttgatggttgttgagtaagccggattgggtgcgccatgagcgcaacactttttgttgatagacctttaccactggcttgaagatagattgaccagtcagggcactttgcagtggtaggggttggtcagctttgatggcttttccagcgacaatcaatacctgcatcttggaatcaatggtatggcggtgtgcaatcaatttagctagtgtggccgtttgcgacttggcggcaaccggcgtcgtttggcgacgattgttactttggcggctggtaccgttaaatggggtggccatcagtacaaggtgttgtggtgataagcttgttgttgtgtgttcgacatagttagtggcagtaagaccgccacgaccgtaactgacaaggttaaaccggcgaaatttaaactgctggcgggcgacggttaggagttgctttaataaatgcgtttgtcggtttgaatcaaggttcttgggcagttgcacttgtatgtaggggcggttgtcactgttgagcaattgtcctttaaatgtcacggtccccgtcgctgtaattttggcggtgaccagtgtctgagtggcactactgttctgaatatgggcagttaattgctgaatctgattgtgagttaagtggtcatctagtaagagcaccattggaatacgttcagtagaagtcactgttatggtggtgaccggttttgacttgtggacttgttgttgccaaagcatggtaccaccgatcattgctagcagaactactagccaggtagcgcctgtcaatacttgttttgtcgttgctttcatatttcccgttactccatatctccaaataaactgcacttttaatgtaagccactcacagtcaacttgcaactgtttatacacacttttagatagcaaaagtcccgaccaagtaaatttggtcgggactccttaaaggtatcagtcatgtgctccgaatagggcagagactgatgctttaagattacatatggtactcaaaaagcatcaccccctttcattaattgtccgtagtttagtcccatttaatggtcaggtcaactaattagttcgcaaacggactaaacgcggtataatagaattccttggcaggggcactccgcggttgcgggggacttaacgactgaattttcagttgtcatcaagtcagttcatcattggtttattattcaaaatgggagctgatagaaaaagttcgattcaatgacgaatcgaacttttttgatcagaaagcatgaattacgtgtaaattttgatacgagaaaatagactggagttcttactggtttgattgattatgcaaccaagcgtgtgattgccaaaggatactaaccagtagaagcaaaaggccaattaacgaaattatagcgcccaatcgtaatccgggtgtatgatattgtaatttgactttatgctgaccagcgggaatttttgcaccaacgaaacctgtattaacaacttgagtcttagttggtttgtcatcaactgttaagtgccaaccagttgaatatggaatcgaggtagttaatacgctggcagtttgtgcttgagtgcgacccgtaatggtgttgttagttaccttttgttgtttaaggccgtgcttttgaatggccttgatttgacgctggtagcgccccttaaatccaactgccattaattttacatgatggatttttagttcaggcacttgactaaaacgaacggtcacgattcttcgtaaatgacttgaatagcctaaatttaaaataacacgttttcgaatcgaataattcgaaagattagttggtgattgttgtgaaaagttgttacttcgataagcggttgatgcggataaatagtaaccgctgagttgccaatcagtatgaagtgcctggcgaaactgttgaatcttagctaatgttgtattggggcgattagcaaatacggcattagccgcattattttgcaaaaattgattcaacgtaggtttgaccattgtcataccgctaacctctaaatataactctttattttgccacttttcaggatgatcaagaattaaatcataggtcaattgatgtccctgacaatcactaactaattgatgtagaccatcttggttagtggtttgattgtcattaacaatttttttattagtagtgactaatttctggcttagtcggcttgaagagttgactggcctgtcggtaatattcctaactttaacggtataggggacagtggtggctattttttgaggttgcacttgtttaacaccagttattggcttatcagtaatcggcgcttgtatcattgcttgctctttatcaacagcatttaatcgttgatatttggctgcgctaatctgagcgttttgcgtggatactaatggtaaaaagttgtcattaacaaaaacgatagttccggttttgttagataatccaccggccactggttgatctttaaatatacgcacgtgcccatcgttgttttttaaagcatgatagcctacgggaatatttttagggtcataacggtctgctagttcaaatatataacggacccccagaaggttgcgtgttgttgtccgaccatcagctgtgcttagtggtgaattaggatcggcctcttgattgccaattgactgtgaaaattggctaatacttctattctgtactgagaaataggatgcaatatcatgggtgccgagcaacattgagatgtttttctttccagaagcagctcctctagcatagaatccaggggttaatgtagttcgatagaaattatcattacgcggtaaagctttttgagcaccatccaaatatttattaatccaactcgtggcacttccacgatatagttgttgtggattggcaactccggaactggtcatagttgcaccaaagccagtattaattagattaagacatagcagagtgaaacagccaattatcagtgttaagcggcttaaatgcatcgcacttgacccgataaaccaggtgattaagacgaatagtaatatatatgatattaggtcgcgcgcactaacgttaaaagtaaaaccatttacgacccaaataattataattaagccaacactggcgcctagaaatagtcggtaatcccaactatcaagttttttccagtcatcgatgagtcgcattgtaagaacgctgaacagcaaagtgcttaataatagccaacgattggagggcgaagatagaacgttgaatgtggctgcaacagctggaagtaataggcctactaataaaataatgagtagactatttaagtcccatcgttgtttaaaatgacgtaacgaatgtaaaatagctaaccaagttaggctactgatacctaaaatgacccaaaacggcatcccatcactatttaaaaccaaattgggtagcgcaatataataacttaatgggtagagcgataatccgttggcaaattggccacctgtacgtgtcgagtgcaacatggcgaggacggtcggaataactaacactgctgcacacgctacaccgactaaaacagcgcttaataagtggtaaatcaattgccaaaatcgtgcatacgtttttgtttgacgatattgttgccaataacgccagattgtgtaaataacgctcccgagtgctaatacgtaagcaaagtaaacgttactggcaaccgtgattgcaattactattgccaggggccaccatgattttcctctgaatactcgctcaattccccaacataataatgggaaaaagatgaggggtaataagaagaagggatgatgcatgccgatgtgaagtgcaaaagcagtgaaggtatatgttaaagaaccaattaaaagacttaagcggctaaagtgccatatcctagcaaatgttaaaaaagctaggcccgtagcatataagcgaatcaaaatcagaaactgatatgcaaattcaattttagtagttggaaatagagcgactaagtagttgaatggatcgccgacaacgtaatacgcaaaagtcgtcatttgatcggctcctaggccaagattccaggaccatccaaataatgattgtgtgccaattcccttaagcattttttggaatgctgttagtattggcaaatgctgtgaaatcccatctactgtccaaatcaaagaccgtccgtccagaaatagtggactataaatgatgcaagttaaaataataaaggctactgtataagtaatccaaactggtactttccccaaatgacgcatgaaattctcctttgtatattggcataaagttttaaaaagattaactaaaaataattgaatgcaaccaacatagagatatagtcaatctcaatgattcccgggttgtaacaacaaaagtctattatctgccaagtaactggtgatttttaactgttatttaatgatttgaggtatttattaactgataatgatttattaaattggcccttgattgatacaatgactttgaattacgggtacttgcggtgagaaatataggtaaattgaatcatgatactttaattttacagattataatgtgtgggttttattattgctattagtttgtaacttaacgacttagagaatactcagataaattactaagttaataaattaattctagtcacaataagttaacggttaatcaagatgggcctaaattttcgatctctgattagcagaattactaaaatttagaatgaaattgggcagacataactaaaattctcacggttaccagcactatttggacggggcctttcaataaattggtacggcctaattaagaacttaagcttttctttaaaaagtgctaccgcaagtgcgtattaaatggtaaattaatagaagtagttttgtcatatttcttacattcatagggaagagggattattcacatggtctttaacttggtagttaatattattgggattgtggtttttattgccattgcctacttattctccaagcaaaagcacgccattaactggcgttcagttggtgtcatgttagtactagaagtcttattggcatggttcttaacgggttcacaagtcggtgtcgacgcggttaaagcagcggcagatggcttcacttggctcgtcaatgtatcatacgatgggatcgcctttgcgttagctagttgggttaacgttaagtcgatggacttcgtcactagttcattattaccaatcttgttgattgtgccattattcgatattttgacctatattggcgtattaccatggattatcaaatgggttggccggggcttagcttacattactggtcaaccaaagttcgaatcattcttcgttgttgaaatgatgttcttgggcaacacggaagctcttgctgtttcgcagttacaattgaagcagatgaaggcacaacgaaacttgacgattgcgatgatgtcaatgagttgtgtgacggcatcgatcttaggggcttacattaagatgatgcctggtcaattcattttgacggcggtgccaatgaacgtcttaaacgctgcgattattgctgcaatcttgaatccggtagaagttaagccggaagaagataccattgcgaaaatctcaggtagtgcggctgttgaagaaactactgccaccactgaaacgagcggttctgaagaattagctaatgaacaagttaaggaagctaaaccagctcgcgaaccattcttctctttcttgggtgattcaatcttaggcgctggtcgcttgattttgattattgctgctaacgttattgctttcgtagcgttagccaaattaattgataagttgttaggtttaatcaatagcaatttatcacttgaaaacatctttggggttgtcatgttcccatttgcatggttacttggttttaacccaagtgatgctttccaaatggcttcatatatgggaacgaaattagtgactaacgaattcgttgtcatgggtgaagtttccagcaaagttaacgattttgcaccgcatttccgggcagtcttaacggtcttcttaacgtccttcgcgaacttctcaacgattgggatgattattggagctttcaagggaatcgttgatcgtgaaaagaacgatttgatttcacggaatgttggttacatgctattatctgggatcctggtctccttactatcagccggtgtcgttgggttgttcgtttggtagtcggtgatataatttaatcttgaattaaacgtaagagtgtcagctattcggctggcctcttttttattaatgaatcatcgggtcatacttttatccggtgtcgtttttaacggtgagatgttcaaggcagttcatgaatttgactagaaaaattgcaaactagaatagctgtcaatgatggctgtaaaagcagacttttcaagggttattgcgattttaacagcggggctgtgcattgattttaagtgttatttacgttaaagttatgaggtgacgtgaaacattgagttgtttcacaaaaagaggacgaatgtgacccctttaaggagagctattactaatgaatccagaagaatttaaacaagcgttagcccaacacgagattgcgctgacggcaaaacaattggcacaatttgcgctgtattttcaactattggtcacgactaataagcagttcaacctgaccacgatcacagcggaaccagaagtttatcttaaacatttttacgattcactcacgccagcattctacgttcctgcgctgcgtgatcaaccgctcacgatttgtgatgttggcgctggagccggtttcccgtcgattccgctcaaaattgcgttcccacagttacaagtgacgatcgttgattcattgaataagcgaatcaattttttaaatgatctagtccaacaattaggcttaacgggtgtgaaaacgttccatgatcgcgctgaaacgtttgctggcaagaagtctgctcaccgggaaagctacgatatcgtgacggctcgggcagtagcgcgcctatcagtattgagcgaactctgcctaccactcgttaaaattggcggccagatgattgcattgaaagcagccaatgcccgtactgaaacggctgaagggacatacgccgttcaacaattagggggccaaattgttcaggacgaggcctttagtttgcccgtgactgctgatccgcgccatatcattgttattgataagaagaagccgtcaccgaagcggtatccacgcaagccggggacaccggcgaaacagccgttaacggcaccaatgtaaggtgggaggtaatttcaatggcattttcattatttggttctaatcgtgataaacataaaaccgaggcggccacgacccccacggagcaacaaattgtccgtattccggtcactgccattatccccaaccggtttcaaccccggcaagtcttcgatgaaactggtattgctgaattggctgctacgattgcggatcacggcttgttgcagccaattgtcttgcgggaatacgaaccgcagaaatacgaaattatcgctggtgagcggcggttccgcgccatttcttcacttcattgggcagatgtgccggccatcattcaaaagatggatgatggtgaaaccgcgtcaatggcgctgatcgagaatttacagcgacaagatttaacggccattgaagaggctcgggcctaccaagaactgatggaactcaaccaattaacgcaatcggcgctagcgaaagaattgggcaaaagtcagtcgttagttgcgaataagttgagattgttgaagttagcacagccggttcaaacggcgttgttgcagcgacaaatcagcgaacggcacggccgcgcactactcaacttggctgtggagcaacaggctgcggttttgaaacgggtgcttgatgatcaattgacggtcaaagaaacagaacagctagtggcgaagacccaaacgccgccgaagcccaaacgcaaacgtgcacgggggttgaccggcgatacgcgaattgctgtgaatacgatcaaaaaatcaattaagatggtaactgatgccggcttacccgtgaagacccatgaagaggatacggatgacgggtatcggattacgattgaaattccaaaaaatcaaccaaggggtgatcaataattatgggaaccgtaattgcactcgctaaccaaaaaggtggcgttggcaagacaaccacgagtattaatctcggggctagtctggtcgaattaggccaaaaagttttattaattgacacggatgcgcaagggaatgcgaccagtggtttaggtgttcaaaagtcgaccatcgaacgtgaaatctatgacgttttaatcaatgacgttcccattaaagaaaccattatcccaacgagtcataagggtttagatatcgttccggctacaattcagctttctggggcagaaatcgaactgacaccgatgatggcacgtgagacccgcttacgtgatgccatcgatgacgtgaaggatgattatgattatattttgatcgattgtccaccgtcgttaggcttgctgaccattaatgcgtttacggcttgtgattcgattttgattccggttcaaagcgagtactatgctttggaagggctgagtcagttattgaatacgatcaagctcgtacaaaaacattttaataaacagttgcgaattgaaggcgtgctattgactatgtacgatgcccgtaccaatctcggagcccaggtcaacgaagaagttcggaaatactttaaggacgccgtctataagacgattattccccgcaatgtgcggttatctgaagcacctagccacggcctatcgattgtcgattatgatgcccgttcgaaaggtgcgcaagtctacttagctctagcaaaggaagtgttggccgctcatggcaagtaaagataaagataataaggcgctgggacgcggtattggagccctgtttgccgatgttaacgaaccagctagtgaagaagccgtggttgatctagatcttaaggatattcatgccaatccgtaccaaccccggcgaacttttgatcagacggcacttaaggagctcgccagctcgattgaaaagtccggcgttttccagccaatcattgtacgacaaccggatgccaagctgaataaatatgaaatcattgctggtgaacggcgttttcgggcgtcgaagctcgctcatcaaacgactattccagccattgtccgtgatgttaccgaagaacaaatgatggaagtagcggtgcttgaaaatctacaacgggaagatttaactccgcttgaagaagctgcggcctacgattcgttgatgaagaagctgaagttgacgcaggcggaagtctcaaagcgcctaggcaagagtcggccatatattgctaattatttgcggttattgggcttgccagatggggtcaaacagtatatccaaaagggccaactgtccatgggccaagctcgaacgcttttgtctttgaagaataaaaccaagttagcgccattagcgaagcgcgtcgtgaaggataacatgacggtccgtcagttggaacaaatcgtggcgcgttataacggcgagtccaaggagccggccaaaaaagttgcacccaagaagtcaccgtacatccgtgcgagtgaagaacaattacaagagaagtttgggacggccgtttcgattcaaactaaggcgaacaaagctgatcaagggaaaattgaaattccgtacttgtcaaatgaagatttgacacggattttagaaattctcagtattgatttaaattaattaatttataaaggggcgttgcgcatgtatgatttaggtgatattgtcgagatgaaaaaggcgcatccgtgtggtgtcaatcgctgggaaattacccggatgggcgctgacattaagattaaatgtacgggatgtggtcacgtggtcatgatgccgcgtcgtgagttcaataaaaaactcaaaaaggtattagaaagcaaagccgatcaagcttaattattaaaaaaggaagagtgaataaccgatatggcacttacagcaggtatcgttgggttaccaaacgttggtaaatccacattgtttaacgcaattacgaaggcgggcgccgaaatggccaactatccatttgcgacgattgaccccaacgttgggatggttgaagttcccgacaaacgactagaccgaattcaagaaatcatccccgcaaagaaggtcgttcccacgacttttgaatttacggatatcgccgggatcgtcaagggtgctagtaagggtgaaggacttgggaacaagttccttgaaaacatccgccaagttgacgcaattgtgcacgtggtccgggcctttgatgatgacaatatcacccatgtgacgggtaaagtcgatccgcaagatgatattgaaacaattaatctagaattgagtttagcggacttagaagctgttgataagcgtttggctaaagtgcaacgggctgctaaggggagcgataaagaagctaaggctgagctcgctgttttgcaaaagatcaaacctgccttggaagccggcaaacccgtgcgttcactagaattcaacgaagatgaccaacaaatcgtcaagggcttattcttattaacgtctaagccagtgctgtatgtagccaatattgccgaagatgacatggccgatccagaaaactctaagtatttccaagtggttgcggactatgctaagcaagaaggagcccaagccattggtgttgctgctgaaactgaagaagaaattgccgaactagatgatgacgacaaggccgactttttagcagctgaaggcgttgaagagcctggcttgaataagctgattcgggcttcttacaagctattaggactggaaaccttcttcacggctggtggtaaggaaacccgggcttggacgtttaaacgcggtactaaggcccctcaagcagcgggaattattcactctgattttgaacgtggatttattcgggctgaagtgatgtcttacgatgctttggatgaagccggttcagaagcaaaggtcaaggaaaatggtaagctgcgtttggaaggtaaggactatgtcatgcaagatggcgacatcgtcgaattccgcttcaacgtttaagctgaaaggagcaattgtatagtgagtgagagcgaaacttcaaagacacctaggaacgccgcggccggggccaagcaggctcaagccgcagaacggccagttcacgaagcgactgagttgacgaagcgcaatgctgaatatatgcgtcagatgcgcaagtcacttgatgccacagcgttgagtggtgagaaaaagacggcagttctgaatgaaatgacgtctacattgttagcggaacaaggtcggggaaccacggctcgtcaattatacgggaccgttcaagaacggaccgaagagattgtgaatccaaaaaagacaccggtagaacgtcaaaaggcgaactattgggtcacggcgctggataatggcttgatgctattcatgattttctgcttaatgtacgggatcatgggcttcatcggcacgaacgctactaagaattcagctggtgccaacgggatcaccgctattctgattacgtccgccattggtggtttgggcgttgctaagttattcgaatacttaatgcctgctaaagatggcaagaaagtttcgttatggaagaaaatcgcgtggtcagtactggctatcatcgtttggatgttagtctttacaaccatgtcaatgattcaaggaccattgaacccggtcttaccaggaatcgcgtacttgatcattgccgtcgtcgtcttcttcgcccggatgtggttgaagcggcgctttaatattacgacgagcatgttttaggctcggactgaaagacaagctgatggcgtgcattggcttgtctttttgtcgattgcaagtggtcattgcttgttattcacctagttagcttttaaactggtgatacggatgtaatgactgaatgaaagttgtgtgtgaagtacgctcggcccaacctggaacattcggttgggcgttacaggcttaaaataagaactttctgaaaatctgcgcaaccccttgcatttatcgcgatgttttgttacctttacagataaaaataaaaacataaggagctaacgttcaatgtctaattgggatacaaagtttggaaaaaagggttatacgttcgatgatgtactattaattccggccgaaagtcatgttttaccgaatgaagtcaatttaggtgttaaacttgccgataatttacagctgaatattccaattattagtgcgggaatggatactgtttcagaatccgcaatgggaatcgcgatggccaaccaaggtggcttagctgttatccataagaacttaagcattgaagcgcaggctgaagaagttaagaagatcaaagcggtcgttaaggatgatgatcacccacacgctgccgttgatgccaacaatcacttgttggccgttgcggctgttggggtcactagtgatacctttgaccgggctgaagccctatttgccgctggtgcggacgccatcgttattgatacggctcatggtcattccgctggtgtgcttcggaagatcaaggaaattcgggcccacttccctaagcagacattgattgctggtaacgttgcgacggcagaaggcacgcgtgctttatttgaagctggtgttgatgttgttaaagtggggattggccctggttcaatctgtacgacccggattgtcgctggtgtcggggtgccacaattaacagcggtttatgattctgccagcgttgctcgcgaatacggcaaagctatcattgctgatggtgggatcaagtattccggtgatatcgttaaggccctcgctgctggtggcaacgccgtgatgcttgggagtatgttagccggaacagccgaagcaccgggtgaggttgtctttgacgatggccgtcaatacaagttctatcggggcatgggttccgttggggcgatgtcacaagctcatggttcgtctgaccggtacttccaaggcggcgtgaacgaagcgaacaagttagttccagaaggtgttgaaggacgtgtgccattcaaaggcagcgttgatgatattatcttccaaatgttaggtggtttacgttctggcatgggctacgttggcgctaaagacattgatgccttgatcgaaaacgcccagtttgttgaaatctctggcgctgggctccgcgaatcacatccacatgaaattcaaattacaaagaatgcaccgaactattcagtcaacggttaaaatgacgatatcgtatgagtcagtctgattggtttagttgaataagcatcaagtaagcgtagaacatcaactttgttctacgtttttttgtctggtgagtaccagcggaagatataggcagatgtaacgttcgtgtagattgaccgtagtgtttctttcttgttgggacgttgatactagctctgtacacgattgtgttacttattaagttcattagatttttaatgatatcgtggcattagtgatgcaaagaaaggggctaatataaatgaagtatcggttaataggggtaggtgcgagtctagtcgtcgcagtcatgttaacagggtgtcaagcgaaggctacgacattggtcaagtcagatgctggccaggtcacacaagcggaagtatttaaacaaattgaaaaccaagcgacgacgcaacaggctgttcaagaattgactctaaacaaagtccttaatcaacgatatcatgtttcacaagctgaagtaactgctaaattaaaagcattcaaacggcaggcgggcgcaaattatcacatgattttagaacgtaatcatgtcactgaaccgcgtttaaaatcgcaaatcaaagcgaatttattgatggagaaagccgttagtgctaagtatccagtgactaaagcgcaactaaaaaaagcccgagcagcttatatgccaatgacaacggttcaacacattgcgacggccaatgagaagcaagcgcaaaaaattattgctgaactgaatgcgggtgctagctttgattcgcaagtgcgaaaatatcagaataatcgacaagcgcacacaactgctggaaaattagcgcagtttgacagttataatcaaactctagcaccagcaattgtacaggccacagctaaactacgagtgggacactatgtcacgaaaccggtcaaaacagttatggcaactgccgacacgaaagacaaaccaacttatgaaattatcaacgttgtcagtcgtcgatctaagactgcggctgtaactgatgatagcggtaagcagattgatgtgacaaattatttgcgtgaaaaaatccagcaacagcggatgatggacaagcagacgcaagttgcgacgattcggtcagttttcaaagcggcccacgttaaggtagttgatgcccatttcgcaccagcgtttaatgattatttaaccacccaaaatagctaacaatagaatcatcagcaatgatgtgatgattatgaacgcgtctcttaacctgtcatgggttaaaaggcgcgttttcgttaggtactgatgattaattgcgctatgatggacttattaaaacgtattgtaccagtttagtgaggtgccaaattcaacatattaagtaggtgagtagatgcaacggtttcagtcacgccatttattccagttacgagaaattggcttgggcttaacctgtatcggtggctttattgacgcatacacattcatccaacggggtggtgtcttagcagctggtcaaacgggtaatttgatttttctcagtgttgatgtggcacagtggaatttaccgggtgtgttgactaaattagcaacagtcctcttttttacactaggtgtgattgtcgtgggtatactgaaacaatggttgggcgcgcggtcacactactggcgcttgcccgttttggtggcagagctggttgtttgtttaatggtcggcatgctaccagcgactgttagtaatgcgatggtggtcccaccactcgcattcgtgatggcgatgcagacgacagccttcagcgcaatcgccggccacggctataataacgtgttctctaccggtaatctcaagaaggcaacgatcgtgctgacgaattattggttgacaggcgtgcgcatggagcttgacactggtttagtgtattgggaattagtgttgagctttgctacgggcgcgattgtttcggcgatattgcagcggtggtggacattacggacgatatgggttgcggcgggattattgatcttagtaggtggatactatacctggttattagttcaccgtacggcaaatgacgcggaatagttgcgttttctctaaaatcaatcgttaactgccaagcccggacgcttttttggtaaaataaaaacagaattatttaaggagaaaaataagatgaaaattttagtagtcgatgacgacaaagaaattgcacaactattagaaatttatattaaaaacgaaggctatgaaccaattagcgcctataatggccgtgaagctttgactaaattaaatacgaatcctgatattgcgttaatgattttggatatcatgatgcctgaaatggatgggattgaggtcatcaaagaagtacggaaagattcccaacttccaatcctagtcttgtcggccaagactggcgatatggacaagattcagggcttgattacgggagctgacgattacgtcaccaagccattcaatccgcttgaaattatggcacgggtcaagtcactattacgacgttctgaaaataacgtgacgactaccgagcctgatattttggacattggaccgttaacgatcaataaagattcgcacgaagttaaaacgttgacgggtaaggatattcaattaaccgcgttagaatttggtattttgtatttgctcgcaagtcatcctaaccgagtcttttcagctgatgatatttttgaacgtgtttggcagcaagaaagtattgtctcagctaagaccgtgatggtgcacgtgagtcatttgcgggataagatcgaagaagccacggatggagaaaaagtcattcagaccgtttggggcgttggctataagatcgaatcgcgttaagagtgagggttagcttttgaaattaacgggacgcgaaaaaagtgaattattttttgaaggggtagtgacggtgattttgctactccttttaaacttgtcgatcgtagtactgatcaacagtacgattgcgcataatccggggttacagagcggtattttccaaattaaacgatcgattaccattggtcccaataactaccagctatggagttatgaaaacatctttattggactgatgctgattgcggacggtttcgtattatattggcgattaattcgacgatacaaacagatgcagttacgacatattattagtgagttgcattatattgcggccggccactttgaccatcggattgactttaatctgactggtgatacacaacgagtcgttgaaagtgttaatgccttagtagactcggcaatccactcgatggacgaggaacgggaaattgagcggtctaaggatgcgttaattacgaatgtcagtcatgatattcgaacgccgttgacgtcaattatcggctatttaggcttaattgagaacaaacagtaccaatcagaagaggatttaattaaatatgcgcatattgcctatttgaaggcaacacaaatgaagtcactggttgaagatctgtttgaatatacgaaatcacggcagacagagacaccgttggccattaatcggttaaacttgacggccatgttagaacagttagcggcaagctttgagctggaagcgaacaagaagcatctgaagattgaagtagaaagtggcacgcagcctatttacattgaagccgatgctgaaaagctggggcgggtcttcagcaatttgatcactaatgcgtttaaatatggaactggtgctaaaaacgtagtattacaagctgaacaacgtggtgaagaagtcgtgattcacgtcacgaatgatggtcagcgtattccagctgagtcgttgggacgcttatttgaacggttttatcgggttgaagaatcgcgttctaaggcgaccgggggttctggactgggcttagcgattgcccaaagtatcgtggatcaccacggtggctatatttatgcgcaaagtgatgatgagcagacaagctttgttattcatttgccagttaaacatgaccacccattaacaaaaaaacaatcggatatgataaattaacttgtttccacagacataattatttaaactaaaactagcattagcaattaagaaagggataattgagaaatgagatttgcgggaaagttaaagaaagttatgattgccctcgttgcggcagtcacgtttagtacagctggtttaggcattgcgggggctgacctccaggcccaagcagccagtacaccatcgatctctgcgaaagccgccattgcggttgacgcgtcgaccggtcagatcctgtatgataagaacagtagtaagccaatggcgatcgcatcaatgacgaagatgttaagtacatatttagtgcttaaggcgatccatgaaggtaagttgtcttggaatcaaaaaatcagtgttagcaaggcagtcgctaagatgagccaaaacacggaatatgcgaacgtaccgttattatcaacgaagacgtattcagtgcggcaattatataacgcgactgaaatctattccgctaacgccgctatcacagccttgggtgacgcggtagccgggacgccccataagtttgttagcttgatgcggaagacggctaaagcatgggggatcacggacgctaccattattaatgccagtggattaaccaataaagaggttggcagcacaattgggtacagtaccgttgccgccagtgctgaaaacgaaatgtcagcacaagatgttgctaccgttgcgcaaaagctattatcagattacccagaagttttaaagacttctagtattgcccatgcttggtttgaaaagggtactagttcagcaaccaagatggataaccgaaactacatgctcaaaggattagttaaacattactccgcacttcctgtggatggtttgaagactgggacttccactaaggctgggaatgccttcactgggaccgttaagtttagcaatggtaaccggatcattacggtcgtcatgcatgccggtgccgctaacgatagtgggacggaacgtttcactcaaacggctgaaatcatgtcatatgtttaccacaactacacgactacgacgattaacaagaatggcaagatcaatggtgtgaaagccgttgatgtccaagatgggaagtccttaacgtcgcaactcgtttcaaatagtggtgcaaccaagatttacttgccaaccgggacggatgctagtgccgttactggtaaggttagcttgaagaagtcggcgacaaccgatggtaaattacaagcacccgttaagaatggcaagactgtcggtactgttaacttgaacctaagcaagaaagctatcaaggtagttgacggaacgactagtaagaatatgaccatcaatgtaacgcctaagaagtccatcgacaaagcaaatatctttgtacggatgtggcgcggggttaagagctggttcaactaaattatagcagttagtgtattggattctgtgggtgcattagcttagtaaacgctacgagatatttcttaaaagatatattcctctttgagtaggcaagctagtaattgagacttgcctgctcaaggaggatttttttgttggcaatagtgattcatgacaggcaactaatgaccagggctgtgccactgatttagctaattaaaaataattagcatccagagtaatttcaaaaaggcactgtcaaggatgaccaagttgaacggctgcggatgttatgataaaagagtactaatagtcttcatttggcgatgctaaaaaagcaacgtttaaatcgggataattatgaggtgctttgttaaaaattatttcctaaattaagctgtgtgcctatcttagccactacttcgactattcgctacaagcgttccagtttgagtgttctttctttttttgctaatatttgaatgctagctttgcggataaattgcggttccatttatgtagaatttgttagcatgatccacgattaactgtataatgaagactgataacagtagttaaaccgaatggagtgaaagtcacctatgagcgtatcattacgaactgcaaccatgtcagatttacccattattgtagatatttacaatcaaacgattcccagtcatcaagtgacggctgatcttaaaccagttacggttgagcaacgtcgaaattggtttttgagtcatacccctgaacactatccgctgtgggttgttttaaaggacgactcagtagtcggttgggttagtctgtcaccattttatggacgggcagcgtatgcaaagacgactgaaatttcagtttatttggatcgcagtgttcaaggacagggaatcggtagccaggttttgacattagttcctaaacaattacctgtgttgggattaacaacgattatcgcttatattttttcaagtaatattccaagcattaagctgttcaaaaagtttgggtacgaacagtgggggtttctgccagaagtcgctgaattaggtggccgaccgaatgacttagtgattctgggacaacatttcaagtaaaaaatggcattgataccgcttacatacgcttaaaaacttaacaaggtgtaggattgcaataaaaaacatgttaaaattaagtccgagtgtctaagtaatttgacactcgctattgttgctagaattctttactggtatggtactggaggcattcttggtgaaaaagaacgagccaaattggttagtggtattacgaacagtaatgccgcttgggcttagctatattcccatcgggttagcttgtggggttttattgcatgcggccgggttcaaccatctactgacagcgttaatttcggtaatggtcttttccggtggtgcccaatttttaattgcatcgatgttgacgattaatgcaccgatgacaaccattattttgatgatgtttttcttggagttacggtacgccttattaggttccagcttatcgcgctatctgaaggggcaatcattaccgttcattttaacgtttgcgttttcgatgaatgatgaaaattacgcggtcaactatttaaagtttgcgacggacaagcattggaagccatcgcaggccttaatggtcgaacactattcgttattattttggacggtaagtaatattatcggtagtttgattggcagtgcattgacgattaatctccaagtggtggattttgcgctgacggcactattcatttatatggcaattatgcaagctaagagccgcttgattatcttagtggcagttttgtctggcgttctaacgataggttttctggtcttaatgaagagtacgctgggcctagtggtgtcaacattactcgcgtcgttgaccggttactttattgaacgttacttgttggcacataagccagaaagtcatttactctataaggttcacgatcctactggccaaacagccatggaagaatctgacaagtagggcacagaggggtttttcttatgcaatcagtcagctcaatgagtagtatggaccatttttggttggtcattttttgtgcgtgtgtggctttcataccacgctttttcccgctactgttctttacgaagcggaagatcccagaatggtttaatgaatggatgcggttcgtacccgtctcactattcacggcgttagttgttaaaagtgtctttatcgatagtaagtacgcagtgatcacttctggcaatctggggatgattatttctgctattctcgttggatttgtggcttatcgcacgcgttcaatgactttatcagtggtgattggtctagtctcagtgatgatttttgtgttactaattcatatttagattttgttggaactgggtgacccggttcttttttattatgatgaaaagaggatacgttgatggtatggttattggttttcttacccggattattggctggtctggtccaagggttaacgggctttggtgcggccatcgtcatgatgatctttttaccacagttgtttccgattgctcaaagtgcggccgtggcgggcgttattatggcagccagtgtcataacattagtttggcgttatcatcagcatatccactttcgtcagattattgtgccgtttatcgtttatgccagtgtggcggcctattcggtacatcttggtcaagttttagatgtgcaattattacgacggttattaggtgcgctgttagtttcgttagccgggtactttagtctgagcaaacgtgcggcaaatcagacttatccgtggtggttagccggtctcttcatgattatttcggggttcttcaatgggttattcggtattggcggcccgctgatggccctttattttctatcacttgccgatacgactgcggattacttgggaaatttgcagactttctttttgatcgatgtggtctatatttcgacagtccgcgtactgaacggtattctgacgccagtcttgctcccccatattatgattggtatggtaggtgcggtcattgggacggcgctggcggcacgaattctgccgcggctacccatgacgacagtccggcatttgatctacttgttcattggacttagtggcgggtattatttgattgcgccagtttagaacgaggtatttatcaccttcactacgagttgattttagtggtcaggcgcaatgcgtttggccttttttgatgggtaagaaacgttgaattgttaacaaaaaatttcgaagagtagcgctatcaccttgatgacctatccttggttagaagcgagtcaacttaaatgtataaaatgagcattactaatttaataatcaaggatttgttggctacagttgtgacagtggttatctgttttgggaacagacgtggatgcgtaagatagtgccattgagcgtacctgactgtagcttcttaatcggccttgcgcacggttctaaagttgaacaaccgggattgaaatatttattgttgaagattttttattttaacgatgcttaattacaggtgctacatagctgaaaaaagcattggcttattggtttccttttagtatagttttattctaagaactgctaaattggggagacatatgaatagctacagacgaattcaagttattacagggatttacttgctgatatacattgcggcactttacttttcgacgggggttcaggttggatttaagctggatagtaatcagctcactgggtatgtgagttgtgggctgttgctggccgtaattatggggtcagagtttggcaaacgattaaggataaaaaagctattttccattttgatactagttagttgtttgattattctagggataactagattcaatgttgtgagttttaacgaggccttctggtactttatcttatttgttcgatacatcccgttcattgtattgattgaaaccatcatttttatctttgacctagattgagcaaaccaggccctaatgagttgaatgctcattagggcctggtcttttattattctaaaacctggttatgccgaacttttagctggcgtgagtctgacataggacattagtgaggatgatggcaactacgctaatcttcgtcggtaatcgtgcctagaccgtattgataaagtagttcatcagtacgattaagatcaaagcgctgactaagtgcgaagatgaccagagcatcccattcatccttcgcataaaggacggcgtaaccagttcgcttgagcatcgtgttaagctcggtcagggtcagttgaaaaccgaatccgagggcgatgatgcgagcccggttaggtcggcgcttgccatcgaagtactggtaaccgatcgagggcgttagattagcgcgccgaatgacttggcttttagtgacgtgtttgatttgaataagctcggcgaggtattccgccggattggtacgaataaaactattggccatatttgtcataaattggtcggcctcacttgcatgtttgatttcgttaaatagttccttagttgcgcgttctaccacggttagtgcccccctaatactccttcttaattagtattagtgtaccagaaactactgtaatttaaaggtcaaatgccgatcactgaagtagctgggattgtagatgagttcaacggacccatctgctttggcttgaccagtcatggtaccactgacagagccaccagcggtcaggtcaccactatctaattggttattttcatcaatgttgatctcatctaggctagtttggttaccggcggccttgattttaaagtcaaacgggttatagctgactttatctctaccgctatttttcaatgttacggtgaccgtataatattgattgccagttttaggctgaacatcattgagcgtcgttgcggttttaacattattaaccgttacttgcacgtgatcgatggtggctgtctgcccgactttataaatcgtatttgccggggtttccttagcggtggacttgctagcgctggtctttttggtcgtcgctgcttgtgagtttttaccgtcttgtggagaattgacgaggctgatgacaaagaagatgccaaggagaatcaggacccacgcccaccatttttgataccaagctttcgttttttgcatgagcttacctactttcttagtgctaagccgcccgcaataacaatgagcagaccgcttagaacgtgtttagaatcttttcaagagtattcgcaggaaggctaagctaatcatcatcttactggtgttcagctttcgctcacaattgcgccagaggcgccgatattttcc

SEQ ID NO: 12 - DNA, 112176 bp, synthetic construct
  source 1..112176: mol_type = other DNA; note = Lactobacillus plantarum PDA6 - Contig 12
tattaggcacgccgccagcgttcgtcctgagccaggatcaaactctcaaattaatgatgagttctaaaaagctcatttaatgttgtactaaaatttatttgctagcgaattaacttcgtaaatgttttgctcttgattcaaaatcaagagaccctacacatttgattcgtcgaaactttgttcagttttcaaaggtctaaatcgttcgttgattacctcaacgcaacttaatcatcatatcaagttatcaacatcttgtcaacaactttttataattaattttcgttggaagcaagcggctaaccgctttgtgcgcctcaacaacgtatactaatttaccaattatcctgataaattgcaagccctaaaatgcaaaaataaccagtcaataatatcatgttaatcaatccactttgataatatacggtatttaaaaccataatcatgttaattgacttcaaatcctacctaccaccaccataaaatccgcttttacttaagtttagcctccaaatgtctcaacaatgttcgggtaaaaataatctaactttttttcaataaatcgctttccgaactaaagttactcaatctgacccaacaaaaacggcagttagcttaggaaaacctaagctaactgccgttttaaatctaattatttatcttcttctggacgcatcgttgggaaaagtaagacatcacgaatcgagtccgcatccgtcattaacataaccaaccgatcaatcccgatacctaacccaccagtaggcggcatcccgtattccaacgcctcgacaaagtcttcatcaatatgttcagcttcgtcgttaccagcagtccgttccgcagcctgagcttcgaaacgttgccgttggtcaattggatcattcaattcactgaacgcattggcgtattcattacctaagatgaagagttcaaaacgatcagtaaaccgtggatcttcttcattcttcttagctaatggcgaaatttcaactggatgaccataaacaaaggttggttcattcaacgtgtcttcaacaaattcttcaaagaacgcattaatgatatgaccaactttccagtatggttcatacttcacgtgatgttcatccgccaatttttgtgcatcttcaattgacattggttgccagaaatcaatcccagtcttttctttaatcgcatcgaccatgtgaatttgcttaaatggttgattgaaatcaactttttgatcatgataagtgacaatgccatcgtcagttacggcttgcgctgcggctttaaaaataccttccgtctcagccattacatcatggaagtcgaaataggcgacataagtttccatcatggtaaattcaggattatgttcacggtccatcccttcattacggaaaacccgaccaatctcataaaccttttccatgccaccaacgatcaggcgcttcaaatgtaattccaacgcaattcgtaagtagagatcaatgttcaacgcattgtggtgagtcacaaatggccgtgctgccgcaccaccagcttgattatgcaacattggcgtctcaacttctgtgaagccttgatcgtctaaatgatgccgaatcgctgaaatgatcttcgtccgcttcaagaaacgatcaaagctatcgcggttagagatcaagtccaaataccgttggcgatagatctgttccacattctgtaacccatggaacttatctggcaatggtcgtaacgcctttgataagaacgttaaaccagttactttaatcgttaattcgccaaagtccgtcttaaaaacttggccggtaattccaaggaaatcaccaatatcagaacgcttgaagatatggtaagtatcttcgccgactacatctttacgaatgtataactgcatcttacctgagcgatcccagatatcagcaaaaccgactttacccttaccacgcttagctagcatccgtccagcaatggttgccaccacttgtttagcgtctagctcgtccttatccatatccccatacttgtcttgcaagtcctgggctaaatcagtccgttcgaaccggtgaccaaagggatcaatcccctcttcacgcagttcatccattttttcgcgacgaaccttcagttggtcgttcatcgtctgttcttgtcgtgccactagtgttcctccatttctagttagcgtacagatttattccgtacctaaacaatcactacatgttaattttgacaatcacgccgccaaaatgcaagttaattattcactttaccgcgtgactagccaaataagttgccgtctgctcctgaaactgcgttaaaatgcgcatcatttctgctaacgagcttgcctccattaaagccactttggtccgtgccgaccttgggatgccttttagatagtacggcgcttgttcacggaattcatgacatccgccccgctcaccttttaaaaccactaaccgctgcaaatgttccattgccgtttgcatcttagccatcggtgtgggtggcgttagtaactccccggttgctaaatagtgtactgtctgggtaagcatccacggattaccttctaccgcccggccaatcatgacggcatcggccccgacttcatcaagcatccgcgcagcatcttgaggtgtctgaacgtcaccattacccatcaatggaatcgtgagggcatccgccacccgttttaacacgtcccaatcagcatggccttggtacatctgcttacgagtccgtccatgcattgcaacggcagctgcaccagctcgttcggcagcccgcgcattctcgacggcatatacgtgctctgcgtcccaaccagttcgcatcttgaccgtcactggtttattaaccgcagcagtcacagccgcgaccatctcgtagactttatctggacttaaaagccacttagcgcccgcatcagtcttaaccactttattcaccggacagcccatattaatatcaataatatcagcattggtctgctgatcgacaaactgggcggcttgaaccagtgttgctttcgaaccaccaaagatttgaatactcattggatgttcttttggatcaacaaacatcatttccagggtcttacgattatgatacatgatcccgcgatcagaaatcatctcacaaacgactaaccccgcaccaaaatccttgcagattactcgaaaggccgcgttagtcacgccggccatcggtgccactacgacacgattgggaatcgtcacatcaccgatctgccactcttgattcattaagcgtcacccttggaccgtgagagcactgcttctagttcgcgttcactgaactgatactggtccccacaaaaatgacaaactgccgtggcaccatgatcttcatcaatcattgcttgaacctcatgcttgggcaaagccattagtgcttcggcaaatcgttctttagaacaatcgcattcaaacttaactggcattttatctaataccttaacgtcaccatcaaataataaatccaaaatatcttctggtgacttaccatcacgcatcaattgggagactaatggcatgtctttgagcttgttttctagcgagctgatggcttcatccgtcgcatttggcaatacttgcaccaaaaagccaccggcaactccaatcgaattgtcgtcatttacaaacaccgacaagccaacagctgatggaatctgttcggactgtgctaagtaatacgtaaagtcttcgcctaattcaccagaaactaacgcaaccgttccggtgaatggatccccaaccccctgatccttagtcacagataaaaagccatcagttccaacagccgccttcacatcgatcttatgcttatcattcaaaggcaagtgcacatgggggtgctgtaaataccccttgaccgtacctttagcattgccatcaacaacgataccaccaacaggaccgttcccgttgattttaacggtcatttgttcttcaccctttaaaaccgatgatgctaataataacgtaccaaccaagctgcggcctaacgctgctgatgctgcactccaggtatcatgtcggcgttgggcttcagcaaccacgcccgttgcgctaactgcgtacgctcgaaacatctcattacccgcgacgctttttactaaataatctgccatttaatcatactcctatctcaatccgtctttaattgcgacccgacgctcataaccgaattaacgcaattgatttattttcctgaaatatcataacgcataaaaggagccgagacaaagtcccagctccttcattttactttattcaatactatgcttgcgaattagtatcatcctgcgatgatggtgtggcactttcagcatttggtaaaccggtggctgaagttgcgacatcactgtcggtagctgattcagtggctgaattagctgttgaattgacactactgtcagcactaacttctgaactagcatccgattcacttgggaaacttggttcagcaacactcacattagtcgtagtgtcagctgagtctgcttgcttatcatccgcactttggttttgcgcgtgcttttcagcttcgcgacgttccaattcacgtttggattcttcgaaggtagctgctttctcacttggaaattcattactatccttttcaggcatcttaccagtcttaaacagactgagaatttgcttttcatccaatgtttcgtacttcaataaggcttccgcaattaacttatgctgttcacggtgtgactcgataatatccgtagcagtttgatgcgcttcttggctcaaacgccggacttcatcatcgatcaattgtgccgtatgttgtgaaaaggcactcgcacccataccctgttggtaagctgcttgttggttggcattttctaactcaacaggaccaagcttttcactcatcccatattgagtaaccattgcccgggcaatttgcgttgcctgttcaaagtcattagaagcacctgatgattgcgccccaaagataatttcttcagcagcacgaccacccattaaaccagccatttgttccttcgcatcacgtttcgacatcaacatctgatcttcacgtggtaacatgatggcataaccgccagcacgaccccgtggcacgatcgttactttatgaacgacccgtgcatcattcaagaccaatccaacaatcgtatgaccagcttcgtgataagccacggtttcccgttcatgcttattcacaacgcgatcatgcttagcaggtccggcaatgacccgatcttctgcttcatcgagatccgcagcgtcaacttgcttcttattacgacgggcagctaacaaggccgcttcgttcaataagttttccaaatcggcacccacgaatccaggtgtttgcttggcaatttccttcaaatcaacgtcagctgctaatggcttattcttagcatggacttttaagatggcttcccgacccttaacgtctggacgaccaactaagatcttccggtcgaaacgacctggacgaagtaaggcaggatcaagtacatcagaacggtttgtcgccgccatgacgatgacaccttcattacctgtaaaaccatccatttcaactaacaattggttcagggtttgttcacgttcatcatgaccgccgcccataccattgccacgttgccgaccaaccgcatcaatttcatcaataaagatgatagatggggcgttcttcttagcttgttcgaataagtcccgaacccggctagcaccaaccccgacgaacatttcgacgaagtcagaaccagagattgagaagaatgggacaccagcttcaccggcaaccgctttagcaagcaacgttttaccagtaccaggaggcccctcgaggagtaccccagatgggatccgtgcacctaaggacacgaacttccgcggatctttcaagaattcgacaacttcgaccaattcttgcttttcttcttcttcaccggcaacatctgagaaacgaaccttattttgcttactatcagctggttttgctttggtcttaccaaagttcataacccggttgttcccgccgccttgtcctgcttgtcccatcatcatatagaagaggaataacatcaggatgactggcgcgatgtacattaataacgtgacccagatgccgctagattcttcggccttagccgtaaccttgacgtcatgcttagccgccaacttagaaacttggtcaaccgtggagttgttttccaacatcgttgttgaaaatgacgtcgtctttgtagatgcgctcttgataccaagggcgtttgcagaagaagtcgtccgtgctttccggtatgaaccagttaccttgtagacgccgccactaggctggatactaacgtttttaacgttattcttatctaattgtttgacaaattcgctataacgaatattttgcgtttgtgagccggaattaccgccaaagaaaaagtagataattcccatcaagctcagaaacatcaaaatgtaaaataagctattacgaaagagtccattgcgtcgattgttcatatgtgcctccttcatcgaaacttttatatacagtacttcgatagtctaaataatagcacatttgactatcattgaccaattatttatgctcgtaaatcgcaggttttaaaatcccaacgtacggcaagttccgatagcgttctgcatagtcaagaccgtaaccgaccacaaactcattcggtacttcaaaaccaatataatctgccttaatatcaacgagtcgaccagctggtttatccaataacgtgcagaccttaactgagttcacatcgcgccgcttcaacaaatcgatcaagaacttcaacgtccgcccggtatcaatgatgtcttcaatgactaacacatcacgacccgtcacatcagcatctaagtccttcgttagttgaacctcaccactagagatcgtttcattaccgtaacttgataaattaataaaatcaagatccgcgtaaatatccatttcacgaataatgtccgtggtaaataaaacggcacccttgagtacgcaaataattaatgggttcttaccagcatatgcagttgtgagttcttttcctaatttttgtgcaacctgatggatatcctcgcgactataaagtactcgttcaatgtcgttgttcatcgtttcagatgtactcctttcaactctcgtgttttaaggctaaaaatactgtctgggtaccagtcgtacgatagctaaacttatgaccgaccacccacagaacgttcccttgagcattcactaacacttgcacctgttcacgccgttcagccggaacttttcgatcaatcagcagtcgacgtaccagctgatgaccaccgcccttgagaacgattcgatcaccagcttgccacggccgccacactagcggccaatcggcttctgttaaccaaaatggctgactgacaacatttggcacccgcgtaaagattcccaccgtttgggttgcagtaattttctgccattggtttaagtctaccataattttttcacggggcattaactttttaccccttttttttattggcaaagcttcaatgataccagcgttacggtacaactcccaggccgcgtttaccgttaatctactcgtggcaggccgcgtccgttgtccccacgagaccagcggttgtaacttcgactcggtgaatagttgttgcgtctgctgctcgagccacgtcgcaaaaacggctaactgccactggctcgggagtgcgccccactgatcaacaaccaacgcccctgtggccgttacgacctgcgacagtagtaccgtgaccatttgctttttagccgtcaacagcgttgtcaactgttgctggtaatcggccacatgctttaataactggggattaaccgtcataagttctggcacgacacggtgccgaatccgattacgggtcaaggccacatcttgattagtaacgtcttcaaaataaacgacatgctgctcggcagcatagtttcgtagctgatctttcgaccacgtcaacaacggccgaattaatcggcctgttgcaaagggccgactagttgcgattcctgtcaattgtgagatgtcgccaccacgcgcaagcttcatcagatacgtttcgacttgatcattggcgtggtgcgcagtcaaaactgccgttgcacgattttcccgcatcaccttagcaaaaacatggtaccgaaactgacgcccagctgcttcaataccactcttgggatgtgccgcgggtagccaatcggccatgactagcttcaagttttgctgctggcaatattgtcgcaagtagtccgcttccatttgactttgttcgcgtaaatgatgattaacatgagccaccactacccgtggccgttccgctgctggcaatcgttgcaacaaatgcaacaataccattgaatcgaccccagtcgacaccgctaccaccactgtttgctgtggtgataacagtttggctgcagctaattgccgattgaacttttgaattggtgtcatcttaacctcccatctaacttcattataaatacattggatttatttattgttaaaacttgccgattagttggctggtcgtttgtcacctatttgaacattattccgactggatagcataagatgaactagccaagcaagtttacggtaactcacaccgtttccaacgtgtctcgctgactgaccttgaacaatcggcaattttcaataaaaaaagcacggtcgtgactctaaatagccgcaccgtgcttcaaaatttaactagattaatggcaagtcactaagtttagctacgacgaccaccacggccaccacgcttaccttcagtattacgctttaaggttgctagccgatcctcgctatcttttaagaagccagacatcaatgaatcaaagtcctgcttcttaggttcatgttgtcgtgattggtaacgaccgccgccatttcccccacgactatggaaattatttgaccgatcgtgatgattgccattgctttgacgttcaccatgaccatggttgttaccttgatgattgtttggccggttgccaccctgatggttgccatgatgttcatgttcaccttgaggcttgtcaaccgctttacgaattgacaagccaatcttaccgtcatcaccaacggataacactttgactgtaacatcgtcgcccacgctcaagacatcatgaatgtcctttacaaagccatcggaaacctcactgatgtgtactagccccgtttgattattacccaagtttacaaatgcaccaaaattagtaatcccagataccttaccagtgacttttgtacctacttcaattgccataaaaaaagttgttcctcctatgaaataatggttttagtatagcatactttgtgaaacgttgagttatacatttaagcaattaataaaaagtggtctactcatataaagcagaccacaaccccgattagttggcagttacatcggcagcattatcatttggtaagctgtagaccgtttcgccactcttcgtataatcatactttgaacgtaataacttttgtaagtaatccttattattcaactgtttgatctgactctcaagttgattatttttttgctgcaccttttttaatttaacttgactggtcgcaacttgacggtttacctggtgcagattggaccgcgtattaatcaactgaaaaccaaagaatagtatcaatgctccgaacaccgcaacaatcaaaataaaccgtcgccgccgtacttgtgcaacacgctgggcttgcccatgctcgtcggtggcaacttgacgaatataatcattatctaactgcttgattttgttacgtgacccgttcgtcatgttggtccagtcctttcaaattaggttgcctaaattataacaacttcatcggccggtgtaaacgacatcatgctgattaagtcaacgtttacgaccatttcgatgaacggatacaccgacctaatcactaaatggttggcgataatccgttttgtagtcttcgctgatgatgtcatacatcagctcggcatcatttttcttagttgtttccaataactgcgtcactttgactgttaatgtcttatttccaaaactaataattagttcatcatcaacgctaacattactggaagatttcgctaccttaccgttaatttgaatccgccccttatcggcgatttctttagcaacagagcgccgcttgatgattcgtgaaacctttaaaaacttatctaaacgcatactcatgaatgatgttcctttccttttgcaacggccttaattagccgctttccatatggcaacactaaccactcgcgaatcgtgaataatcgggcatagacggccccggcaacaaacaccagcacaccgattagcaccccaatcaccgttataattccagccattccacgcgtattcgctagtatcggacctactaaggcggtgatttgatgacaactaaggatcaccacgatacccattacggcacttaatgcgagcaattttatcaaataaccactctctaatagcacccgctgcaagtcttccggcgaacctaaccacatgaccgcaaacatcacggccaagctcaatacggtcaccgcactggcaccgttgatgccatagtggaccacgaagatgtaattagccagcacttttgtcgctaatccagcaatgatgccaatgatcatggccgtatattcgttcaaactctgtaacacacttgtatacgtcgtaatcaacgctgcaaataaaatactaatgatatagattcgcaatgccgttgttccttctaatgaaccaaataacaagcgattgatttgtggcatcaacgcaactagaccgaccgtcgctgccattgataatgctaaactaacgtgaaccatcgcctgtgtctggcgcttgaattcaatcggttgacgcttggctaacgcatccgtcaaagcaggcaataacgttgctgaaaaggccgtcgccaccaccaaccctaactgaaccaaaggttgaccacgatcgtagaccccttttagtgccttggctacttctggtaactgaccttgatgcaccaagccccgcataaccgtaaatgaatccactaattgcagtaagataacaacagcggcgacaagacacagcgtcccaccttcaattacaaatcttttggttaatttgcgataactaggtaacgggtgggtcggtgcgggtgcgggcgccaataaatagcgtagaccaaaagcagtaaaaatcagtgatgaacagattgcagctagtggcgctgaactcattgcccacgttcccatccgataattatcccaaccgagacggacactgaaatatgcagccatgatgataattgcgacccgtacgacctgttcgatcagttgggacactgcggtcggtcccatcaaaaattttccttgatagtaaccacggccggttgctaaccatggcataaagacaaacatccaagccacggcactaatgattggtgctagattaacgtcacccatgtgggccgcaatccacgttgcaccaagctgcaagccgaaaaagacgaccaacgataatccggataagatatgaaacgcccgccgtgcaatcagcgacttactcgtttcgtctggctgttctgccactaacttagaaataaaatttggaaatccatttaatgcaaaggtcatgccaatgccgtacagcggataaatctgctgataaacgtaaaatcccgtattaccaaccatgttctgtaaaggaatccggtataccgcgcttaaaatcttagcgactaatgatgatatcgataaaattaacgcacctttgaacacggtgttcaagtgatcctttggcataacaaatcccttctaccgagcaactcggtgtctcatactaattcatttgagccgcgccctgactagccaggacaacgccccatcagacgataattcctgctatttgccattggttccactcgatagcgcttaacccaccccgtgcaaccatgcttcataacaacaactaccgagctaagacgcactagcgacatcgtcttcggctaagatcaaactcagttgttcgacaaactgtgttaattgcgccagccactcatcctgttgcatctttggctgaatgactaatttaaccttcattttatcatcatcaattccaactgtcgcttttaattttgtttttgccaagaccttaaaaatatctttagtatctagcttagccgtcccttgtttggataacgttaggtgtagctcactatcgtcacgctgaatcttctcaatcagcgcgtcatccgccagtaacttcagcttacctactgctaatagtccagcgacttctaccggataatcaccaaaccgatccattaaatcatcctgaacttccatgtactgatcattattctccagctggcgaatccgtttataaatttcgatcttttgccgttcatcttcaatatagctggtcggcaagtaggcttcgattccaagttcgaccgtggcatcggtcttaactttagccgcctgaccacgcttcttcgccactgcttctgacaacatctgggtatagaggtcataaccaactgagtcaataaagccgtgctgttgcttacctaacaagttaccagcaccccgaatcgacaagtcgcgcatcgcgattttaaagccagatccaagttccgtaaagtccttgatggcctgtaaccgtttctcaccaacttctgtcaaaactttattttgctgataagtaaagtaagcataggcaacccgactactccgaccaatccggccacgcaactggtatagctgtgacagtcccatccggtcagcattttccacaaataaggtgttgacgtttggaatatcaaccccggtctcaatgatcgtcgttgtcactaacacatcgtactcaccccgaatgaaatcgtagagaatcccttcgagttgtgactcaggcatctgaccatcaatatgggccaccgccgcgtcgggaaccaagtctttgatctgtgcaacgactttatcaatatcatgaacccggttatgcaaataaaagacctgcccattacgttgcatttctcgttcaattccctctttaatgacgccaaaattctgttccatgacgtacgtttggatcggataacggttcgttggcggcgtctcaatcactgataagtcccgtacaccgagcatcgacatgtgtaatgttcgcggaatcggcgttgccgttaacgtcaagacatccacactagccttcaaggccttcagtcgttccttgtgcttgaccccaaaccgttgttcctcatcaataatgagcaggcccagatcagcaaacgcgacgtccttagacagtaagcggtgcgtaccaaccacgatgtcaatttcaccactctttaactgttggaccgtctctttcatttccttagttgttctgaatcgtgacagcatgccaacgttaatcgggtagccttcaaaccgattcagcatcgtttcataatgttgctgagctaaaatggtcgttggcactagaaaggccacttgtttgccggcctcaatcgccttaaacgcggcccgcaacgcgacttccgtcttcccataaccaacatcgccgaccaataggcggtccatcggtttcggtcgttccatatcatgcttgatttcattaatactacgaatttgatccggcgtctctgggtacggaaaatcgttatcgaaatcatcttgataactatcgtccggtggaaaggcgtaacctttctccgcctctcgcttggcatacaggtcgactagttcatccgcgatatcttcaattttcgccgcgactttgcgcttcgctttcgtccattcggtaccacccaacttattgatgcgtggcgtctttgattctgacgaaacgtacttttgaactaggtttaactgggtcacgggaataaagatcttcgcattattttgatacgcaatcgtaatgtagtcttgatggacaccatcaacttccagcgtctccataccaacgtactttccgatcccgtgattgacgtgcacgacgtaatcgccgggtttgagatccgtataactcttcaaccgttcggcattagccaaggtctgacgacgtggacgcttcttagccaccttcttgaacatttcttgctcggttacgatgactaatttaccatccggaaactcaaatccattttgcaagctaccttgcacgatttgaaccgcacccggttgtaaattagtggccttagtcatgaccgcttcgatttcaaaatcatcaagcgtatcactgacctttgtcagacgctcagcctctgataccatcaagaccaccgtctgtttaagcttatgccaccgatccagttcggtcttcaacgctgggagctgcccaaaaaattcctgcatcgggcgtgtgcgcacgttagttacttgcgctagtttgacgttgccgatgcccttttgaaacagcgaaatcaagagttgtgcatgttggtcatcccggagcaaatcccgaatatcattgccgtaactcgcagttgccaacacccggtgatgtgccaattggtccgtaacccagtcagcttcttgcgttaataactgctgctcactatcaagcaaacgcgaatattcttcgaagataacgagcccgtcagcggccacatagtcaaaaatactcgttttccggtcgtataaataatcgccatataataataaatcgtttccgataattcctttttccatgtcagctaaaggttgtgctaaattatcggccaaagtctggcgttcggctggcttgagtttcttactttcagccgcaatcgccgttttaagacgctgtgccccggcctgcagcatagctgatgttaggataaagtcggtagctggtaaaatcgtatactcatccaagttttccaccgaacgttgcgtttccgggtcaaaatacttcagtgtatcaacttcagtatcaaagaagtccagtcgtaaagggtagtccgcatctaacgggtaaatatccacgattgagccccgtaccgcaaaatctcctgggcgtgcgactaactttttcttaacgtaacccatgtcgtgtagttgccgctgcaagtcttccaaatcaatatcttgaccaacggctaccggtaacgtggctgcttgaaattgtgcgacgggcggcaagaaccgccgggcacctgcaaccgaggtcacgatcactgccggaatgtcacgcaataaggcgtttaaagcctggacccgttgcgctcgtgactctggtgaacttgtcgcaacctccgtcgcaatcatttcttcagctgggaataaaaaaacttggtcttcatctaagagactcgttaaatcatccactagctgactcgcgtgaaaaccgttatcggtcacgatcagtaatgaatgcgttaattggtgaaatagcgcgcttaaataaaccgttcgtgccgaaccgttcaatccggtgattagttgccgactacgcgggctgatacctgctaaaattgtttgaaagtcgggcgtttgctcaacaatcgtttcaatatccattctgtcgtttcctcccgggctagttatattgattcataactgccgcaaaatcatcatttgctaaccaagcttcgaccgccgctagcgccgtaatcttagcatcgtcaaacttcgccacttcggctggcgtaaatttccccaacacgtaatcaacaacactcatcttctgaggatggtcaataccaactttaacgcgcttgaagtgctgatcaccaacatgactaataatgctcttgatgccattatgaccacccgccgatcccttttgtttgaggcgtacttttcctaatggcaaatctaaatcatcatgtataacgagcaaatcagcaggatcaacattgtaatagctcatcaacggtcccaccgctcgtccagaatcattcatataagtggcgggtttcaccagtaaaatcttctcaccgtcttgaaaagccgttgccacctgtgcttcaaatttactcgtttgaaacgtaacgtttagtttgctagctaattcgtccacaatcataaaaccaacattatgacgtgtctgggcatattgccgcccaatgttgcctaacccaacgatcattttcataattttatcttctcctattactttgcataccaaaacaggccgaaccggtaatcgacccgattcggcaactctgagtaacgataccacctaagtcgtattggcaccactactcacaccgtgaccgacgcgcccgccagtcaagtgttcaaaagttagcgtttattaagtgcgataagtataccacaaagggcttattgacgcccgccaaagggttttgcggacattgttaataattgtattaaaagcatgctcaatctaacacttattttgcacaaacatggtatactttaaccgtaaaaactaaattttcactacgagaggatgacttattttgtcaagcatgccaaatcatcaaaaagttgtgttagtcggcgacggcgctgttggttctagttacgcttttgccatggcacaacaaggaattgctgaagaatttgtaattgtcgatgttgttaaagatcggacaaagggtgacgcccttgatcttgaagacgcccaagcattcaccgctcccaagaagatttactcaggcgaatattcagattgtaaggacgctgacttagttgttattacagccggtgcgcctcaaaagcctggtgaatcacgtttagacttagttaacaagaatttaaatatcctatcatccattgtcaaaccagttgttgactccggctttgacggcatcttcttagttgctgctaaccctgttgacatcttaacttacgctacttggaaattctcaggtttcccaaaggatcgtgtcattggttcagggacttccttagactcttcacgtttacgcgttgcgttaggcaaacaattcaatgttgatcctcgttccgttgatgcttacatcatgggtgaacacggtgattctgaatttgctgcttactcaactgcaaccatcgggacacgtccagttcgtgatgtcgctaaggaacaaggcgtttctgacgaagatttagccaagttagaagatggtgttcgtaacaaagcttacgacatcatcaacttgaagggtgccacgttctacggtatcgggactgctttaatgcggatttcccaagccattttacgtgatgaaaatgccgttttaccagtaggtgcctacatggacggccaatacggcttaaacgacatttatatcgggactccggctgtgattggtggaactggtttgaaacaaatcatcgaatcaccactttcagctgacgaactcaagaagatgcaagattccgccgcaactttgaaaaaagtgcttaacgacggtttagctgaattagaaaataaataatcatttcatacgattaaatgtatgatgaacgctcgtctatagcagacgggcgtttttttgtttgcttgagggtaccttagcgattcattaaagcgcaacatgcactaaaggctatttttaaaactttcttatcacgattaccggccttgaagtttgcactcatctcacttctgttataaggtgagaatattacgaatatatggaggaccaacttaattatgaaacataaacgtggacttatgattgggggcagtatcctcggtctcctcgtcatcggatatgttgccacgagcttaatctggcaacatcaacaaacgttcctcagtaatacgtcggtcgctggtgttgacgtcagtggtaaaaccgccgctcaagcagcaccgaaagttaatcgcgctttagaacatcgcacttatcgaattattgaaaacggccaaacaaagtactcatttaccagcaaatcagccggtattacaatcaatactaaaaaagatttaaccaaattagtgaccaaacaaaactactggcgttggccccttgcactattgcaatcggctcaggctgatgatagctcagcggttggacaactaaccatcaatcacactgatttgaaaaccctactacaaaaaatcaccacgactgccaatcaaaccaaacgaacaaaaactgaaaacgccaagttagtttatcaacataaccaagttgagattaagaaagaagttcaaggaaccgaattagatcaagctaaacttaagacggtcgtcaccaaagcaattagtaatggtgacagtcatatcacccttaaagacgcctacgtcactccgaccgttaccagcacgagtgctagtttaaagacggccaaagtaaaatcagcgaaatacgctaccgaaaaggccacctataatatcaacggtcataaattcacgattcctcacgacctaattctcagttggattaaagtcgataagcaaggcaaagtgagtttagaccaaaacgctgttctgacttacgtgaagcaattgaatgataagtatcatacctatcatacgacgcgtcagttcaagagtacggcgcgtgggaccgtatccgtcagcggtgggttttatggctggaccattaagaccgaagcagaggccaaagcccttgctactgaaattttgaaaggcaaggactttacccgctcaccaatcaccagtggttccggatataacaacaagggcaccgacatcggcaacacctacgtcgaagttgataaagaaaatcagcatatgtacgtctacgttgatgggaagctcaaagtttcaacggacatcgttactggaaagcccggtaaacacgctacaacaacgggtgtttggtacatctggaataaggaaaagaacgcgacccttaaaggtgataatgacgatggctcaagttattcccaaccagtttcttattggatgccgttcgatgacactggcgaaggaattcacgattcttcatggcaaactcaatatggtggtacttggtacaagaagcacggctcgcatggttgtgtgaacaccccaccttctgtcatgaaaaaagtttttgctgccgtgccagtcggaacaccagtcattgttttctaatttaaatctaatttaaccaagccggtctgaatgttatcaggccggctttttcatcccttttagccgtcgtttgatgtcataatgatacgtgtaagcggtcgttttatggtattatttattaaaacaaactaataaatctgggggaccaactgctatgctattaaaaacactcgtaaagcctaaagaacgcctcgtcaccattacggcggacgcgaccttagaggacgccttaaaagtcttggaggattccggcttccgctgtattccaatcttagatgaaaccggtcatatcttccgcggcaacatctataagatgcacatctatcggcacaagtcacggggcggcgacatgtcgcttcccgtgacgaccctgcttaaaaatgccacgaaaacgattcaagtcgactccgccttctacaacatcttcttctccatcaaagatttgccatacattgcggtgctcgatgaacacggctatttctatggcattctcactcatacgcgtctgctcgacatgctctcacaatcttggaacgttaatgttggtagctatgttttaacagttgtctccgttggtgaacgtggtgatcttgcagccatggctaagattatcacgaaatatacttcaatcgccggctgcctgaccttagacgtccaaaacgggacactcggttatcggacgctctttaccttgccagaaaatgtcgacagtgaaaagctcaaacgaattatcgacaacttgaatcgcaaacaatttaaagtcatcgaagtggaagatttacaagctgaataatcacagttgccccgaggttaccttggggctttttttatgagatgaattttcagttcaaaagcgaccagcttaagactgctgaaaacagttcgaattagcgtaaacctgtctggctgaagcgtcctaccaccgacttacaggcatttttgtcaattgtcggaacgtggtgggcgcagatttgagtcaaaatatcgcgtctcaaatgctggccgttcactccctaatgccatattgacgaaacgtgttcgggtcagctgtgttccagcaattggcacccagctccggaagtcttagtagaacacacactggaatcttgatgaagcattaaattatcgctgactaatttcaaactatttaaatctacctgctaattttaacgaccaatatcatttatctaaaatcgtttgacaaacataatagtcaatgataaagtagtcaacattaaataaagattagaaaataattaaacgcgacgattaggaaagtagcacttaagcaattgttcagagaggttccggttggtgaaaggaattcatattgctatcttgtgaaaatcccctaatcacggtaagtgcgatcattatttgtgagtacttaatggcagcatccattatcatgctagcgcatcgtcacttaacttaccgtgcgtgaagtgaggccagtttactggcaaataataggtggtaccgcggaaacgccctatatcaatcaactacttgattggtatagggcgtttttattgtctaatcgaaggaggaatttctatgttaacaggaactcatttaatacagctaaaaaatggttttcatttatttactcggacagttggtcacgggccagtcaaagtattatgcgttcacggtggccctggtagtaatcatactgaatttgaaaactttgccactgagctaggtgaagaaaattttcaaatcagcatgtatgatcaattaggctccttttactcagatcaacctgacttttcaaggcctgaaaatcaacagttcttgtctttggattattatttgtctgaattagaagaagtccgccagcagctcggactcgaagacttttacttacttggtcactcgtgggggggcttattggctcaagaatatgctctgaaatatggtcagcacctcaaaggcttaattatcatgagtatgattgataacatcgctgaatacacaccacacgtcaataaattgcgcgaacaaacgttaatagcgagccaagttagctatatgcaagatattgaaaacgcggaggcctttgatgatccagaatacaaaagccttgtcacgactctcaaccggcacttcgtttgtcgtcatccggaaaatgcgcctcgtcaattagtctcaacactagctacccctgtttataattattttcagggcaataacgaattcgtgatggttggggcattaaatggctgggatcaacgtgcaaacctccataaaatcatgacacctactttactcacttttggggaatacgacacgatgccgctatcagttgcccggcgtatgcagcgaactcttccaaaggcacggttaactttaacgccagatggtggtcattgtcatagtgtagataatcccaccgctttcttccatagcttgagacgctatctcaccgatgtcgaaaccaatcaatttacagcatattaattgaggaggaacgctaatgttgatgaaaaaattgacaactattagttgccttttactagtactaagtagtctaaccgcttgtgggcaagcacatgccaatgtcacaaccaccaggaaaaccctgcatttgatgcaggatagtgaattaacctcattggatacctcaaatacagccacacttacacaatggaacgtcttacaacaatccatggaaggcctctatcgcatgaacgctcagaataaagtggtcggtgcaatggccactaaagtcgttaaaccaacaaatcatggcaaaacctacacctttcacttacgacgaaatgcaaagtggagtaatggtcacaccgtcactgccaaagatttcgtaacagcttggcaacgctctgtcagtgccacttctacctctggttatagttacatatacgaaggtatcaaaaacgctgctcaaatttcagccggacataaatctgttaaatcattgggcgttactgcagtgaataagcacactttaaaagttacgctcagccacgccatgccatacttgagtaagatgctcaccatgcccgctttctttcccaggatcatcaagtggtgtccaaatacgggaaagattacggaactactagtacaaaaatggcctacaatggcccgttcgccgttaaaggttggaacgggactaatgattcttggaatttgttaaaaaatacatactattacgataaaagtgacatcaagttaaataaaataacaatgcaagttgtcaaagactccacaactgcccataatctcttctcacaaaataaattagatgacgctactgtcaccggcgtcaccgcgcagggtgttcaaaatgactcgcatctgaaacacgtcagtaaagctggcacttattatttacgtctcaacatgcaaaaaaatcgggctttaaacaatcaatatttacgtcaagccttgaatcttgtgcttaataaaaaaacactcaccaaaaatattttgagtgatggttcaacacctgcttacaattatgtcacaccaggtttaaccaccgatcccactacgggcaaggattttggtactgaaactcaaagcacctaccgacacaatgttgctaaagcacaagtattatggaataagggtctcaagcaacttgaccgttcttctgtaacattaaagctagttagtgatgacacgacggtcgctaagaatattgaccagtttgttcaagccgctgtagcacaaaacctgaaacatgccaaaatgtcagtttcagcgataccttcaaaggcctccggcgaagcagttactaacggaaattacgatttgacttatacactctggctagcagactacgcggacccgatttcctttttcgacattctgacaaagaacaatccgcaaaactacgggcactatgatgacactgttttcaatcaacaaatcaccgctgcacacaaccagaacgcaactaacacacaatcatactggcaaaatatgagaactgccgccaaacgtctcaaccaaacagcagcagtcgtaccgctttacaacatgactgaaagtcaccttgtaaattctaatttaaatggtgtcagctatcatgcggttggcgaaaacgattatacgcgtgcttacttcaaataattgtctgggttctgaaataaacaccagtcattatgcactatatctgcccataatgaactctcatcgccaacttcactatgagtcgattagattattttgttcaactgacatcgtaatgactcgacaaaaaaaccattatttcaatgactcatccttcatcgaaataacggtttttagtctgatttgtaaaaatcacaccctactgaatccggtcactaaagtgcaagacccgatccaagctgtacataattggcgcggtgatactcatgataatcaactctgataaagcagttgttagatacgtcggccagaaagcgacgccgctactcatcatggtaatcatcagtgcgatcataaacatcgaaacggtgaatagcgcgatattcagtaacatccgttgccaaaccgtcttcaacttaggggccaaccacgtcaataccagcagggctaataatgattggccgccaccaaagagaacgttgaggagactcgcaccgggaccaaaagcgtcaaacaaaataacgccagcaacaattccccaaatatacttgcgattgaacacggctaagtggttcaacccttcagaaacgcggaattgaattgcgcccgatgctaagctaaaagctgcggggcctaggcatagtacaacatacattgcagcgactagggcgttgataatccatggtcgaatttttgattgtgtcattcgcttaattcctcctagtttttttaacgtgggatggttacgaaccacgtattgattgaaacaaagcgaatataatcgtagcacgctctagtagttcccgcaagcttgctaattgaaaatgctggtaggaataaataagttacctaatgtagccgccattaccgccttaattgctggcatccggttgccggcctcttcaaagacgaccgcctgcttactctggaagacatcatccgtaatttcaaacgccgtcattccgtactgttcgcctaatttggctcccagctgcgtctttagatcgtgtagtgctggtaagcaatgcatgacaatcgtcgatgacttgccagtagctgcgagtaacgcagtattaatttgaaacggcaatagttgcttgatccgctcaccatagtcgacctgctcgcccattgagacccagacatccgtataaagcgcatcagcctgagtaacggcttgttgcggatcagccgtaatcacgaccgtgctcccagctgcctgcgcatactgttgggccaacgcgaccactgctggggctggctgtaacgctaccggggccccgatagcgatattgatgccgagcatcgctcccgccacaagtaaactattagccatattattgcgaccatcaccaacgtacgctaacgtcaacccttttaaatgaccaaaatgttcctttaatgttaaaaaatccgctaaaatctgcgtcgggtgccactcatcggtcaatccgttccagactggcacaccactataggtcgctaagtcttcgaccgtgctttgtttaaagccccgaaattcaataccatcatacatggaccccagtactttcgccgtatcaacaactgactccttcgtcccgaattggatgtcgtccttacccaaaaactctggattcgcgcccagatcattagccgccacagtaaacgcagaacgtgtccgtgtcgacgttttttcaaacagcaacgcaatattttttccttgtaaataagggtgtgggatatggtgtgctttaagggtcttcaagtgactagcaaagtcaattaagtaagctaattctgttggtgtatagtcgatttccttcaagaatgaccgaccttcaaattgattattcattcgtcgtgacctccgttgtcaaagttgtcagtacctttgcaatcaaggcaatcccagctaataaatcggccggttgcatcacaattgggggtaacaaacgtaacgtattatcgccagctgataacgtcaataagccttctacttgtagccggataatgacttgattaaccggcatttgttcatctaagtggattccaatcattaggcccttccccgtgatttgtttaactaccggtatcggttcgacttgagtcgctagggcttgccagacaagttcggcatgggcccgaaccgtcgttaacagcgccggtgttaattgggtcaagacacgttttgccgccgccatagcaacagcattaccggcgaacgtcgagccatggctgcccggaccaaaggcagtggctaattgccgccgaccaaccattgcccccactggcaagccattcgctaagcccttggcgaccgtgtagatatcaggatccaggccgtaaccttcataggccatccggtaaccagtccgaccgattcccgtctgcacctcatcaataatcaacaaaacacccgttgcttggcatttcgcattaaccgcttgtaaccaagctgtttgtcccgcaaagacgccgccttcaccttgaacgacttctaaaataacggccgccaactctggtgtgattttgtccaaagccgcgtcgtcattataggttgcaaacgtgatgccaggcactaatggcgcatagccagcctgaatatgaggattgcccgtcatcgacatagcgccataggttcgaccgtgaaatgaatgctgaaaagctaagatgccggttttacccgtgtacttccgtgcgagttttaatgcagcttcattggcttcggttccggaatttgcaaagtatacgagtcgctcttcaccattcgctaacaggccggcaacggcatcttgtaattcattttcgtataaattcgacgtatgccagatatgcgtcaactgctgggtgacggccgcctgaatttgtggttggtgatacccaaagttgcagaccccgattcccgccgtaaaatctaaatacgtcttgccatgattatcagtcagatgaacgccctgaccatccgtaatggcaaatggaaaacgttgataggttggaaacacgtgttgcatggtcatacggccacctcctgaataattgcggttcctggttgatcgattgcattcgtaataatagcctgcttgactcccgtctgaatcgcggcaattgcagcttgaactttgggttgcattcccgcggtgatcacagctgttcgaatcaattgctgagcttgttgtggcgatagtgatgtcatcacattaccgtgatgtataattcccgggacatcggttagcaaaaccaatttttcagcatgtagttgttgggctagcacggtcgctgccatatccgcattgacattgagccattgtcccgtctcggttaaggctaaaggggccaaaataccgatatgatgagccaacaattgcattaattgcacttgattgacagcggtgagccggccgacataccctagctgtcgataatcaatcaattcaccagttagtaactgattatccgccgcattgagccccaacacaggtaggtgatgttgcgttaattttgcaagtaaggctggttgcgcatctcctagcagggccaacttggtgagcactaaggtcgccgcatccgtcacccgcaacccgttcaccttatgcacgggcaaagcaagctgagtcgtcagtcgattgatcattggccccccaccgtgtacgatcagaatctgataatgctgttggtaccactgtgcgatttggtcaaagaaagtggtgctcaattggctaatcgcctggcccccaatcttaattacaattaattttgtcattttcaccacctccgtttaagtatgatagctcgcgttaattttgacgtaattgtaagtcaagtcacaaccccaagcctgaccacttgctgtaccgtgatgtaaatcaacatcgatcataatctggttatcacgtaaggtcgcctgcaccgctgccatatcaaagtcaacggccagactttgttgaacaagtaaaacgccgttcatttcaatatcgaccgtcgccacatcgatgtctgcatcagtggcgccaatcgtgctaatgattcgcccccaattcgggtcttcaccgaaaatggccgccttaacgaggttagagccaacaattgctttggcgatttgctgaccatcaaacgttgtagcggcgtggaccacattacattcgactaacttggtcgcaccctcaccgtcagcggcaatttgcttggcaagttggcctaagacatagtgcaacgcctgattaaaaatatcatagtcggtggtacccgcttgtaaactcggattatctgccagaccattcgccaacgtgaccaccatgtcattagtagacgtgtcaccgtcaacagtaatctgattgaatgtctgatcaacgttagtacttagcatgtcctgtaaaactggcccgtctatttgggcatcggtggtgacaaaaccaagcatggttgccatcttgggatgaatcattccagaacctttggcaaaaccggtcaaggtaactaactggccgctgagttcacactgcacacagacggttttgggatgctggtctgtcgttaacacggcgtaggtcaccgcgtcactcttcgttggtgtcaattgcggcaagccgtttttgattttatccatgggtaactgagcaccaatcagcccagttgaagcaacgccaatcaagttcggctccacgtttagtttattcgctaaccaggcttgttcttgcagcgcattctgccacccctgctcgccagtacaagaattggcgattgcactattcagcagcagtccctgtaattggtggccctggtcgatcatctgtttagttaacttagttggtgctgcctgaaactgattcgtcgtataagttccagccgcactggcaggcacttttgaaaatagccaaccaaaatcttttttatgacgacgaagaccaatatgaatgccatcactgtaaaaacctgccggccactgaaaggcaaccgtttcaaacttcgtattcgttaaaacttgcatctgcataacttcctctcttattgcaccttatcagggaaatacaggtaacgtcggtaatccggccgtaaccgcgaaatcaaaatagcgattaaaattctgaacggcctgccccgcagcacctttcatcaaattgtcaatgacgctcacaaccacgatggtgttcgtgaccggattataatcaacgcctaacgcacagttattagacccaacaacgtccttgagcgtcggcatccccgttggtagcacttgcacgaacggctgctcatgataggtcgcggtaaaagctgcgcggacctgcgtcgttgtcaatgctgacttcgctttggcataaatcgtcgtcataatcccacgcgttactggaatcaaagtggtagtaaattcaatcgcagaaatcgcggaccaccactgctgtaactgttgcatcatttcagggatatgttgatgttgattcaacttgtataaactcaaattatcattcacagcgacgtaatgactcgcagctgtcgctcgtttgccagcaccagataagccggacttagcatccacaacaatcgaagtcggttcgaccaactgttgctgagcaagtggcgctagtcctaataacgtagcagtcgcataacagccgggattcgcaatgtaggtggacaacggcgccggcatatcagctaagccgtagctcgcctgcgccaaagcggtcgccggtgctggatcacgttggtaccaccgctgatattgctctggatcatgcaagcggaagtcaccagataaatcgatgactggaaaatgagcagcgatgaatggtaatgccaattgtcgcgtgatgcccgctgatgtcgcaaagaacacaatcgcgttatcgcgcatgattgccgtcgcatcgaatggtcgaataaccgccgtttccttctggtacatggctgccaccgtctttaatgccaccgtagttgctcccacgtgcccgtataattggatgcgatcgatctcgggatgttgtttcaagagccggtacaacaccatgccactgtaccccgtaacgccaactagcgcgacttgcatataatcacctcaaatattcaaaaatagtgtattagctgcatgttcatgcagaaagtatgattcacactatattctcatcgctttaaaattgcaagctttattgaaaaaatattcatttttgctctattaattgcatgtttttagctttattcagttgtttatgcatttaatatgtatttttaattgacatccacaataaaatgatgtttacttatcccattaaccaaaatgaaattttaaccaaattatcagaaagggtgcgattgggatgaacaaatacttaactttagcagacggcacacagtggattggaacggcaattggggattgccagctagaggctgcggggcgcatcgtcttcaatacgggaatgacgggttatcaggaaacattgactgatccatcctacctaaatcaaatgattgccttcacttacccattaattggtaattatggtatcgatccgaccgtggcccaggcaccaacgattggcgcacaagccatcatcgttcacgagctggccacttttaatgatcactatactagtcgccaatcactggcaagttttctgacaatccaccatgtagccggcattgaaggcgtcgatactcgtgacctaacgattcacattcgtcaaacgggagcccagatggcaatcttgagcaatcatcccatcactgattttgaagcgcaactcgccacattcgcaccccaagcactaacggctacccccctcccagtagcgacgaccaccatccgtccacgcgtcgcgattctcaactttggtgaaaaagcagctatcaccgctgaattgcaagcccggggcgcggacgttgttgtccttccacctacagctagtctcaaggccgtggccgcgtatcaccctgacggaattttgttatccaacggtcccggtgatccgactgactatcacacttacttagcgaccattcgccaactcgcacaacgttatccgctggctggcatttgccttggtcatcagttgattgcgctcgcctatggtgctcagacttaccagctttcctttggtcaccacgggctaaaccatccggtacaagcctgcgctgacggtcgtattatcatgacttcgcaaaatcatgattacgccgtcgatccggcatcgatcaagggcaccccgctgatcgtcacgcacactgaattaaatgacggcagcattgaaggcttgcgcctaccgcaccaggccgtaatgtcggtgcaattccatcccgaagcacacccggggccccaggaagctgggcaatttttcgatgatttcttactaacaattcaaaaggaggcggttgttaatgcctaaaaacaatgccattcattcgattgctgtcatcggttctggtccaatcaaaatcggtcaagccgctgagttcgactatgccggtactcaggcttgtctaagccttaaagcagccggctatcatgtcattttgatcaattcaaacccagcaaccatcatgactgacacggccaccgccgacgaagtctacttagaacctctgactttgaccagtgtcactaaaattctgcgggccacccaccctgatgctttgctcccgacacttggtggacaaaccggattgaacctagcgatggcgttagatcaggctggcgttcttaatgagttgaagatccaactgctaggaacttccctagccaccatcaatcaagctgaagaccgggcagcatttaaagcacttatgaagcggctccatcaaccgattccagcaagtaccactgttcaccacgtgaccagtgcattgtcgtttgctgaaaaaatcggttatccggtcattgttcgtccagcctttacactcgggggttcaggtggcggcattgccaataatgccgccgaattgacccaaacgttacagcgggggttgaccatgtcccccgtcaccgagtgcttgattgaacaaagtatcgccggcttcaaagaaattgaattcgaagtcatgcgtgataatcagggtaccaagatcatcgtctgttccatggaaaacttcgatccggtcggtattcacactggcgattctatcgtgtatgcccccgttcagactttgactgacactgaatatcagcagctacgaacggcggctttgacgattgtggaagccctcgacattagaggtgggtgcaacgttcaactcgctcaagacccgaatagtcgtcagtactacgtcatcgaagtgaacccgcgggtcagtcgttcatcggcgctagcttctaaagcgacgggatatccaattgccaaaattgcagccgatatcgcaattggtctaaatttatctgagatcaagaatccagtcacgcagacaacctatgcggcctttgaaccagctttagactatgtggttgccaaaatcccccggtttgcgtttgacaagtttccaacggccgacgctcacttgggaacacagatgaaagccacgggggaggtcatggcgattgggtcaaccttggaggaagccacgctcaaggcgattgcttcgcttgaaatcgatcccaagacccaagcttccttgacccctgaccaccacgtcaccacgactgaatatatcgaccaattgacccacccgacagatcagcggctcttctatctattggcggcgctgcaagcgggttggccgttagcaaaattagcgacgctaacgcaaatcacgccatttttcttgagtaagttacagcacatcgcccaactcatccggaatatcaagcaagtgccgacgtcccaacacctcttatcggcgaaaaagtacggtgtgagtctggcgaccatggcgcattatgcccaaacttcggtagcgaccattgctgccatgactgctgatttacccttcgtttataaaatggtcgatacgtgtgctggtgaatttgccagtgttacaccatatttttacagcactgcttttggacaaactaacgagagtcacccactaggacacagtattttagtactcggatcaggccccattcgaatcggacaaggcatcgaattcgactacaccaccgttcactgtgtcaaggccattcaacaagctggctaccatgcaatcgtcgtcaataacaaccccgagacggtctccaccgacttttctacctcggataagctttatttcgagccactaacaatcgaacgtttgatgccaatcattgcgttggagcaacccgcgggcgtcatcgttcaatttgggggccaaactgcgatcaaccttgcccatcagctcactaaattaggagtcaccgtcctaggaaccagtgtgtccgctaccgatttgaccgaagaccggcaatcttttgcggactgtttacgtctactaaagattgcccaagccgctggaacgaccgtaactgagttatccggtgcccgtcaagcagctcacgcaatcggttaccccttactcgtacggccaagctttgtactcggcggccgggccatggcaatcgttcataacgatcatgagctcacgccagttattaaatcagcggtggcagctggccatggtgcgcctatcttaatggaccaatacttgtcgggaaccgagtgtgaagttgacgttctctccgatggaacgtcgtgcttcattccaggaatcatggaacatattgaaggtgctggcgttcattctggcgattccattacagtctatccaccacagcacctcagccctgctgttcaagataagatcgtcaccattgccaccaaattagcacaacacctccactgtgtcggtatgatgaacattcagttcgtcgtcaccgatgatgtctacgtaatcgacgttaatccgcgggcaagtcgaacagttccttacatgagcaaggttactcacttgccactggcacaattggcaacccggctaattctcggtcaaagtttagcaacccttggcctagtccccggactcttgacacccgctccacaacaaattgctataaaggccccagtcttctctttcaataaattgccacaatcaccagtcgttttaagtcctgagatgaaatcaactggtgagactcttggtatcggcccgactttcacgaccgcttggcatgccgccatggctgatagttatcacttagagacttggcacacagtggatggtctcatcaccgatattgccactgtggcgcaacccgcggtccaggaactgttcgcggctaaccacctcaccgtcacaacaatcgctaacacgactgattggcctgcaaagactaaagcagtgggtttcacacttaatgaccaaactgacaatcccgtggctatcgctgcattgaatcatggacaaccattgattacggcgattgatacgcttaagaccctattggccagtacgacaacgatggtaagcgaataagcctgcttcttcgtacttagtccaactaacgaagtcccctggatggccatatcaagctcaccaccatgcgatcctgttttttcacagcaaaaatgcttatcaagactggtatctcgccaatcatcttgataagcattttttagtcatcacccagcaacctgtccatcatgagcgccaaagtttaatttatcttgaatccgatgccgaaattcagcaaaatcgacactcaaccgtgaccgtggatgtggtaatggatttgtcacaatttctttgattctcccaggacgaggcgtcatcacaataattcggtcactcaagtagactgcctcatcgatatcatgagtaactaaaatcatcgtcgtctgtgtctgctgccaaacctgttcgatgacattctgaatatccgcacgtgtaaacgcatcaagagcccccatcggctcatccaaaagtaggagctgcgggttcatgataattgaccgcgcgagggcagctcgttgggccatcccaccagaaacctgatgcggataagcattttcaaagccttttagccccatcaattcaatataatggtcgaccaattggtggtcataatgccgaccacgcgtcactttcaggccgacactaatattctccttgattgttgaccatggaaaaaggctgccatgttggaaaacataaccgcgagaattatctggtcgcttaatctgctgattatcgatcgttagctgaccgctagcgggatggtctaatccagaaatcaggcgtagtaacgtggtcttaccacaaccagacggcccaatgattgctacgaactcacccggattgacggtgaaatcaatatcatctagcacgtcgatctgatgaccatcattgtcttgaagccgctgattaacatgttgaactgcaagtaatcccatcttataagctcctttctagtgagcaccatcgcgccaacgtaggcagtaatcttgaactttggtaaacaccgcaaataacactgaaaacagaatcgccataatcacaattgccgcatagacttgtgtataattcccggtaccctttgcccagttgataaaccagcccagtccgaccttagcaccaatcatctcggaaattaccagcattgtaaacgacaatcccattgccgtataaacgccagtaaagatacttggcaacgctccgggaaggacgattttgcggataatctgccactcactaaatcctaaggtctttgctgattcgaagtattccttgctaatcccttgaacgccaccaatcgtcatgaaggccactggaaaccaaaccgagaaggcaatcaagaagacttcggccatgtaactagtcggaaagatgaccatcgtcagcggcatccatgcagccgcagggataatcccgatgaccttcaagtaggggaatgcccagtagttaaactcacgatagcgtcccatgcccaaaccaagtaagattccaagaatggtcccaatcacaaaactaatcaaccaaagcgctaatgatgacaacgtcgaagcccagagcaagccggcattttcgcgcatctggtccaagatttgtgcaaagctcacgaagaaaggctgttctagaacggcaaacttttcggtcagaagatcctgcacgatcagcaagccaactaacgaaacgttcaactgggcaaaatgtccattataccggcgaattcgaccatttgtaactgcgccaatcagcgtaacaatcaataaataagcaaagtacccacctaaaaaccaatgatacgtctgattattaacggtttcctgtgatacaaccaattggttttcaaaatacgcaattgctaatacgactaaactaacaatgttccaggtcaagtgccagggcttccaataacggccagttgtcttagctgcctgcacagctttttttcgactcaattggactgctgttatttgcatactattctacctccttgaacttagttcttagataaatctggataccaataagcttgcttcaacaattgcttgttattcgtattcttcttcaaatatcctgcttgcttcaattgcttgatataataacttaaatcttctttacctgtcttaagatttagttcaaaatgttcatctttcaagatctgggtcacattcttcacattgataaacttcgtcttggagacataccccttatttaattcaatctttgctgtctcttcaggatggttattgatccaagcagcggcttgtttgtatgaacggacaatggccttagccttcgctggattctctttgactaacttgctcgaaacgtacaagtaacagcaagcaccctttgatttcattcccattgcagccatcttagcattgccactattgttattattatcaataatggtcttaaacccagattccttttgtgcttggtaagcatacggatcgaccgtcccaattgcatcgacctgccccttttcagccgcctttgccaatagatcagtgctgtaaaccttccacgttactcccgtcttcggatcaatacccgcatgttgaagtgcaatggacgtcacgtattgtggtgttgaaccctgagccggaatcccaatcgtcttgccttttaagtccttaacactcttaatgcttgagtttttcggaaccagcaacttgatacagccttggtggattccaccaacagctttgatttgcgccccgttttgaatcgcaggtaagtattgaaaatcaccattttgcgcgtcatatttgccactcgcaaaacccgcttctaggtcactgatatcccgcgggttcgctactagtttggccttgataccatttttcttaaagaaccccttctcatacgcgatataatttggcgcattacaaatagaaccgtccttagctggtatcgttacttcaccatacttataggttttagatgtatccttactactagcactgctactgccgcagccagctaatactgttcccagtgcaataaaacttaataacccaaaaataatttccttttttcgcatacgcgaagcctccccaaaaatatataataaaaaatcgccccactgtcgttatgacagaaggacgatgactcgtgttaccacctttaattcgactatttttcgcaaaatagtcctcagcaggtacgtcaatctcactgaattgagatacctttgtccgtttatcggggaccaccgtcagcgcttaatcattcggcactgaatgctccaagaccattttcaaccatgcgggaataccggcttgcacctgacccggctctctgaaaaacccacgattgatttacttatctcatcaccgcatttgaataattagaatataattagattatagttctaagttcacacttgtcaacacaaaatttaatgtttctaatttttgatttgaattcagtcgttcttttatcgctgtcaagtcaacgttttgcgtccagtatcagctattgaaattagttttgagttatcagttgctcaagcaaaaattaaaattagatgagttgttaagcaagccgacagttagttttctatttttcagcacttgttcgtcctattccggatttcggggctagttgccaattgctggaacgtagccgacgtgaagcgccttacaattagatgtcgtagagcgtgtttacactacgctgaactttttcaagcaaatctaagctggctgattctgacccccagaaatctgcatggcattactgtctttcagtgatcggtaacgccgggatctcattgaatagaattggaacggtttcaagagtcacctcggagaattctaggccgaaccatttggcaggcgttgtcgcgtattttttaatcattaatttcgtctcgatcactaatcgatccaagcgggataaccgactaccattttctaacttctcctcgatgataacgaagcggaagtcaccgacatcgcggccagaagtgactgaatatgtctgcttttgcgccgctaaacgtcccgtagccattaagtcgcggacaatcgtccgtaaatagcggttaatatcttggcggacacgaaagcccaggtataacttaacagttaccaaatagtccgttgctaacgtgtcgacagtatactccgcggtatacggttcatccgtgattgtcacattaacaaaccagtagacgtcggcacgtttcggccacttgtctaaaatcgaatataatacctttcgctccacttggtcgccatccattcggcttgttaggaagaccacgttcgtctggaacttgtccaccgtctgatcgttacgtaacttagcaagctggtcctgatattgtcgtaaactaagcgggtggttatgttgtctgacaatttgttcgccacgataccacacagccatcactaggaaaattagtaaagcaagtccgaccgctacgtagccgccgtgccagaacttggctgcgctggcaatcaggaaaattacttcgatggtcgcgaagaaaccggtcagtagtcccgcaccgattaatggtaagcgcttttgccgtaaaaacgcgtagatcaaagtggtcgtcatcagcattgtcagtgtgatggctaacccgtatgcagcttccattctttcactagtttgaaagaaaatcaccagcatactcgtcacgccccacagcccacagttaacgaccggtaaatacatttggcccactgctttaccggggtaagtagtcagtaatcgggggaatagtttcagtcgaatcgcttcactaactaacgtaaacgacccactgatcagcgactgtgacgcgataatggccgcgagcgtcgcaaaaataactgccgccatcgtcaggctagcaggtaacattgcaaaaaagggattcacatggccctgaatcgcttggccgggacctaaaatccatgcggcctgaccgaaatagctgagtagtaggcaagctttgacatacggccagctcaaccgaatattcgttttgccgacgtgcccaaggtcactgtatagggcctcagcaccggtcgttgccagaaagacgctccctagaatcatgattcccactttgttcgccgggctgatcaagagtaaccacgcataatagggattcagtgcacgcaggatcgtccaatcctgcaccagattaacgaagccactgactcccaaaaacgtgaaccagcccaacatgatgggaccgaataacttaccaatcgtgttcgttccaaaacgttgtagcataaataatagggtgataattccaagtgtaatcagtataatcgtattttggccggcaccaaacagttgaacatatgctggtacatcgcgtaagccttcaatggcagtcgtaactgtcactgcgggggttagcgccccatccgccagtaacgcagccccaccaatcatggccggaatgactaaccagcgcgcacgatgacgcaccaatgcgaatagtgaaaagataccgccttcgccatgattatccgcgtttaacgcaatcagaacgtacttaacggtcgtgagcaacgtcattgtccaaaaaactagcgagacggcccccaacataaacttctcatcaacggcctgcatcccaccttgaccggtaatgatggccttcatcacgtataacggactggttccaatatcaccatatacgacgcccatcgcgactaacaatcctgccacccgatgcttattgaactgagcctgtttactcattatgcccccatcctttcaccgatattcacgagttacagccaatcgtccctcgttataatgggttcaactagcttacctaatcgtcatcagaaagacaatcataatgcacaataatgttagctcatcactaaatgctccaacaggccctgtaacatttaccgatagccaatttagaaactaaaagcgggtttcaatccagtcattaactgaattgaaacccgctgattatccatactcggtcatcgcaccgaaatagttcaattatgtaaataattaatccccatcgattgactatgattgaaacgtgcgttgtggccgacgtcgtgttcgatcagctaacccaatactaatctgtaacgcattatcaactcggcgcatcgtctgatcatccaaatgagtgacgcgatctttaagccgttgcttatcaatcgttcgtatctgctccaacaacacaaccgaatttttttcaatccccgtatgggcagcgttgatgttaacatgtgttggcatcttcgctttttgaaccttagcagtgattgccgcgacaatcactgtgggactgtaatggttaccgacattattttgcacgattagtactggacgcatgcctccttgttcggagcctacgactggtgataaatctgcataaaagatgtcaccacgcttaatgtcagctgcggccatcgcctcatctccctttattcgatacccaatgtatctgatagtaccccaatataaccatcttgctactcataatagcatgaaccattcacttttagcaaccgtttaccaatttaatccaaagaactaatcgctaagcaccgttaaaactaatacttcagaccgattaattaagactgcccaatgatgatttcatcaatgtttaaaaataaacgaacttataattagatgccgataaatcactcgaatcactgaaaaaaacttaacagccctcatcaataaaataggagactctaaaaaatgagcgccagaatttctctggcactcattttattggcttaatctcaataaccaaccatgtaaccatagcctgtacgagacaatcttcgcaaacctatcgtctgataaaacttaatctatataaactctcggcactcgtggtgctaacccacaagcaatctcataatgaattgtcccacaatagtcagcaatatcttgcaacgaaatggtacgagcaccgtccgtgccaaccaaagttaccttagctccaaccggtacttcatgtggcagacgaaccatcagctggtccatgcagacccgcccgacgatttcgcaaaactcaccatcaacaagtacatggaagccttgtaatcggcgttcatagccgtccgcatacccaatcggcaccgtgccaatccattcatcctgtgcggccgtatacgtggcaccatagctgaccgatttgccccgagccaagcgtttaacaaacgtcaagcgtgccgttagcgacaacgcaggttgcaaggggtatggtgcgctgagttcgcgaccagaaggatttagaccatagagtgcaaccccaaagcgcaccatgttgccattgcaagcttgatgccagagactggtggccgaattggacacgtggacatagcgtggtagctcatccaccactgcaatcaagtgtttccaattatttaattgatgggtaaaatacgtatcatctgcctggtcagccgttgcaaaatgcgtaaaaatcccttcaaagtcaaatggtgactgcggttgacgcaaagtcgtaaccgccgttgccaattcttcgggcgtctgaaacccgattcgtcccatacccgtatctaatgcaagatgaacgtgaagtggtgtcgtcacttgattagccgctaaaattgctgcggccgtagtcagccaatcttgcgttccaacagctagtgaaatatccttttcagctaccagtggggcgtattccggttccgtaattccaagtactaggatgggttccgcaaagccagcggcccgcaacgctaaggcctcatccaggattgcaacacaaaagccggtcgccccggcttctttggcagcctgagcaacttggataattccatgtccataaccattcgctttaacgactgcccataactcggtcaactcatccttttgcgccatttcattactaatatttgtcttaattgcctgcaagtcgactgtgacttgtgtgtggcggtgctccccaattacaaccatcacaaattgcctctttccaatataacttgtgtcattactaacgtatccgtgtgtgaaattgaaatccacgctggaccatcaaacgggtggcgcgtaacttccggtttaccctgggcgttgtctaaaatttcgatatcttgaaatccaactgccgcaccaattcccgtgccatatgccttactatatgcttccttagctgaaaaacgccctgccataaactcgatctggcgtttaaccgggtaacgtgaaaacaccgccaactcagccggtgttaagatcttttcaggcaatctcagtcccttcgctagaatcgcttcaatccgactaagctcagttaaatcaatgccggtaccataaatcacgctgtgaccccctctatctcattattatcacgtcaacttaggctgatgtttccaatttaccacagctaccgccgcgataaaagggcccatacacgcaatcttttcatgtcagcatgaattattgttaaaacgttccaatttaattggtttgttgttcgtcagcacttgtgcgtcctatgccgacctccagggctgggtgacaattgctggaacgcagccgacgtcgatttgagctaacgcccaacccgcgtcatctcaaatacgagtcttattctaagccggaagcaacccacttccgcctaagaataacttggctactgagcattgtcacccatcccctccagtctcaagcctgtgagaggccacaggttgaagccgagcattgcctagccaacacaggctttagtggcaccgaacttagcacaatctatcgttgcctattttgatactggaactttaaacaaagcgttaagtgcactagcactttgtcgagagattaaatcttactattttgattcagaattagtgaattatctcaatatcactttcagtctgacagttgattgacaaaattatggtttatgaaaaacaatgacgaattcaccaaaagttgggtacacacatgtccgccattcgaacactgtcccgactggaaggcgtttcggccaatgctcagcggtgaaattccacttagcaagcgtcctttgcttggttagtggaagaccagtatttaagacgtggtctgcggcttaaatctgtgtccaccgcgttccagcaattggcagaaatgcctggaggtcggttttaggacgcgctaaccaaacatgtttacgctcactcgacttttttccagcggcctaagctggccgactttgacttgacgcgtttggaacgttttaacaataattcatacgaacatctgccgactacttgtattctaacattgtagggcataaaaaaagccgagcgtgcgctcggcttttgtgcaaagttaatttaattcaacttaatttgtgcgttgactttaatcattggtgcggatcgtatagctccgcttgctgctttgcttgcgaccttcatcatggttgcggttgctgctccggttatcatcgcgactgcgacctttataaccattgctcttccgatcgccacggccaccgttacgatcacggtcgcgattgcgaccattgtgagaataaccgccacgaccattgccatgactgttattgcggttgcgattaccgccacgatatccgccacgccggttgttaccgccgccacctttgtgacgaggtaatgggcgttctggcgtaatcttaacaggtaccgctgacgagtcatccttggttaagtcatttaacaaggcagcaactagatcagtagcatcgtatttttgtaataattcagcagcttgatcagcatacttttcagtcgaagtcttagcaactaacgaatcaacattcgcttctgcagcagctaattggccagcaaaagcttcagattcagttggtggcttcaatggtaacatccgcttcttggtcaacttttcgatgacccgcaaatattccatttcgtttggtgttacaaaagttaatgaaacacccttgtgtccggcacggccagtacggccaatccggtgaacataactgtccggatcctgtggaatatcgtaattgtaaacgtgggtcacaccagaaacatcaagtccccgagcagccacatcggttgcaaccaaaatatccaatttaccagccttgaattgacgcatgatttgcgtccgacgttgttggctcaaatcaccatgaatcccagcggcattataaccacgtgcttcgagaccctttgataattcgtcaactcgacgtttcgttcgaccaaacacgattgtgagttcaggtgcctgaacatcaaacaaccgggtcataatatcgaacttttcaaattctttggctttaacgtaatattgatcgaccgtatcagcagtcatttcttttgatttgatcttaacgtgatgcggttccttcatgaactgcacaccaatgcgtttgatttcaggtggcatcgttgcggagaacaacatagtttggcgttcatccggcacttgtttgataattgattcgatatcttccaagaaacccatgtttaacatttcgtcagcttcatcaagaactaacatcttgacgtggtctaacttgaccgtgccccggcgaatgtggtcaagcaaccggccgggagttccgacgattacttgtgggttttgcttcagatttctgatttggcgccgaatatcagcaccaccgtaaacgacttggactttcgcccgttcgtctttacctaagcggaagatttcttcctgagtttggattgctaattcacgcgttggtgaaacaactaatgcttgaatgttatggttgtcaaaatccaagcgttgtaagattggtaatgcaaacgcggcggtcttcccagtaccggtttgtgcttgaccaatcacatctttgccttctagaaccattggaatggtttcggcttgaatcggggtcgcttcttcgtatccggcccgattaactgctttaagtaggctatcggataagcctagttctgtaaacttcaaatatgtttcctcctaaggatgacaccatgggattactgccagctaggaaaaaatccgtttcccgtaagacgctgtcatgtaagccaacggtctgactttcatatggtacaactgaattatcatacaccggttattctaaataagcaagcaaagcccctagcaataccggaagggaaacaacattatcagtctaatgttagcgtcaccattacccagtcattgcgaggggcctgcttaatcgaatcacttaaattttatttttcaggagcagcttccagcgccgtcagaaccttttcaaggtgaatcccgtgactccccttcaataagacctgatcatccgcactaaccgtcgccgttaagtcggcaatcaattggggctgttgatccgtttgataatagtggaccgcaccggctgggtacttttcttgtagcacttctgccaacgctcgcatatgttcaccattcaaatagacgctggcaatcgtggctggatccaattcactggctaaactcatgtgtagtgcatccgactggtcacccaactcaagcatatcaccgagtacagcgattcgctgacccttagtaggtaccgccgcaaaagcggctaggacccgtcgagctgccgttggattagagttataaacatcacttaagatggcttctccacggtaaccagttaaccattccgtccggttctccgtcggcacaaaactggcgattgcttgttgcgcagcggctggtcgaatgtgaaaagtatcagctactaagagcgccgccaatgcattattgacattgtacgcacccatcatcggaattgtgtacgtgttgtccggccacagactcgtcttaaattgcgtttgagcccgactagtcgtgatatcactgcctgctaaggtgttcgtatcatccaacccaaacgtccgttgatgctgactgacttccttagcacgttcttgtagcagtggttcatcaccattaaaaatgaacgtgccatcttcttttaagccgtgaacaatttccattttggcatcagcaattcgatcccgtgtaccaaagaactcaatgtgggcttccccaatcatggtaatcaccgcaacgtctggttgaacgagacggctcaagaaatccaactcgccaaaatggtccatccccatttcaacgacgaccacttctgtattcggttccatactgagtaacgtcactggcacaccaatctgattgttaaagttggcgtgcgtctttgtcacgttaaactgagtgctcaaaacactcgcaatcatatccttcgtcgttgttttaccattactacccgtaacagccacgactttcggattaattttttgtaaatagtattgccccagctggtgtagtgccgtcaatgtatcagcaaccataatgacaggtaagtcttctggaacgtcgtcggcatggtcgctggcccataaggtagcaacggccccgtgctcgattgcactttgaatatattgatgaccatcattagcgcccatcagcggaataaatagatcccctgcttggagctttcggctatcaaacgccacacccgttacattaacatcgggccacgcctgttcggcattgaccgcttgaacggccttagcaatttcggcaacttgcatcttcatatcgattaaactctccattcatggcgaccacttgtcggtcagccaagttctgactaaggttccactttctcgaatcgtagcccaattcaagctacgcgcataaaaattataccactttgaccccagggactctatggctagaccaatttagcccctaaatcccgccccaaacgacttaaaaacgcccgctgaatgatcagccaagcgttaagatgataatactataaatgttcttcgaacgcagcctggtcctgcacttgcaagtcccacacgcctgaattcaagttaaaagtaagggtcgcgacatggtgggttcgccgattctctccaccacgagcgggatcaaaaacttcgatttcattgcctgtcgtctccgtgtgcaccggcaccaataattggcgttgccgaaccattgactgatcaaagtaaatgaacaaaccatctggcatcaattgaacgagttgcttgagaatcgcttcaggtactcgtggaacactcagtgaacgcataaacatacgccggccacggtaagctgccaaagtgtgccgcacaatggcagcacttaaaatatggctaaatgcggaaatataatagaagtacactttgataccaccattgcgttgttccaagaaaacgtagtggttgcgcagtttgtaattaaacggtgatcgaattggacgatccatatgtccgagatacaatagctcggcaatctcagtcgcggttagaaaatccaaatcgccaacttcatcataatcaagccacttaacgggtaacgcgtgactctgtaacaaatatcgccgaatttcattttcatcattaatgacgttcagacccgtgtgagcatttaccgcatgctcgttatcatcaacaccgactaacgagaccaagttagctggcaagcgcttgataccatgcacaaagtcgctctggtcgatcccgtaagcaaagacaaggttatccagtttttccaaattggcgtaaatatatttgcgttgcaaccgtctcactctttcaactttctatttgttttcattataatccgttattaacctaaacgcatttttttattacatgttttttaaacgagtgatgcgatcagccatcggtgggtgggtatcgaataagtgcatccatgatttcttcgccttaaacggatcagaaatataaagggccgcgctactaggatccgccgcttgcatgggttggctgtcatcgattttttcaagtgcactgattaagcccaacggattacgagtcagttccacactgccggcatccgctaagtattcgcgattacgggatagcgccatctgcactaaactagctgctagcggcgctaaaataatgacaacaatcgctaggatcattagtaagacctgggcaccgttgccgtcacgatcattatcccgactgcgccggccaccgccccaccaaaaggcgttcataccccaattgactaacaaactgacggccgctgtcagagccaaggcaatggtctgtaaccgaatatcatagttacgcacatgactcatctcgtgaccaatgacgccttccatctcttcacgcgttaatcgtgcctgaataccaattgtcactgcaactgccgcatgctcagggtcatttcctgtcgcaaacgcattggggctctcatcatcaataataaagacacgtggcatcggtactttagcaaccaacgccatgtcttccacaatgtgccagagctctggatcatcgtcagcttgatgcagctcacgtccatgattcatgctcatgacaatgtcagtcgactgactaatcattaataccatataaaataccgctgcaatcaaggctactagtaaccctgcaatcgcactattaaaaaacacgtagccaactgctaaaccaatcactgcaagtaatatgacaaaagcggccatcacgtataacgtgtgccgcttgttgcgggcaatttgctcaaataacatgggcataacctctaatcttcaaatgaaaccgtgggtgctgctttttctgcttcaggaacagttaagaattcaacgttcttgaagtgatgaatgccagcaataatatttgacgggaattgttgtaacttcatgttatagctggcagcgctagagttgaacagttgccgtgaataagcaatcttgttttctgtattggtcaactcttccatcagcttaccgaattcttgattagccttcaaatcagggtagctttcagctaacgcaaaaatgctcttcaacgaatttgtcaattgatcagaaactgccatagcctgttggtgatcaccgctcggcacttgcgttaattgattccgtaatgaaatcacttccgctaaggtactcttttcatgtttcgcgtaacctttgaccgtattgaccagattaggaatcaaatcagtccgccgttttagctgaacatcgatttggctccatgcttcctgcgtatacatccgtgacttaactaaaccgttataaattaccacgtaaattgcgatcaaaaccaatacgaccgcaacgataattaaagctatcatcaatagaccccctctaaattatgtcttatctgagacatgtgaccttaagttatattgtaccgtgaaattccgttagaagatatcgatacccctagaatgtaataattgttaatatttgttattaaaatgacttgtaaaggccttctgaacctgagttggcgccgacttaaacgaccattgctgttcgtacttaccgcgaatcattaagcgacccgccccggtcttatcacaggtaattagggtaatcagcttctgaccaggaacatcatcaattacttggacatcagttgctttaatgaatgttcgctgactcgtcttatacgcataaatctttttggcatcactcacataaatcatttggccaaccttgctcttatagtacaacggactgaatagtgcgccatgcttgatcatatggtgaccagccaacgcgtagttaccctgccccatcttctgattagctttcatcgtgccagccgccaatgctaacgtttcattgctgacaccattaccgattggcaggtacaaatcaacggacggaatcgcaatcgagccaatcacgttgattgcattcttattcatgcgggccttggcaacggtctgaaagtcaagtgacttgacctttgagaagttaaaatcgctcttcttcttcgtattctgcttaaccgtcttagccgtaacggtcggcgagtatgaactcactaaccagctcttgatctgttcattgaaaattaatgccaatgatactagcaccagcaggacaaaaacgccccgacctaaccactttaacccgggatgttgcttggacttcattaatcccgcctcctaatttgtttacgccccttatcaaaggttctatggtaaatataccttaattagttcgcataataaagccccgaattcgtttagttcgttagaattatctatagcttatcataatcattatatttgcgtccgtaatcggattcttgttatgctaattgtatcaaaaacagaaagcaggttggacctatggaaacgatggtaaaaaacgatctcaatcaactaatgcaacaacgtgaggatggcccatacattgcaatttacctcaacacggccgttgtgctcaacgacctcaatcgccgccgcttacaattcaaacaattagttaatgaagctgaaacccagatggcccaccactttccgaaaaccgaatttgcgccatacgcgacgcaactagagcaattaattaatgacaacgccttctggttacagcacactggccctcagacgggcatcatcactaacagtcgtgacctacacattttcgacttacaatatcccactgacaaccatgtcagcgtcaatagcatgccagctattcgcccagtactagccgaccgccagcatcaattcgacttcgacttgctagcactcaatgaagatagcatggcgctctacgcccaacgtgatggcagtttcgtcgaacttgatttgccagctgaggccccccgcaccctgacagaagcattgggcactgaaaaacgtggcggtgatctgaatttcaacgccagccccgttcacggtgccaactatcatggtcataatgcgaaggccgaagaacgcgatattgaccaacgaaattattaccaacaagtggcgcagtacgttcaggcccattcacaaaagacgcgacggccattgatcttaatgggactaccacataaccaggcagtcttccgtgccgtcaacaagaatccgtacctgtcacaacacctcatgatcaataagtcaccaaaaaacttaacggtgggcgcaatgcaaacagccacagaacccgttcagacgatgtggcatacccaattagccgacattttactagaacgttatgatcaggctaagtcccgccagttagcattggccgatccttttgacatgatcaagccagcactaagtgggcggatcgacaccttgattgtcgccgcagacgcgaatgtcgccggctccttaccagcggccgatgttcaattaactgatccaattgctgctcctgataatttaattgacgacctggtcgatgtcgtgattgccatgaacgggcaaatccgaatcatccccgcagaccggatgcccgtagaaaccgctgctctcgcgattatgcgctactaatcatatcgtaagtgagacaaagccgcaccagttcattactcgaactggtgcggctttgtttgtgagcgtcgatgatttgcacatacaaaaaagacgcccccgccgaagccggaacgccgtttaattgtctgcttatttgagaccgtatttcttgttgaaacgatcgaccgcaccatcggccttggtaaacttttgcttaccagtgtagaatggatgtgaatctgacgtaatttcaacacggatcaatgggtaagtattaccatcttcccattcaacagtttctgctgaagttgctgttgaaccagagatgaacttaaaaccagtagttgagtcttggaacacaactaaatggtaatctggatgaattcctttttgcattgtatttcgctcctttgccctgaatcatttgctgaaacagagattatcatagttttaaccaacgataaacatgttatcacgaatcacagcttcccgtcaacctacaaagtagcccgcctgccagtattaacgacgcgaccgccgggttgattgaccagtgaactttaagctagctaaatcacgaacaaactcagtgttggtcttcgtgtgttttaaaaattgtaaaagctgttcggtgtactctaacgcgttgccagtcattgatcgacgaatctgccagactggctccaaattcttacgactaaccaacaattcctctttacgcgtactggattgcttcaagtctagcgccgggaagacccgccgctcagctaactcgcgggatagctgcaattctgagttgccagttcctttgaattcttcataaatcatgtcgtccatccggctacccgtatcgactaacgcggtgcctaaaatcgttaggctaccaccttcctcgatattgcgtgctgaaccgaagaatcgcttgggcttgtaaaacgccgtgggatcgaccccaccagacaacgtccgcccgctagacgggataaccaaattatatgcccgcgtaagccgggtaattgaatccaataagataatcacatcctgtttgtcttcaactaagcgccgcgcacgttcaagcaccaattccgcaacacgcacgtgattttgtggttgttgatcaaaagtagaactcaccacttctcccttgattgaccgctctaaatcagtcacttcttcgggccgttcatcaatcagtaacataatcagcttagcgtctggataattggcgacgatgccatttgcaatattctttaacagcgtcgtcttaccggctttaggaggtgcgacaattaagccccgttgaccgaagccaatcgggacaaaagtatcaatcaaacgggtcgctaaaacggcggccgttgtcgataacttaatttgtttttgtggataaagtggtgttaacgctggaaaatggggccgttgcttggcctcattaggatccttaccgttaaccgtccctacccgcattaaaccgtaataccgttcgttaggtcgcggtggccgggcttgaccagccacatagtctccgttacgaagaccaaagcgatgaatctgcgactgagaaatataaatatcttcctgcgaaggcccataattaattggccgcaaaaagccatagccctcttggctaataatttccaagacgccttccatttgtacaaagccccgctttttatcctgctcacggagaacggctaatgagagttcctttttattcatttgcgaataataagaaattttatactcacgagcatagttataaatttcttttaacgttttctgctcgagatcgtgcattgttaaaattttttccataaccactgttctttcttagctgtacatcgttagttttcgggaacttcttcgtcggctgcaatttccacatccgcaccaagtgtatgcaatttatcgatgacccgatcatagccacgtagaatattgtcagcgcgactaatttccgtaacgccactagccgcgagaccagcaatcattagtgccgccccagaccgaatctcaccggcctcgacatgtgcaccttgtaagtgggaagaatgacccacgacaatcaagttatcttgaacgcgaatgtccgcccccatcttacgtaactgttcaacgtgttgcgtgcgttgcggataaatcgtatcaatcaccacgctactaccgttagcacgcaataataatggggtgattggttgttgcaaatcagtggcaaagcctgggtaagtcattgttttaacccgaattgggtccaaatcattggaccgtgggacgtaaatactatcttcattaatctgtaaatcgacacccatttcgactagttttgccgtgaatgactccatatgttcagggatcacattctttagcaaaataccgtccccaatcgaagcagccagggatagatacgttcccgtctcaatccgatcaggaataatcgtatgggttgcccgcgaatgcagtgccggaacgccttcgattcgaattacgtcggtaccagcaccccgaattttagcgcccatattattcaaaaaagtcgctaaatcaatgatttcaggctctttagccgcattttcaatcgtggtcgtaccatgagctttgacggcagccaaaataatgttgatcgtcgccccaacggaaaccacgtctaaaaagatgcgcgctccgtgaaggccctctgtgcccgttgagataaagacagagtcattctcttcaacgacgttagcgccgagcgccttaaaacccttgatatgctgatcaattggtcgtggaccaatattatcaccaccagggaaagtcaccgttgcacggttaaaacgaccgagtaaggcccccataaagtagtaagaagctcgcaagcttttaatggcatgacttggtaattcagattcttcaatatttgttggatcaattgttagaacatcattttcaaaagtggaatggacgttcatcgactctaagatgagccgtaagttgtgaacgtctaagatgtgcggaaccgtatcgaattggaccggagtgtctgcaagaatcgcagcaggaatcagtgcgacggtactattttttgcgccaccgatcgttaattccccagaaagtcgttttccgccatggattatcatttttttcataacataactttcctcgctaaataagtgtcacactgtatcatacaatcattaaccataataaagaatgtccgtcaaaaatacaaccaatatcaggaaactgtaatctttttacgcaataaaatcattaactcgactaattcaaacgctttcatgaacgattttgtaagataattaagctaaatctgcgtaatttaaggtgccaccaagacgtgcgatgctgtacaattcattctgacatcaacagttaacattgtcacgtaattaacgccacgattggccaccgattttactactgtcatactatgtactccatacgatgattgggaacgacgtgataccgaataataattcaactaagcgacctattttaatcctactcaagtcctaaatgattattaacacaccgcccgctagaaaaatagaagagtgctaatgcgcgtgataaatttcactggcattagcactctctggactgaattgaacctgatggactatcagcattcatgactaatcacttccttatttaatttagcaacattccgttacccgttaatcgcaagtagctgttccatatgttggggtttcatattaagttcacgcaactgcaataacgtctgctttaagttttcatactcggcttccgtgtataaacggctctcaaagccaatctgataagcttcggcaattgtaaccaaatcgcgtcgtaaccggcgtcgaatttcgttcggtgtcaacattggcatcacctccatttattattcaccataataccatataatgcgccaatcaacggtccatgatacgatttgataatctttgataattgataataatcgcaattgacccccgctacatcagcctttcaactcgctgtcagctaatgaaaattgcatgagatttattatgatgataatcagttgataaccaaattaataaaatctttaatcccccttttgataagacctagaaaattcccactgacatcctcaaagatgtcattctaaccaaattatcataaaaaggggctacgttccaacctgaatcacataaaaacacacgctcccctggcactaatcgccacaccaattgcgaccagccaccactgaacaacgggggatttgattgctcagtttatttaactacttaaaatgcggcagcccgcacacaaactggttgtgttggctgccgcatttttacggtggtgaccatgattcttacctgtccaggaactcagagtagcttcctcacagtttcgccactatggctgaactaaattttgacagggtttcatgacgttaatcgcttacaattacatcgtttaatcctgctggagatcctcatctttgacggtctgcaaataacgataaacactcggatcagagactttgagcactttggcggcttcactaactgaatccttcaataggaagtaaccttggtggtataagctacgaacgatttctaatttttcattttgctttaaatattcaacagagacgccatacttagcacagacagcctgggtcacttcccgagctaaatcagtgatagaagtggttagatgttccggcgcgaccggcgtgtcatgggccttctcattagctggtgttcctttgagttgattaatcgttggtgagttcaaatgtttgtaactcgccattaccttcaatacttgttcctgcagatcgtctagggcactatcatccgtattaatacaaatcatcccgacgatttcaccatctaatcgcaaaaaataagttgacgatcgtagtgagtgctttccttgcgaaacacccttgtagttggctagataatcacgcttttcagctttaccggccttcatcgttcgcaacgctaagtcagttgcaggatcgccaacttgtcgatgtgatatgtgggaattacgaattgccacaacggagtggtttaaatccaacaagtcgttcaggacaacttcactactggggcctaagatatctgctaaaaaatcaacaaacggaataaactcgcgcacgtattcttgctcagctgttaatggtttttgcataacggcactcacctcactatttttttacaacgttatgacttaatattattttatcacactgataaaatgttaatacatgtaacgatataaacatctaattaaaaaagatgataccgcctttagtcagctcatcatctttctgcgacatttttatgcatgaacttgtgaattagtcgatcgtccaaaaatcttttccttcatccgaataccggttggcgtcgccgctaagccacccagtccagtttcccgaagtgcctttggcaagcccttaccgactttatccatcgctgcaatgacttcatccgctggaatcttgttcgtgcagccagccaaagccatgtcagccgcaatcaacgcattaccgaccccaatcgcattccgtttaacacacggtagttcaactaacccagcaacgggatcacacactaatcccatcaagttactgattgccatcgccaaagcctcagcactttgttcaggcgtcccaccagcaacttcaaccgcggccgcagcgcccatcgcagaagcgctaccaacttcagcttggcaaccgccagtcgcaccagcaatcccagcattattagctatgaccatcccaaaagcgccagcggtaaatagaaattggatcatctggtcacggttgaggttcattcggcccttcagcgtgaaaatcacaccaggtagtgtccccgtcgatccagccgttggtgtcgcacaaacgactcccatcgaagcattaacttcattggttgagattgcgttctgaacagcttgcatcatcgtatcgccggataaagtgtgccctttttgacgatactttttcaagagaacagcttcaccaccagttaaaccagttgttgaatagaccccgtcgcccgcagcccctttattaacagctgcttccatgacgtctagattccggcccatcgtgtgccagatttcttcacgactcgtttgcgatgtttccatctcttgttcaatcattaattcgtagatcggcttcttggtctccttggccgctgttaccagttctgctacgctcatgtacatcataactgacctccctgattataagtaaactaaatttgcgtgtccctgcgctaattttttgatttcatcctgtttgaggcggcgatccaaatcatattcatataaattgccccgagccgtcttgtactgctgctggtcgtttactttagtcagatcagccaactgtttggttacgtgctgatggtcattctcaccaccttgaactaacaagataggaagtggccctttgggtttaacatcaaaaccatccatcttgatttcacgaatttcgatggttccacccccgattgaacatccagcgaccgtcacttgcttatcatcattttttaagtcaatgatggcagtgttcgggtggttgattgggctatcaccaggctcttcgataaaggtaatatttatcccctgatctcgggccaaaccaatggcatatggaacccggctatcatcaggatcaaaaccaagaatgccactgataatcgcatagtccgttccgtggcccttgtgggtttgcgcaaatgattcatagtaatgaatgacaatatctgtcggtttctcctgaaaaatgctattcgctgctcgaccaatcgcacacgcccccgcagtatgagaactggaaggtccaatcataatcgggccaataatatcaaaaacactcttgtaattcaccgtcattttagtcatcctcctatttgaatcatcacgttaacttaagctttggtacgggcaactagcgcttctttgcgcattcatcgtcaatacatcgtttcgaaactttatgaatcttgaagttacggcacaagcaagcaccacagttgtactgatcagaaaacataaagccgttgcatcaaagctttcatttctgaattaattccgccgttgtgattaatccagcctccagtatggtcattcgattcgcgaccctcacgaaccccaacaccgtcatgcgaatctcgtcaataacactagcaacgagatttatgacaaaaattggcttcaataatattaaccaatgtgaattcatctcgtattttagtcagattactaaataaacaatttgatgatattgaacaggataccactaactgcgattaatccaattaccacaacaaagacattgctgtgtttgccggcatattgctgtaacttaggacttttatgaatggcatacattggcatcaagaacaagataaacgcaatgattggtccaatgatggtttcaatcattcccataatggaaggattgacccaggcaactatccaggcacttagtagcagaacaagatcaacaattgtcgaaacagttcgacttgaaagcgtcttgttagatttttcttccatcttacgaataatcccacgtaagccttcactcgttcctagataatgtcctaaaaaggacttggcgattgcaataaaagcaattacgggagaaacatatttaataattggattattgaaagcagtcgcaacgtaatcaaggattgaaacattttcatttttagcttcaaggatttggtctggagtcaacgccaatgtacaactaataacaaagaacattgcgacaatgaccatcaacgtttcggccgacaatagaattgtcgaaatctttttatcgactttgtccttaccttccccactatattctttacgttcggcaacggaaaatgaagagatgatcggagaatggttaaacgaaaagatcataacaggaataagtaaccacaagtttcctaaagtgccaaccaaatgtcccccagatacagaactggaaaatgttgagaggattgcgccgttccaatgcggaataagataaaaggaaaacagaacgattacaataataaatggaaaggccaggccactcataactttggtaatcaaagaggtaccaaagcgagcaattccaatgagaatcccaacaagtactagcgacaacagccaacgaggtggtgtttgcatgtgcatttggtcggtaataaatttcgatacagtattcgtaatagaaacagaataaactaataagattggataaatggagaagaaataaataatggtaaaaagcaatccaatcttaaagccaaaatgttgttcaacaacatcagtaatgtcatcaccatcatttttagccgacaagacaaacctactcaggcccctgtgagcaaaaaatgtggttggcaaagccaaaataagtatcatgatgataccaagaatacctaccgtgccaactccaatcggtaagaatagcacgccggccccaatcgccgttccgaacaaactcagcatccaaaaagtatcattttttctccaacccttaaatatatttgtcatttttaaatctcctttttataacgttgttctggtcacaccagagaatgtgctaacataacctgcatgaataaccctcccattagatttaacgtctcgactcgttgtaaaacgccactttgtgataaacatcactttagtgccgtgaaaaccttttcttcatgataaaatattatcacggcgacaattaccgttcatgtgatttcgattataaaaattaagtatttttaacaccaaattaaaaaggactgagattatcataacagtcctagcctgtatccatctcaatcctagtgatattaagtttaacattcaaatgaattatttgaataataatttattctcataataattttattttatctctgtcataccatgcatgtaaggttggagcaccttaggaatcttaaccgtgccatcggcttgttgataattttccaaaatcgcagctaccgtccggccaacagcaagtccagaaccattcaacgtatggacgtaatcgaccgtcccatcagctttccggtaacgaatcatcgcccgccgtgcttggaagtccaagcagttagagcatgaactgatttcccgataaatgccttgttctggcatccatacttccacatcataggtcttggctgatgagaaaccagtatcccccgttgaaagcttaataacatggtatgcaagccctaattcgcgcaacacttcttcggcattatccgttaatttttcgagctcatcgtatgaattctcaggtttacagtacttgaccatctcgactttgtgaaattggtgcatacgaatcaagccccgggtatcacgccccgcactcccagcttcggagcgataacaaggcgtcatcgccgtgaagtacgttggcaattgatcttcagataagatttcattcgcatagtaattggtcagcggtacttcagccgtcgggatcaacgtcattcctgaagattcaaccgtgtagacgtcttctttgaacttcggaaattgcccagttccatacattgtctgagcgttcaccaagtatggcggaataatttcatggtacccttgcttttgtgtgtgcagatctagcataaagctgtaaaccgcccgttctaagagtgcacccgcatccttataataaacaaagcgcgcgcccgcgacttttgctgcccggtcaaaatccaagattcctaagctttcgcccaattcccagtgcgccttaggtttaaaatcaaacgttggaatatcgccgtgcttacgcatctcaacattgctatcttcgtcaggaccgactggtacatcatcggcaggtaaattcgggaagcgaatcgctaagtaatgaagccgatcgtttacttccgtttgggccgcttccgtactcttaatatcaccattcagctgtttgacttgttgaatgagggcttggcccgcttccgattgcggatcactttgcccaatttgttccgtcaactggtttttctgtttcttcaatccttcaaccttggtaattgcatcccggttttgttggtctaactgtaagtattcatcaacctcagccggatcaaccttccgagtctggagcttagtcttaacaagttctgggttattacgaacaaactttggatttaacatacgaaaagcctccttaaaattaaaacgtcccatagtcttcacctaaaagactatgggacgttttttatcaacgtggtaccacccaatttactgctctacgagtatatcgtctcaccgcgacctcttaaaaatgaagtcaaacgctaaatggcggattcatcagtccaatcaaccaactttcagcaaccgttggctttctaaataaccagattaactactaacccattatgtttgcgctttcaatttacacttataatctagacctcccgccatttattgtcaatagttttttattatcattttatttttctattatcaagagaaccatttattgttaccatgtattttcgcaacaccagttgtcactgtgaatatcggtgacctaatcaagcccgtggccgcccaacaaaaaaagcacaccaacaattcgctggcgtgctttattcttaattctaccgtactaaatttatgccttcactttaccagtctggttagcggcatcgatgaatgccttgaataacccttctggacggttaggccgtgataagaattctggatgatattgtgaggccacgaagaagcgcttctttggtaattcaatcacttcgacgagccggttgtcaggcgaagttccggagaagaccatgcccttagcagccattgcttcacgatacttattattgaattcataacggtggcgatgacgttccatcacaacttcttcattgtgataagctttagccgccacagttcccggcttcagcttgcaagggtaagcgcctaaacgttgcgttccacccatgtcttcaacgtcttcttggtcggccatcaaatcaataatattgtccggcgtcttcggatcgatttcagcagagttagcatccttcaatccaagtacgttacgtgcaaattcgacactggccatttgcattcccaagcagatacctaagaatggcacgtcgttttcacgggcatacttgattgccgtaatcttaccttcaattccccgatcaccaaagccaccaggaactaagattccgtcagcatcgccgagtagttcttcgacattttctggcgtaacatcttcagcagaaatcttcttcaaatcaatgtcggcatcatccgtatagccagcatgcttcaatgcttccgttactgagatataagcatcctgtaaagcgacgtattttccgactagcgcaatcttgatggtccgtgataagttctgaacatgatgttctaagtcaatccattcactcatgtcggccttaggtgcctgtacatcaaaatggtcaaggacgatttggtccatgttttgtttctgaacattcaacggaattgaataaatcgtcttaacgtctaaggattcaatgactgcttctggttccacgtcacagaaggacgcaatcttattccgcatttcccgcgtaattggttgttcagtccggacaactaacatgttcggctgaatcccataactccgcaattccttaacagaatgttgcgttggcttcgtcttcatttcaccagctgcccgtaaatatgggatcaatgtggtatggatatagaaaacattgtcggaacctaaatcactcttcatttgccgtagcgcttcaataaatggcaaggattcgatatcaccgaccgtcccaccgatttcagtaatcacgatatcggaatccgtcgtcgtacccgcacgcatgattttttccttgatagcgttcgtgatatgcggaatcacttgcactgtggcgcctaaataatcgccccgccgttccttttgcagaacttctgaataaatcttaccggtggtaacatttgaatatttattaaggttaatgtcgataaaccgttcataatgtccaaggtctaagtcagtttcggtcccatcatcggtcacgaagacttcaccgtgttgataaggactcatcgtaccaggatcaacgttgatatagggatcaaacttttgaatcgtgacctttaagccccggttcttcaataaacgccctagcgaagcagcgacgatacctttaccaatggatgacacaacgccaccagttacaaaaatatatttggtcatgtgataactccttaaagatttatttcgtggggtggtataaataaagaaagctccctatttcagcagaaatagggagctaatacgatcgtttgtctcaggtatttctaccagagagcccaaataagataatacaaggagattcccttttcgtcaaggaaaaatcttgaaaagcttatttcgattcgtcgtcttcgtcatcgtagtcgtcatcatcatcgtcatcatttaactctgataattgaccctcgataccgtctggcaacgtttcatcagcaacatcgtcgtctgtgtcatcaacacccgcaagttcatcgtacttgctgcttgctgaatcatcagtatcgtcgtcctgatcatcatcgtcatcgtagttatcgtcatcttcgggatcatcgtcatcgtaatcgatcacgtcgtcatcatccccggcatcggccaagaaggcgttaaccttcttacgcttcttgcgctttggccgatcctcatcttcgtcatcgtccgtatgaataacggcttcgtcaatggattcaaatgggtaccatgcacgcaggccccacatattgtcaccgagcgaaatgaaactaccatcgatattaagatcggtataaaattgtgataaacgctcccgaatttcttcgtcgcttttacctaaatatgattgcacagcgttggtcaagtcggcaaaagccatcacatcaccatgttgtgataagatcgcgtgagcaacctcgattaaagataattcggactttttttgtccatcaaattgttttagttccaaactggtgcacgtcctttccacagtttatagtacataataccaaattaggccgtgaattgcaatcgcaacttgtagttaccaagtagctgctcacccgcgtataaatcgtaatcaacgttcacctcacctgaaaatggccgttcacgtagccgtactcgtaacatcggcgtcaccgtttcaacaggtagcatccccataggcgtttgataatgagcacgcacccgtttaccattggaaaagtgcaaccgaagtcggttctccgcactccgcgtcaacacgacgtccccattagctgccagcttaatcgtcactggaatcggttctggcgcatcatcgttaacttccttataccgtaaataaaacgcgtcacccatctgaaccaattgaccatcgacatccagtgcatagttcgccgtatcgtcatcttgccgcgcctgcgtctctaaatgaatcgccactggcacaccagttgttaaatcatccatatttggacctcctaatatttcaaaatcacacgctgaacgcccgtctacgatcaccgtgttaccacactcgctatatccttttcagcgttcacgaccgcgcgactcccatcacgcccatcgtaaaacttcctgtttaattataagccattcatgccaaaataactaaaaataggactaaaagcggtcagcttagatctgctggaaaaagttcgaacccgcgtaaactttttgagtcggctgtgttccaacaattgtcccccagccccggaggtcgaaataggccgcacgttgctgacgaacaaaaagccaactaacttgcacgtttcattatcctatgatggtatgctacagattaagttgatttgtctaagccaatgcaacggtaccatttttctagtataattagtgatgatacggacaacggtggcggtttcatcatgagacatccctcgtgcccgataacaacggataacggggtggctttcttgacggaatcaacaattgcaactttgagtcaaaaatacgaaccggcagcgatgctggatagttttgcgtacacgaacgccctgctgtggttaacggcggctcgtcagcaaccaatcgttcatttctggcagttacagccaaccgtcattctcggcctattagaccaacgcttgccacggctaactgctggcttagcacatctacacgctgccggttatcaggtcatgctccgtaattcaggtgggctagccgtagttgctgaccctggtgtactaaacgtctccttatttcttccagcaactcgtgaacgctattcaattacagcggcatatcaattgatggtcgactacgttcaggcagtttggccacaattaaatatcacgactggtgagattacacgctcctattgtcctggtgattatgatttgagtattgccggtcgtaaaattgccggaatgtcgcaacggcgcactgccgaagcgctggtcatcatgctgtatgtcagcgttgatggcgatcagatggcccgtagtcaactcattcagcgtttttaccaagtcagcttagccggtcaccatgacgcgcggtttccagatgttgatccacaagtcatgacgaccgttgctgacgctttggcagcgccgactgacactaccgctacacaagctcgttttatagccatcctagctcaacatgggacggtcgacacaacaagtttgccgttagtcaccgaagaacctgaatttcaagcacacttaaatcaagcctatcaacaaatgcaacgccgacaacaacgcttgcatcactgaaagaaggaattaatttggcctatcgccagcaactattacccatggagaaagtctttcgtgacccggtccatgattacatttatatccaacatcaagtcattctcgatttgatcaacacctcggaatttcaacgactgcgccgtattaagcaactcggtacgacctcgctgaccttccacggtgcagaacactcccgctttggacattgcctcggtgtttatgagattacacgccgtatttgcgataacttcgaacgtaactacccgacccaggcccctggtgacggtggttgggatgatcacgagcgattggtcgcactatgcgccgccctgttacacgatatcggtcacgggccatactcacacacattcgagcacatctttcacaccgaccatgaagccctaactgttcagattttgacatcacctgaaaccgaggtcaatcaggtcttacagcaagtctcgcctgacttcccggcccaagttgcggccgtcattcaaaaaacgtacccgaatccccaagtcgtccagatgatttctagtcaaatcgatgccgatcggatggactacctactgcgagattcgtacttcacgggtacgaattacggcaattttgatttgacccgtattttgcgcgttatgaagccgtatcaaggcggcattacatttgcgatggaaggcatgcacgcggtcgaagattacattgtcagtcgcttccagatgtacatgcaagtctatttccatccagtatcacgttccatggaagtcatcctagatcgcctactggaacgggctaacgatctttatcaaagccacgcggtcgacgctgaagccacaccagtgatgttattgccgtttttcaataataactttacgttacacgattatttacggttagacgatggcgtcttaaacacttattttagccattggcgtgatagccgtgatcaaattctcgctgacctagcaacccgtttcttagaccggcgtcccttaaaatcagcacgagtcgatgcaacgactcaaccgctaattccaacgttacaaaaattaattgaacaagccggctttgatacgcactactacactgacatcaacgacagttacgatctcccttacgacgcctacgatcctaagatgaagaagccgcgtacccagattgaactgcaacaaaaagacggttccttactagaactatccaccgtcagtgacctagtgcgagccatcaccgggaaagtctctggcgatcagcggtttttctttccaaaagaaatgctcagcaaaaacgccgaaaacgatttattcaaaccaatttaccaagaattccagcaatatattttaaacgatcgtctggtcgtaccacactaattttggaggaattattattatgtcagtcaagcttatcgccatcgatatggacggcaccttactcaatgagcacagcgaactaaatcccgcaaccgttcaagcgattaacgccgctaacgcgcaaggaatcaaagtcgtcatttgtacgggacggccattaagtggcgtcacgccctttttaaagcaacttggaatcgctggtgaagataattacgtcattacttttaatggctcaatggttcagacaatcaccggtaagatcatcacaggacttaccctgtcacatgacgattacatcgacattgaaacgctcagccgaaaactcaatatccattgtcacgttgaaagtgaagaccatatctacaccgccaatcgaaatatcagcccttatacggtcggcgaaagtgcactcgtcaatatgccgattcggttccggacaccggaagaaatgcgcccagacttaccaatcgtcaagtgcatgttcatcgatcacggcccactactggatgcagccatcaagcaattaccagcgtcattctccaagcgctttaccattgttcgctcagaagcgtatttcctagaattcatgaatcccgccgctagcaagggtaacgccctagccacgttgaccgaccatctgaacttaactgctgatgaagtcatggcgattggtgatcaaggtaacgatttgagtatgctgcgttacgcaaccaacagtgttgcgatgggtaacgccattgatgaggccaagcaaattgcccgttatgaaaccaagactaacgttgaagacggggtcgcacacgccattaacacttgggcactcgcctaagctactatttttcaaactaattcaagcaacgctaatggctcgtttttaacgtgccgtgagcgttgcttttttatcactgttatgaccgctacccagcgttttctaaacaatccagtcaagcaaaaaagtgacgatcagtcattacctgatcgtcactttttaatgctggttattcgaaactaccagttgcactattttccttagtaacactaccactatccggataataacgataagtatccgttactgtcttggaagcagaagaactagactcattcgtcgcatagattgcggtaatctgataataagcactggtctccttagtaatattaaattcggtatccgaagtaaacgtaacaccggacgcatcctgaaactgtttgatgatcgccgaagttgtcagctctgaagaactactgctggcagacgtgctgctattcgacgaacttgtcatcgttgaactatcggcactagtactactcgtactgctggcagacgtcctactatcactcgcactagccgcagaactcgaactgacaaccgttgagctatcactaccagaactagttgattgcgacgcctcataattcataatggcttgtttcattgccaaagcttttttctgtaattttttgataaccggatgtgtggcttgcacatcgtccaacttatcaatattggccttcgcagtggccaaatcatgaatacttaattcatcacgggcagcgttatagtaaccattggctagcttgaccgcctggtactgcttgacgagcttttgccgagcagcaataaaactggcgtcagtcgtgccatcataactacttaacgtgtcaaaataaccctttgctagactgagctgattattatcaagtgcttcttcagcttcctgataatactttaacccaagggctaactttttgatcgctggagttaattcagaagcacccgctaaagtcttctgggcagcggcaattttttgttgcgaaatttgctgatcagctttggttaaaacggccgttgtactgttaccagttgcggtcgttgccgaacttgcggttacgcctccggtatttttggcacagcctgaaagtgtaatcaatccgagtaggacgattacaatcagtggccaagatgatcgataggcatgatccacggcaaacccctcctttttatcattctccattataccattaatcgcaatgtcatttttttcaaagctctgagtagcggctttgttaaattaacctaactaacgctgcgacataataagccgctaaaccaagtaccaccactaagttggcccagcgatacatcacaattaaggccaagtattcccgaaacatagcaaacggtaaataatacagtggcgtgtgcgcaccgattcccgttaggttcaggtgcagttgccgagcaaaaatattagcccgtaaaacgtgatagccactcgtgacaatcacggcgcgataaaacggttgttgccgcacaattaatgcgtgcgaaaattttagattttcaattgtcgacgttgaccgattttcttcttgaatggcatcacgggggaccccttgatccactaagtactgccgcattgcggtactctccgccataacctcatccggtccctgaccaccagaaacaacgatcgtgattggttgatgataacgcgcccgttgcacccgatagtacttcgctgccgcctgaagccgatatgccagtgttcgcgttggctgcccatttggcatcaaccctgctcctaagacgatcatataatcgatctgtcgatgacgtcctagtcgggtcatgacgcaagctaatagatacgcgataaagctgaacgcaaaatacgccgtcaataataacgctaggcctaataactgccacaagcgtcgcgaatgccaaactcctaagttgattactgataagaccagcattatgactaatacaccaccgacgattgctagcaagctgtaatgaaacgcccagccctccttgcgaatcaatcggtaactatacctgacaaaactaatgcccacaatcaaaattacaattggcaacaacgtataagccaaaatttttgcaccgaccaacatgaattgccaagtaggacttgcctgcgcactgaatcgatggtaagcgcttaacaaaatgccaatgactgcaatcaaaaaaagatgtcccgttaaccaatgccgccggtccgtcaattgcaaggtcaacgcactagcaagggccaaactaccccaataaaacggtgtcatcgcaacacccccttaacttatattgtaatcattttaaggattcgtgctagtgtttattggataaaaaaaggacgccggtagcccgacgttggtccgttatccgttccgcgccatcacctaattaatgttgaagcacgccaaaacgaaagattcgttgatatacggcgtccagtccaaccttgactaggtcataatgcccaccaaacaacacctttactctatcacttttagaaattactgcaacttaaaaagcgtcaaatcagcaattgccaatttgacgcttcgtcaattaattttcttcgttatggaaacgattcttaaataatggactaactggtttattttcatggataaacttgattgcttgacccattaattgaccaactgaaacttgttcgatcttatcgattcgcttagcagctggtaattcaattgaatccgtcacaactaatttcttaattggtgacttttcaatccgttcgatggcaggaccagacagaactggatgcgtacaactggcgtaaacttcagttgcgcccgcatcaaccagtgcctgtgcacctaaagtaatcgtcccagccgtatcgatcatatcatcgatcatgatggcccgcttacccttgacatcaccgataatattcataacttcggcaacgttggcccgtggtcgacgcttatcaataatcgcgattggtgccttcaagaattcagctaatttacgtgcccgagtcacaccaccatggtcaggtgaaacaaccacagcattttcatccaagtggtggttcaggaagtagtcagctaacagtggcgcacccatcaagtgatccaacggaatatcgaagaagccttgaatttgggcagcatgaagatcgagtgccaaaatccgtgttgcaccggctgtttccagcatgtttgcaactaacttagcggtaattggttcgcgagaacgtgctttccgatcttgacgcgcatatccgtaataaggaataaccacgttaatggtcttagcactcgcgcgacgtagggcgtcaatcatgatcaatagttccatcaaattgtcattaacgggagcggaagttgattgaatgatataaacttgatcaccacgaatactttcctcaatgttaatgcgaatttcgccatcactaaagcgatcgaccgaagtcttacccaacttaaccccaacggcgtccgcgattttttctgccaatggtttatttgaattcaaagcaaagatttttaactttggatcaaaatactgttctgacataatttcctccattcgaaaatttattacttactaaataataggcattttgctagtgaaaatcaagtcccaacaacaaggcaaaattgcgtgagactgggctggaagcacgactttcggcaatctaagccccttcgtgattaaagattaaagtttcgtgagccccgattaccgaacaatcttagttaatgagaccgctatcagttgtaattggtactgacacacgcattgcactagttattgtcttagttggtacttgaccgctgccgtttctcgcgttcaaaagtagccagtactagaagtcggaatagagcgcacaccggctgacgaacaggaatctactagactgttcagttatctaaacacactcagtggtgctgatttaaataagtcacgacatcgcgccccaagcgattcatcccttgatattgttggtactgcttgccattctgggccatgacgacaatgctataagtgccttgtttggtcttaaaaatggccgcatcgttttggacacccttatcgggatattcgccagttttattatagaccgtggcgtgtttaactaagtatggtagcttgctgtggttgcgacagcccttaagtaaggtcagcatcttcttatcatacgtcttacctaataacttatgttgatatgtcagcgttaaaaaacgagttagatcagccaccgacgtgtaattatcgcgtccccagcgtagcgcgttcgtatcaagcatataccgttgtaaaaccgtctgcttgaatcgataatgcttaatggccgcattaacgctcctgaagccccccgcacgtttgattaaccggttagccgcgttattatcggaattatgaatcattaatttaaaatcattttgatcttgctgtgttagccgtaactttcgttgttggacccgtcgataaatcgtcagcataacataaactttgatcgtactagcagaacgttgacgagtcatgcgctgatttcccgtttgcacggttagttttcgtcgacctaatcgggtcaccttgaccgaccagcgcccacctagtgatttcaaatcacgttgcgcgatctttttaacggctgtttgctcacttttaacgctagttgcgtgtactggtaatgcccagctccaaccgccaagcaatgccagaccacaaacaaggccgcgaatccacttcttcgtctgcatctaaatgcctccaaacttccccgtcccgtaaactcctcgccaattataccaatttcgtgacttaattaaaatcactcagttgccctgaactgacacagtcaaatcaactttgtcctatttagcagctaaatagcccttattacaccacaagtcacgccgatgagctaacaaaaagagaccatcccagcaacaacgcacttggatggtctctgaattcaattatcaatgataataattacatgttttctggttcatgtggtaagcggccccagaagtcaggcttgttcgtctgacgtgcccgggcaattgccatatcatggaagttaacatcatcagtaatggtcgaaccagccgcgataaacgagtggtcagccacttcaactggcgcaatgatgttcgagttactaccaataaaggcggaatcgccgacattcgtgtggtgcttgttgactccgtcatagttaacgaagaccacaccacaaccaacgttaatatcttgacctaacgttgcgtcaccaacataagtcaaatggccgaccttggtccgattaccgatcttagccttcttgacttcgacaaagttaccaagatggacgtgttcaccaatctcagcttgcggccgcaaatggctatacgggccaatattgctgtcagcgtgcatgatggaatcttccaagaaggaagccgtcacccgaacacgatcttcaatcaccatgtcatggatctcggagtgcgcgccgatgaagcaatcttcaccaattgtcgtatggcccttgatcaagacgcctggttcaataatcgtatcagcaccaatcttaacgcccgcttcaatataggtatcgtcagggttgataattgaaaccccattttccatatgctgcgcgttgatccgttgttgcatcactttggttgcttgggctagagctgcacgggtatttacccccattgattcatcaaaatcatccatttgataggcggcgaccacatcaccctgattcttcatgatctgaatcacgtcagtcaaataatattcgccctgtgcattatcgttggtcacttcatgtaaggcggcaaacaacttctgattatcgaagcagtagactcccgtgttaatttcatgaatttcttgttcttccttagtcgcatccttttgttctacaatcttttcaacgatgcctaaccgattgcgaacaacccggccgtagccttgaggattaggtgccttggacgttaaaatcgtgccagcagcacccttagcttgatgatattcaaatagttcttcaaaagtttcagctttaaataagggtgtgtcgccactgacgatcagcgtcatcccatccgcatcttttaagagcgattcggcttgtaatactgcgtgaccggttcctaattgttccgtttgaaccgcgtactcagttcggtcgcctaaggctgcttccacatctttggcaccgtggcctacaatggtcacgatatttgccatgtgggtggcttcaacttgggtcaagacgtggtcgaccatagatttgccacagacctgatgtaatactttgactagcttggatttcatccgggtccctttaccagcggccatgatgattgcatttttggttgtcattacaaattactccttagtcctcagataagtccatcatatcaaaaaactggtctggataacacaccaggctagacttccgcaccgaaaaccttctccaaatagttaccagcaacgactttaatcgccttgtcactatcactcacgttggttactcgtaataacgacgtgtagtcatcgattaaacgattgccaacaaaactggcttcggcaaaaacggtgatgccaattaaattagcatcaaattcttcaatcaaggtcttcatcccgttgattgtgccgccgcccttcatgaaatcatccacgatgagcacgttggcgccttccgttaggcttcgcttggaaagttccatcttcttgatccgttctgaagaacccgagacatagttcacactaacggtcgagccttccgtaattttagaatcattgcggacaatcacaaacggcacgtttaaataagtcgcaacactttgggcaatcggaattcctttagttgcaacggtcataacagcgtcgattttttgattcaagtactgagtcgcaatcacccgacccacttggcgcaaaatatctggttggcctaaaatatcagataaataaacatagccacccggtaacacccgactcttgtcggcaaccttagtggtcatctcgtcaataaattcttgggcctcttcctttaaaatataaggaataaaccgtgcaccaccagcagcaccgggaatggtttccaagattcctgttccccgggcctgaaacactttcttcaaaatcgttaaatcttcactgattgacgactttgcggatgcgtaccgttccgcgaagtatgtcaatgaaactaatgtatggggacgttccaacaaatagcgcgtcatatctattaaacgttcgcttctacgtactttcataacttccacctcaacctaaatcatcatttttaaagtctatgcaaaatgataacacaaacgttcggaaataagctaattttttcacatttttttactaaaccatcggaatttcttaatatgtttgccaattatcttgtctgtacagctcatatttggcgaattcgagaacaataaacttaggcaacttataacggagtagatacggaatgtgccaggggaatccatcgttcacacgacgtagcgtccagaaagttcgattgattggtcgctacttacacctaaaaagcccagaacgagtaattttggaatcgttctgagctttcaagcaatttattttattggcttctgcttattgaatcgttgtcgtccccaaacaataggatatagacaacagtaattaccaaattaccgactaaacttttctataaaataaccgatactcggcaattagtccttgtcgaatatcggttatcttaatctgactaattcatgttacttattggcccggtgcttacccccaacaaataagccatagtaaatcaaactgaataacaagctaccgagtaatgacgatactagcccatgtgtcgtagtttgtgtcatcacagctaagattgctcgaacagcaaagtaagctactggaataatagggccaacaaaattagattgattcctttttcccagtaaataactccagtatcctaatcccagcgtaattcctataattactactccaataattataatcgttgccatttttcaacctgcaatcattttttgccgttttcatactcttttacaatatctaaaaaatcagtcctctcgttggtttctcgtgcataatctataatggatttcccaaatggatcacgcaaacgataatctgagcccgcctttaatagataaaaatataactcttcattttccttagtatccaaatcattatcaaaaaccgcataaaacagtggtacatgtccatacttatcaacgctatttacatcgatgccgttctcgactaatagtttcgtaatttccatagcaaacttaggatttggacgccatacacaattgtaaaaataatgtaatgcgtttcgatgttcactcttggtgacaaagttaacatcaatacctgcttgtaacaaaaaatgaacaatctttaacttttcctcaggattgtcatcgtttgtcattgccatgcataataaattaagtccttcaaacttatcagtctcatccacattgccagaataataatttttaaactgatcaaatgttccatctcttaccgcactaaaagcattgtaaactagcacactttttacctcgtttcatatttatgactccgattagcagacggagtttctaatctagagtttttgggattaaattgaaaatccttcaatgtcatcttcctatttttatatagattgaacatttccttataagacttacccggtagatgtccgagatcgacctttccttttcggggttagcccggcttccaatgtatcacttgtttcgtatttcgatcaataagcactccatctttagcttgcctattatatacttcctgctcgaattcgagttttttcttcccggttaatgttggtcgtccataaggttttccgttcctaatataagagccattttccaatgggacattatttgtctttttatctttcccatcttttgaagatttttccttgctagatttctcctttttcccatgactatctttattctgcgaggattgttttctctgagaagcttttcttgccttgcccgcaacttttttcttattgtagcgcttctgttgtgcttcttggtcttgtgttttgtcgcatgagaagtcttttggggcttagacttttgatgtcccatgcttggtctttgtagttttgtgagacttcgtggctgctttcttggtcgtcttcctagccggcttacgtttggccaattcctcagccgcacgcttcattgcctgcttagttgcccgaccggcacaaagttcaaggctgtccaaaacgcacccttcaaacgagaacgcttcttaccagtagcgcatctttccccgtaataatggtataaatatcattatacccaatcatatccgtcaaaaacgaaatgatacctttactgattcccgtcctacgactaagtgtggcaattacagcgctacccttggacttatgcttttagaaaacttcttgtgtgacttgcccccccacgcaaacgaaaagttgcaaccccaacacgaacaaaaaactagccgctctagaattcccaatgaattccagaaacgactagtaacattttagcgtgtcacaacgaaccacttaattctgtaaactacctacttttaacgtgatacagctgaacaagaatagccccactagcttccgacccgaagtcgctgataacccagcgcggcaaagtagaagatacactcgattgcagcgatgaagaaactgactggtaaattcgtgacgtaactcaagtacagccccagccaaaccccaatcaacgcgaaaccaatcgctagaaaaatcatcttgctaaccgtatggacaaagtatcgcgctgccgctgctggtaacgtgagtaagataaagatcagtaatgaccccacaatttgggcagccacgctgacgctcatcgcaacgagtaccaagaagaccactgagatgccggtcgtccataagccgctcacccgggcgccaatcgcatcgaaggaatcaaatttgagtggccggtacaagcccaacatcacgagtaggacgatggccgataagattgcgacccggatgacatccgcactggcaatcccaatcacactcccaaacaggatgctcgtcgcataactcgaagtttgattagataacgacaggaatagaatccctaagccgataaacagagcggaaattgcagaaatcgaggcttcgcgtcgtgattgtttcacactcatctgccccacgatgaccgaactaatcacggtaaaaatcagcatcccactcaacgcggtccagcccataaaaatcccgaaggctgcaccggaaaacccaatttcagacagtgtgtgtgtcagaaatgagaggttccgggcaatcacgaaaacgccaatcgtcccacaaataattgcaataaaggttcctgctaagtaggcatttcgcataaatactaagctaaacattgacattagtggcctcctttaattgctctaccgacatatcagcgatattgccaaattgctggtggccgggctttaaggccagataatgtttggcgtattgcttcgctaatggcaagtcgtgcgtcacaaagaagacggtaatgttgctagtttggtttaagttctgaacgaggtccaacaattcatacttcatttcattgtccaaactagccgtcgattcgtctaaaattaatagctgcggttgttgcacaattgcttgtgctaagtaagcccgctgcttttcaccaccagaagccatcccaagcggtcgctgacggagtttcttcaaattggtcacggctaatgctgtcgctacctgacgatgttcagctcgagacagccacggctgccacccttttaggttcagcccgacaaagtcctcaatcgttaacggatactcctggtctaagttgcgaaattggggcacgtagccaattttaatggcttttttattcggataatacttaatttgaccggctgttggcttcagcatgccaagcaaggcgcgaattaaagtggttttccccaccccattctcaccaatcacggtcaaaaagtcaccttgttcaatgttaaaattcaaatctttaaacacctggttgtttggaaagccaattccaaggtgttggacggcaattaacggttccgtcataacactaccccaactttctaaattaaagtaaatcgtaatgattactattttagtttacctgaatgcggtgatttgtcaatacctgagttcaaaatgccgtaatcattaccagctgcggcaatcatcggggcctaatcaaataacaccttgaccactagttgaatgcgcttatcactaagacgagattgcaaaaaaaagaccgtttttaccattaagccggtaaaacacggtcaattcatgtttatcattactttaatttaaggtgcttaagccaaccccgcctgctcatgcaagaattcatccaacacttcttgatagcgatccgggtgcgttcggatggcttcaacgtgaccagcatcggggtcgatatacaggcccttttgttgtggtaactggtcgtacaaggtatgtgcattgcggacaggcaccgtctgatccttggaaccatgaatcatcaagatcggtaacccaccatcaatcacccgttgcagaatccggccatccttaaacccatagcccgcgcgaacgtgtgctaagcgattcgccaccggcataatcggataggctggcaagtggaacttatgagtcagtctgaacttcgcttcatcataaagatccgcataaccgctatcctccacaatagctttaacattctccggtaacggctcaccactagtcgccatgaccgtggcggcccccatcgaaattcccatcaatacgatgtcaatatccagacctaattgactaagcgccatcgtaatccaacgttcataatctagtcggtctagccaaccataaccaatcgtatggccttgactatcaccaaatgaccgggcatcaggcattaaaacgtcataccccaagctcataaagatgcgcgcatacggaatcatttgttcgcgcgaatgtcctagaccatgcgccaaaatcgccaagcggccaattgttttcggattagggatatatgttgccactaagttcagcccatcaaaggactggatcatccactgctgtttaggctgcttgaaataccaaaaattctcaatttcagtgttttctgcccgcgaacgttcgcggccctgctgcttctgtgcgtcactcacgtgcatcgcgacttgatacgccgctaagccaccaagtaacgttcccgcataagttgcagcaccaatgacgcccgccaatttcaatccaaattttgtcgactgcttcatccgaacacctccgttactccttatttaatcataaacgcgcataaattgcttacaaaaagagattgcgttgtccgaataaccgatgatgcgttgaaggcaacgaccatcttcgtgtgtcaacctgcaagcaaagccgcggctactcgcattccggtgccaattgcactgctacaccatctctggctggacacaggtcgtgatgacaaatggctcagcgctaccgtttaagcgtagcagtaaattagagactcggctcacctaaccccgtaccaataaaaaaagcccaccatcacggcggactactacggtctaatgttcatttaaattaactggccgcacaaggtatacttcccgacaaaaacccttcaaggaattatacacgcgttgcgcccgcgattgtttgcgacacacaccgaacacagttggtccggtgccgctcatctgggccgcatccgccccaaacgttaacaattgccgcttgatctgtaaaatctcggggtagcgttttgccgtgattggctctaaaacgttgcccatattcgcaaaaatctccgcgaaatcctgctgttgaataccagccaacaaggcctcaatattgggatgctggtcgatgcgctcgtaattgacctgccgcaaaatatttggcgttgacacactgactttcggcttcgcgagaataatccacatcggcggcaacttaggcagtggggtaaccacatcgccttttcccgtcacgtgggccgtctgactatagacacagtatggcacatccgaatctacttgcaatcccaaacgtgctaacgtggctaagtccaagtggagattccacatccggttcaagccccgtaaaacagcggcggcatcagatgagccgcctcctagaccagccgctaccggaatggcctttcttattttgatacggacaccccgatcaacatgacaataccgttttaaaacactcaccgcttgaaaagctaagttacggcgatcattcggcaaaaagccactatcggtgaccacttcgattcggttcgtatgcaatgattctaacatgacatagtcggccagatcgaccgacgtcatcaccatgtcccactctttatccccatttggatgttcaaataaggtatccagtcctaaattgattttggccggtgctttttcaacgatctgcacgcgtctcaccctcttccatgaccgcgattacccggggtcgctgacttactttgatacaattatactaatatcaaggcaaaataaaaagaccttgcttgggggtcttaatattgagaattcacgagacgcgaattaagcttcagttgtttcatcatcaaaagcgatttgaacgttctttgtcagaacatcagtataactgtaggagacccgttcaaatgcgttttcttgttgatctaaatccacaacgaacaccgaacgataagtttctttcaagataccgtggcgttcagttgttttcttacggccagcctgggcaacgaccttcatgcgttggccgatccgtgagtcaagtttatctttaattgcagctagtgaaattggcattgagaatcctcctcatgaaagacactatactagcttttcacaaaaaagtcaatattatatcacaaggttttctaatgtgcaaccattttataagcatagataacttaaagtaagtcagcctgatgtaacgcatccgtcaatgtaataaattcatcgaccgtcaaccgttcggcacgaatcttgggatcaatcgtcgcgatatcaagagcctgttgaatggccgtcttcgtctcaggttgtttaccaaataggctttgcaaattattccacagatttttccgacggtgcgcaaagcccgctttaacgaccttgaaaaaagctgcttcgtcaaatggcacgtgtgtccgcggtggcaatgccgtcaatttcacgattgcagaatcgacattcggtgacggcacgaaaaccgtccggggaacgaccatcgccatctcagcagccatccggtactgcacagcaatcgttaacgcaccatacgccttcgtacccggttcagctgccaaacggtcggcaacttccttttgcatcatcacaacaatattttcaaaagcaacgtcccccgccaaaatgttcatcagaataggcgttgtaatataatacggtaaattggcgacgagcttcaacggccgctcgttatctaaatgttcactgatcatcgcggctaagtcggccttcaaaatatcttggttaacgaccgttacattgtcataatcagctagtgtctcatccaaaattggcagtaaccgatcatcgatttcaaaggccaggacgtggtgcgcatcccgtgccaaatactcagtcaaggcgccgatcccagggccaatttcaatcacgtcatcattggttccaatgtcagcagtggcaacaatgttgtgtaacacgttctgatcagttaaaaaattctgtcctaaactcttcttaacttgtaacccgtacgtatgcataattgcccgtgtgcgggcgggattcgcaatatctaaatctctactcatcatttctcctctgtggttagttggtcaacagccgcccaaaaatcagctggctgaatttgaaatagttgtaaccgtttgggcagctgtttaccgttgacgtatccgatacctaaacgttcacccaactgttcgcgtcgttgacgcgccgtgggacccgctagtaagcccgccgcaatcaaatcatggtgactgatcaactgttggggctcgtcgatttgctccgtatatagatgggcgagtgcagtttggatcgccgctgggctcgcgtgttcaacgcccaggctccccccagccttagttggtacaccagctttgcggggcaaaaaggcgtgcttgacacccggaacagccgccgaaatcgtcttccgaatacgttcaccggaaaagtctgggtcggtgaacacgatcacgccgcgactggcctgcaacgttttgatctgggctaaggtggcttcggaaatcgccgagccattcgtttcaagtgtatctgcatcgacagctagggcgagacgcttcgtgtcatctttcccttcaaccacaattacttctttaatctttttcaatcttaaaaaattcctctgcattttgataagtttgggccgctataatttccggcgtcgtttcacgtaacttggcaattgcttcaacaacgtaccgcgtgtaaccgggttcgttctgctttccccggtatggttccggcgttagataaggggcatccgtttcaaccagcatttgcgttagtggcgtttgcttgacggattcatggacttcacgcgcattcttaaatgatgcgacaccactataggaaatatgcatacctaagtccaagaaccgtttgagccactcagggtcaccattaaagctatgcatgacgccacccgtgtcacgaatatcagctgctttcaagatcttataggtatcttcgaaagcatcacgattgtgcacggaaattggcaattgcatctctttagcaatggcgacttggcgggcaaagacttgccgctgaacgtcttgtggcgacgtatcccaatggtagtccagtccaatctcacctaacgcgacgactttcgggtgttggacttgttcaatcaacaacttttcagccgcctgatcatagtttttggcatcttccgggtgccaaccaacaatcgcgactaactgaggatacgtttccgccagtttaatcgcatcggcgttcagttgtgtattcgaaccaacgattgccatccgcgtaacatcaaggtcagccgcttgttgtaagtaacgtggcacttcctggatgaattcttcactatttaaatgggtatgagaatcaaaaatccgcatgtaataaccccttttcgacttttgttatcttagttgattttaccatgggacgcaagttttcggaaaagaagacgggccatccaacctatttcttgcaaactaataacgacatactagtcattagccataaaaagaggctgcactaggcaccctcttaactaactatattctaactagaatgattgacaaaaattcacagtacttttcttcaatctcagcccatgccaatcattgaattcacgagcactgccttatccaccaaataggacgatccagctaaccataacagtttcaaaaaccaggataatattcaacgttcgatacgctgataatcggtccagtttatattggaaaaatttccgaatactaatcagaataaataaaatatttccgattacctccattaccacgggggtcggaaaattttctaaaaaaacaatcatcacaaaaactaattgctcttctggtgaataatcctcagtcgcaaacttaaaccgactcttgggcgtggttttccgccatctaattattcgcaacaatccaaatgccattagagtaattattaattccggcacaacttggagcacagcactgcgggaatgaagcagacgaatgtaggcaacgccacacaagactaggtagattgctaataaccaataatcgatttttaacaattgctgctctgataaactgccatattttacttgaatacgttgtaataatcgattccagcgcttcatcaaatcacccttacaaaaactattatcgatgctgaatggagactatcaatttaaactttataaccgctgagaggacttcaaacaatctttattatgtattgtgactttttcgaagaataatttagtttaaagtcaatatctgcgctaacatttcatattttgacatcttccaaatttgagtatattcattaaaaccaataacccatctcaacgatattcaaaattactggttttaattttctcaattcaatagcgacacttttcagtaacaacacctcagtgttatggttactaacattcacctgctttaacacaaagtactcttttcaaaaattcatacattattctaatctttttcattcaatgcttaattccatcaactaacataaaacaataatagttaatagaatgttcaaaatcatcagataacgatacacgcaatgttcaattcaccacattaactattcgttcagtttaatgtagcacattaattattctaagcgagaaaaattcccagatatgggaaatcatcagcaaatccagttatttaggagtgtccagtttgtctaattcagcttcaatcggtgcaactgtcaagatggttcagcatgctaaaagactatcagtcaatgatgttactaacaatgaacgcattatctcaaagtcaacttactatcgcttcatcaacggtcacagcaacatctcggctgtttgctttttacagctactagagcggttagaacttacccttcaggaatttgacttcatcttacatcactatcaaattcccccggttgaacaattgctgcaacaaatccaaaacgcagtcgtcaaagaagatattggcgagctttggaaattaaagaagcaaattgacaagctatttaatgcaacgcatgctcatcgttatcaacagttactaacgctaacccacctggctttgcaccacctagaaacaccacaacaggcactggattcaacgttacgagcagcgattgacgggcttattcaagacctattgaatcttcaactgtggtccaaatatgatttgatgttatgtcgccaaatcttcaccactcttacgccagagcagcaaatcatcctattaacaagcgctaataaaagtttccacaaatatcaacggttgactgacgaagctttaaccttcatgacatttctagccaaccagctgttcgttgctgttcacgataaacagcccaagctaattactaaaatatatcctataatgacaacgatcaactttccctctgaccaactcggccagcattactactaaaattctgtcagggcattacggactacgtgactaagcccaaccagccattgaccgcctgtagtcaagcacttgatattgtgcactgtttacacatccaatactgggacacgatttttcaaaacgtcttactggacctaaaaacaatgccaatataaaaagcctgggtttccccaagctttcaagcaaaattaatgacgtacacgccgccaatacagtcccgcatacaccaccgtcatcacgacgaccacgcctaacatgtatacgggcaatgtcacgatactaccgtggtggagccaactcattaagtaagttagcacactcactagtagataataacccaggctaaaccagccactggcacttcccatcaccgtttcatagccaatcaaagcacgattcaacgcgtttggtagggtgatgttcagacctaagaaggctagaaaaatcccaatcagcatcccaatgacgtgattgccaacagcggtcatcaccaagccaactgccgctaccaaactcaatcctaagccacttaaagcgacctgcattggtgaccaatagttgacaagccaattcactagcaacgcgcccagcagactggccgcggctaagactaaaccgagactaccgtattgcacagcactaaagccgaagtgcgtttcaaaaataaacggcgcttcagcgtaataactaaacaaaataccattaataccactaatcaataggccgtaacaccagaccacgggatcgtgcaataaccgtgaaacgacaacgctttgttgccgccaagaggccactttgaccgtttctggtcgagtctctggcaagcaacaccccgcgtacaacagtattacgactgctatcatgatcaagaccgagaagacatgctgatagccgaacacagtctggacgccacctccgatgagtggcccgagagcgggtgatagtgccatggccgcactcaccttcgcaaagatttttgcaccagtaacacccgtaaagctctcacgcatgatagtctgtgtcacaaccgaaccagcactagcaccgaaagcttggatcaagcggcaaaccaataaccaagtaaagcccgggctcagatataaccctaagttaccaatcaaataaaaggctaatccacctaacatggcatcacggcgcccgcgatagtcagcatattgcccccagaagagcaccccaactgcaaaagccacaaaataactgctcatggttagctggctgtggctggcgctaacgtgcattgcctgactgagtgctggcaagatcggcgtaaaatttgattcactgatttgtggaaaacccactaatgtgattaatagtaataatgatggcacttgtttttggacgtttttcatttaattaagtctcctaaatttaattaattttcggaaaaacgtccttttccatctacggagacgcatacgagaatctgttcatacttcatatgttctcacctcatttcttgttcgtactactgtacgggagattaacccatttgtcaaaaacaactaaaataacaattgaattacaaataaaaaatcgagctcactagtcagtgcgcccgattttttactcaacatttagtttttacgaaatcaatgatccgtttaccatattatctggtaccgtaattaattgcacctgaccgtcgtgttctgctgacagtaacatgccttggctcatttcaccacgaagcttccgtggctttaagttaccaacgatgataaccttcttgccaatcagttcttccggttctggataccacttagcaatacctgaaaggatttggcgatgatcagcatctcctgcatctaaacggaattgtaggagtttgtcagcccctttcaatttctgcaccgtaatgacttcagcaactttcaattcgaccttgtcaaaatcatcaatggtaatcgctggtttagtgaggttcaaattagtctcagctgggttccagccttgttcgacttcagcttcatgtttcgcgttttccatggctttacgccccttctgtttgtcggatttcgtcatcttacccttcaagaattcaacttcggcatccatatcgacccgtgggaagattggggttcccttagcaacgacttgtgcgccagccggcaaatcagccagttgtaagtcggcaattgctaaagttgctgggtccaaccctaattgggtaaagatttccttaggtgcatgcgtcatgaccggactgatcaaactagcaatcacccgcaaactagctgctaaatgggccatcacactggctaacttatcagcatcattcgcatcgtcactcttagctaattgccaaggtgccgtttcatcaatatacttattcgtccgactgaccaacttccacacttcagccagcgcatctgataaatgcaggctgtccatgcaagcgttgaagttcttaatagtcgtggcagctgtggcttctaagtcagcgtcaaattcagtcacaccggctttgaatgctgataattgaccatcttcatatttattgatcatcgcaatggtccggttcagcaagtttcccaagtcattagccaagtcatagttaacccgcgccacaaagtcctctggtgtgaataaaccatcgttaccataaggcatggctttaactaaataataacgaagcgcatccaagccgtaatgttcaaccaatgtttcaggataaatcacgttacccttagacttggacattttgccgtccttcatcaataaccaaccatgaccaaagaccttcttaggtaatggtaacccgagtgcatgcaaaataattggccagtaaatcgtatggaagcgcacgatttctttaccaaccatttgaacatcggcaggccagaacttgttaaacaagtcttcggagtcgccggttgcgtaacccagtgccgtaatatagtttgtcagggcatcaatccacacgtaaacgacgtgcttaggatcactcttgacagggacaccccaagtaaagctcgtccgagaaacggccaagtcttccagacctggtttaataaaattattgatcatttcggtcatccgattagctggttcaataaagtcaggatgactttgataataatctaacaaccaatctgcgtacttactcatcttaaagaagtaggactgttctttaacaagttcgacttcatgaccactgggcgccttaccaccaataaccttgccgttatcatcacggaaaacttcagccagctgcgtttcagtgaagtattcttcgtcatcaacggagtaccagccttcgtactcacctaagtagatgtcaccatttttaagtaaccgatcgaaaatttcttggaccgcgcgttcatgataatcatcggtggtccgaataaacttgtcattagagatttctagcaattgccataaatccttgatttgttttgccatcccatcaacgtatgacttcggatcagtgttcaatttttctgctttttcttcaattttgaggccgtgttcatccgtcccggttaagaagtaaacatcgtaacccatcgcacgtttgtaacgtgctaaagtatcgcacgcaattgtcgtgtatgaattaccgatgtgcaacttccccgaaggatagtagatcggcgtcgtaatataataagttggttttgtttctgccatgacgtaaattcccttcaaactggtttatgattaactcgttaagcatgtctttgattaaaatccatgaacaaatcacacgcgtccaaacaacacgtcttggtctaaaataacatgttgctgggccaatgtgtagaatctcttatattgtatcatatttcctgtgtttattaagaaacactaacaaaagagttctccacacgcaaagatcgtggcagactagtcaactaccatgcttcaaatggcccaaccaaccaccacaaaataaccgattaaaatcacgagttgattttaaccggtcatttattggtaatctattattattcaacaacccacgaatatcgggccagcgcttcacgaacgacttccgcgatccggctatcgtccggccgacaccacttataatcataaacttccgagtcgactttgagcgcgccactccccgcaactaaaaaacaatttaactcgactatttttcccggttgattataggccgtaccacggtgggtgaaggcccacttaaaccgatctggcgacacaactaatgacaactcttcttttaattctcgctgcagagtctgtgttagcgtctctcccacaccgaccttgccaccaggaaaataataagctgtgttttttgattcccgtgttaataagacttttccatcagcgcagaaaaccccatttgcgcaaataatatccggttgcatacccaatccgccccaatctatattgttatgacctaacattcgattctcaacaacacttcaacctgccataactatctgcaactcacataatggcaggcaactacttagttgcttgaactgaagtcagtgtatcttaatcacgcacttttctcaatcaccctaattcacctaagaatcatgaattaaggtacttataactgcctagttttaaggcagtcccaagccatcgtatccacgaccaacgagataattattaccaaaactaaacaggaatttacataaactacttcttgactttacactaactttacttccaaatgatgtatcccaaccgttcgctttcaaatcagatggctaaggccatattgattaactaaggtgtaagtgcaaaaaaatgtagcggcagctcacattattgaatgtccgaactaccgctacatttttagttgtcatgattcatcaattaaagaatattcaaccgtactaccaaatttcaacggttcacggtcatagtgactgtattgatccaacatagtaattcaactgataactcgttcaattaagcaaagtatcacatcaatcactcataaatcattttaaaacaagtccagttgatgcggtcctaaatcaccaaacgaaacgcctagcaactctttgagtgccatcgcgttatcggccgcgtcaccaccagaattattattaaagatgacgcaaacctcgtccgcctgctgttgtaactgttccaccgtttgcttgaattcagctagttcttgatcactataccgatataaagtccgttggctacgccagttagcgcccttggctgaccagccctgctggttacgaccatgtaagcgtaagagtgccaatttcgaattcgttacgaccggctcgaaactaacgccatcatttaaagcgtgcggctcatcgacaatcacatgggtaatccccagatccttcagaaaactaaagaccgcatctttgacactctcctcgtaccaactctggttacgaaattcgactgcgattggaacaccgggtaaccactcgaccatccgttgtaggtaatggaagttgcggttcgaccgttcaaaaaacggcggaaattggaagagcaccgcttttaattgctggtgctgcgttaacggtttgagcatcgcacggtattcccgataagctgtctttagcgcatccatcgaaaccccttcgtcataagtgtcatgcagcgtcatcacctgatttgctttcaaaataaactgaaacttatcagggacggccttttgccacttcgcgaccgtcgtcactttcggaataccatagaatggcgtgtccacttcgacgactggtaggactcccgaatattcagttaaggtcagcttttcagtaccacccagtaaactagggtgttccgtccaagttgttaagccaattgttatcatcagacctgcaccccctcgaagaagtcgaccgcatcttgttgcaccatcgtaaatgcaaatggcaactggagcggttccgcattgattgcaagcacttgagccttcggattacgatagtcaattaggccggcgaacgggtacacccgaaacgaggtcccacaaataacgactaggtcagcctgctgtaaatattgaactgcccgttcgatattggcactcgcaatcccctcgtcgtacaacaccacgttaggccgtaagtagccatggtctgtctgatggtaaggagacttcaaatactcatgccaatcgacatgctgaccacacttggtgcagtagacctgatagagattaccgtgaaattcaacgagctgagccgttttagccaccccatataaattatcaatattttgtgtaatcacactggcccgcccttgctgagtcagtgccgccatcttttgatgaatcacattcggttgggcgtctggataatataaatttgattgtaaatattgataaaattccagcggatgctccgccaaaaacgcgtggcttaaataatactccgcgttatggtgttcggtatacagtccatttttagaccggtaatcaggaattcccgagggcgtcgaaacgccggcccccgtcataaaaacgatatgctgagcttgttgtaaagttgtttgtgctgctgtaatgtcactcattctgacatctccctgcttagcttaccgtaacgtatagggtagattcatttcttggaataattctttgaccgtcttatcgtacacctctttgaaaaaggcatcgctcttcttttgcgccggtgctggtaggacaaacgcattctgacggtcactcttatataacccaatgtacgctcgggtatgtttatttttatctaatagatctgaatggtaaacgtcaaataactgccggacttccagccgctcttgccgttcactgagcacactctgaacggtcacaaattccgttccgtgtaggactggtaaatgccaagccgtcatctgatcatcaaaagccttaaacagctttactacggcacgccgcatcgcaaacggggtgtcaactggcttctgactgattacggcgtatagcttctgtgcagccggccaagcttgtggataggccgttgtcaccttttgcaaatcatcagctggtaattcaccattaaagaaaacgagtaggtcagtcaatgttaataaccgtaacgtcatcatcgcatccgccttgcccgcaggttccggttcgattgtggccgccacaccttgcatgtatagcgtttcaatttgctcatcgattaagttatgttcacgttgtttgcgtacgaccaagacgtggctcaccatgtcataaagttccatagcgattgccatcaattgttcgtccagttgttgatcacgcgtggttaaattaaaggtaatctgtggaaagccttgtaataacaataatagatgtaataattcatgtgacgctgtgtaattaggagccgtaatatcgctaacccgaacggtcaggtcaccatcatctaacacttgttgtgcttgatcatggcggacgtaacccgcttttgtgtcaccaaaacgaacactaatattgcccggatataacgaattggcggtacttaataaatctgtaacagtttggttcaatttaatttcagtcatcagtctcttcctttgtttgccgcaattccgcaatgagttgttgcgtggttgcgaggtcttgttgagatgctaattcaagtcgttgtaagataacggggagttcctcaggagtcgctcccgctgccatcgcgagcgatttcaactgtaggtgcatatggccctgctggataccagtcgtgaccaaggcgcgtaaagcggctagattttgggctaacccgatggcaaccataattctttccaaatcacccgctgtttgaatacctaatattcgttgattcaactgggctaactcgttaattttgattgaaccgcccacaatgccaaccggtagtggcaattccagttcaccgtgcagcatccgaccatcactggtccaggtactcatgccacgatattgaccgtccttaacagcataggcgtgtgccccactctccaaagcgcgccagtcgttgccactagcaatagcgacagcatcaataccgttcatgatacctttattatgagtcgtggcccggtacggatcaagctgagcgaccgtgctggccgacgcaatcttctgggcaactagtttgccggcataccgcccagcctgtaataatccgaccggaatgtcacaaatggccttgactaagctcgccgttgcataattcgatagaatactcattaaagcgtcctgcttcgtcatcacaccgatggactttgccacggcttccaacatactattgagcatattggcccccatagcagcctgcacatcaacgaataggtcaattgataaatagccttgtccgagaacacgcgtacgtaggcgccgagcgccaccacctcgtttttttaaactgggatgggccgcatcagctacttttaataatgctgcagcgtgggcttcaatcacggcagcggttgcagccggatcagacaactgctccagaacgatttgaccaatcatttcacgttgattaaggacggtcgtgaagccccctgcacgcttgacaattttagcgccattacttgctgccgcaataacagaaggttcctcagtaaccattggaacaatgtgatccacgccatcgacgactaagttgacagccaaccccatcggtaatgggtaatccgtcaaataattctcaataatttcatgatgttgtggtaaataatattgtttaaataacgcctgttcagctggcgttaaatgggcctgttgcgctacgatggcagtacgttccgcccaatttttttgataaaagtgccgaaaatcagctgtcatattctcattcctattctctccattcgactcatctaccgaaccgacctattgaattgaggtgttctgaaataattccctcacgaacaccactttcagaaaagatcacccgatcactatccaacatctgtaataacgtcactagcggtaacattccaccaacaataatgtccgcacgatcatattccattcctgaaatttcctggcgaccttttttcgaccgtgacagtaagtccaaaaacgtgtggaacaccgtctctgtcttcagacgatacccgtgaatatcttcaacttttaacttttgttgccggcgccgattaatgcgggctaaggttcggttggcaccacccaatagaatgattgggaagtgcactgcttctgataaccaccaaatatctgccagtcggttacgtaggaacatctgcgcccgaaatagactcgcagacggcactaagtcgtcgagaccgaattgttccgataatgtcaccgcgccaaatggaatgctgatcagttgctgtttgcggccatttttgaccaagatcagttcacaacttgcgccacccgtgtctaagattaggcaatcatggatgaccaatgaattggcaaccccaagataatcgtaataggcctcatcgtcaccagataagacccgtaaatcgagccccacttcttgcttgacttgattgagaaattcagcctgattttgtgccatccgaactgcagctgtggtgatgccaataacatccgtattgggcattttttcataaagtcggcgaaaattgagtaacgccttgattgttcgctcaattgcggcgggctggagtacgtgtgccgttcccattccttccgacaaacgcgtatcttccttaacacgcttgatttcttgagcagtgccgttagcgtgcaaccgactgaccgccatccgcgccgaattggaccctaaatccacaatcgctaagtttctcataacaccacgctcacttttcgtttataaaatattagttaggtttattctaacatttatgatgtaacactgtgacttctagggccggattgcacaccaaaaaatatcaaaaagcccaaaatgaacgacgctaatgttttgactagggccgttcattttgggttcattagactagctagttggcagtaacgaatgcttgtaacatggttttcttgataagatgacaacgttacaatcattgtaaatgatgttacaagcatccagattagcttggcgacaggcgaacaatcagtcctccaatgatttgaatacaattgtcatacccctttagatacaaaaacatcccaacattagcactcactgccgatatcgagatgtttctatataataagattgaagtttattaacgtattactgccttaatcaacctgtctgctgctgacactaactgtgattggtcacctgcattttggcttgataagccgctaaaattttgcgtacatcatccgttgacttggcatccatcatcgtgttacgcaggtcagtggcgcctagttctgggcgcgcatagattttaaagaaccgttttaaggacggaaaacgtggcacgtcataacgggtagcaaagtcatcgaacaagtcgagctgcatgttcagtaaacctaatagttcatgcaaatcatgcgattggggatgggactcaaatgcaaacggattcgcgaacactccccgaccaatcatgataccatctaatccaggatgtgctttggctaacgccaccccggcctgataatcagccacgtcaccattaatctggagtaacgtttccggggcgatcgcatcacgcattttaatcaagtcatcgataacttcaaagtgtgcgggtaccttactcatttcctgtttggtccgcaagtgaacggtcaagactgccacatgttgcgataacaacgttgcaatccagtcatgatattcagcaactttactgtaacctaagcgcgtcttcgcactaacggccagtcccgacgtctttgcagccgcaatcacgtcttcagcccactgcggattgcgaatcaaatcgctgccaccatgatttttgatgaccgtcccatccgggcagcccatattgatatcaactgcttcaaagccccggtcacgaagttcagctgtagccgaagcaaagtcagccgcttcgttaccccacagttgaacgaccggtttttgcgactcagctgccgccacgtacaaccgaccatgcaccggaaacttcgtattcgggttcgtaatactcttagcatagacgaattcactaaaaaacgtatctggagcagcggcatggctaatgacttgccgaaaaacagtattactaacggcttccatcggggccatcgtaaaaaatggtcgcccgtctgccttggcttgggccgcaatttgcgaccagaatggtgttgctgtcacgttctcatactcccttatcactagtttaacttttggattgaatgcttttaattttagcattgatatgcctgctttgcaggaatgacgtttgctggccgttcgtccgctcccaagcatcgcttaaccaaccgataaacgcgaactttgccacgattggttggcgtcgcgaacatcacgcctagtcacactattggtgaacactgtgactaagcgctattttaagcaacatgctatacttcattagcattaacaacatcgttaataacttgtagtgtctgatctaatatttgcttatcgacagcgccaacctgacgcatatcccgacggacgtaatcaaacgtgtgaaattggagtggattgatatagccgtcgactttcggtgttttgattttgatcaacaaccccaaagccgtcatccggttattggcagtatgggtaatgggacaaactagcgctagctttgttaatcgcgcatacttttgattactaacaactaatgctgggcgatacttttggatttcgcgcccagcactcggattaaaattgattaaaacgatgtcacccttacgtggaatatactgattagtcccattcactatcgacgtcctccatgtccagggttatgtcagactgctctagttggtcattaaaccaatcaccctcgaacggattgcgatgtttcaatttgaataaaatcgaaccatcatctagctgctctgcttcaaactctgtgccattcgcaacattgaactttttaggaattgtcaatgtcgttgaattaccaaccacccgtgctttcattacgcatccctcccgtgtatcttgagtatacacgaagttacgctcgttgcaactgattagcttccatatcttgcctggacacaaaaaaggatttcgaaataacgaaatcctttttttcagttcagcaacttacttattgattataactagcagccatctgattcatcatcttcttaaagcggcgtttacggaaccatcctaggaatagcacgccaagcttattattggcattcgtcttcttatccttgcctaaaaaggtttcggcatattctaagacagtttggtgaccatcagtgtccggtacgaattgataatcgacgccgtaatgatcgtggggcgtttctaattcatacgcatatcgaacaccgggttgcgcgtgggtaatcttcaaattaccggtcagaccgttggaccactgtttggcatactcatagccttgtaagctccgccgtggcgccggccgacccgtttgctgctgaatatcagcccgcgcggaatcgatcaactgttggtataaataatccacaggggcgttcaaagttaatttaatctgcattctggtggctcctttctatctgacccactcgccgataaacgacgaaaagtgctgcgctgaccgctaaacctaatccgagcgtcacccattgaccggtcgttccggccaggggacttaagataacggctaataatccaaggttcatcccgatgagtaaacactgctttaagcttttcatgacaatctattctccaatcgctgctggtttaatcttgttggcagccttaacgaatggcacgtaaatcgcaaaggcaacggcggcattaaataattgtaagaccactgaccgccagtccattgtggcaactaaggcgttcataatcggtggcattgaccaaacgatattgttcgtaatcggtgcgacccacccagctgataaagcagcgtaggcgatcgaaacagtcacaactggtgctaaaacgaacggaataaagtagattgggtcaagtacaattggcatcccgaacatcacgggttcgttaatattaaagaatccggggccaatcgccaacttagccactgaacgttggtcgtctcgtttactaaacactaaaatcgctactaataatagtaaggtcgagccggccccaccaatccatgcatacaagtcaaaacagttccgcgtccaaacgtatggcaaggcttcgccagcttggtaagcgttaacattagcaagctgagccgtcaaccagattccgtccaagattggtgccaggacattggaaccatgaatcccgaagaaccagaaaacttgaactaacagcgtcattaagaggacggcgccgtacccttgactcatattcaatagtggttcttgaataatcttcgcgatccattcaatcaccgtggtgttgaatttactgaagatccagttaataatcccaacgacataaaatgcagcggcggctgggataaccccagtgaaggcgtttgcaactgccggtggcacagaatctggcatcttgattgtaatgtgtttcttcatcaaagcaatgtaaacggcacttgcaatggcccctaaaatcatgaccgtaaagaaaccatacgaaccaaagtacgtgttgaagttgaagtaaccccaagccgtcacttttttgccagcaaccgccatgccagagtccgtcaaaatcttagtagcgcccttgctcaacgtactcgtcaacgtgccggtaaagttttgtggcaaactcatgatgaaagttccaagtgtcacgatcccaccagtaactggttcaactttgtactggattgccaattgatacccaaatgtaaatgagaaaatcagacctaagatggctaacgtccccgtccaaaccatcgcattaattccaatcaaccactgcatcgaattaacaatgcccatccaaccgaacttcgttggaatatctcgaactaaagcgttcagaaccgtggcgatcgacccggccatcattgccggcataattgctataaacgcgtcacgtaatgcgatcaaccaccgaactgcaccaatcttggccgcaactggcactaagtgtttgttaagccattcgataaatgaattcataatatacccctcactcctaatgtaggttttcgctagttagtgacccaacacaactgttgcgtcacccccgtactagttttgtaaatcaatattttcggtatggtaatagagttccaaatctggatagacgaagaacgtcctggagaagttaaagaccgtcccattagccaagtaattgattgcttccaagcacaacgttttgtcaccatctgggcaaccgatcaactccgcccgttgcgcgtccacccgcacttgatggacgtagttttccgtggtgctccccgtaataccatatgcctctcgcaagaaggcgaagattgaatgctgcacgctctcactcgataagaacgggacgaccgttcgcggaaaataagactcttccaggtcatacaagatgtcattcaaataacgtaatcgcaccacccgataaacctcgtcaccaagcgcaatgttcccctgttgtgctaaagtttcatccgctgtcactttatcaaacgtgacaacttttgatactaatggtccaccctcaaccatggcggactggtcaaatccaatcgataagttgagcactttcttcgtgttctgcggttgtttgataataaaattgccgctcccctgcacgcgacgtaacaacccatgccggaagaccacatcaatcgctttacgaatcgtattgcgactggcgttgtactgcgccattaacactttttcggttggtaacttagtcggatattcatccgccattatcgatttaatgattgcctgcgcaattgcctgatacatgactaaacctcctttcgataaattagtaggtgcttgtaaaacttgtgcccacaaattatattatcacagaatacatgaaaacgctttatttttcgtaattttataccaatgaatttatattatgactaaaggcagccacagcaagcgctttcgaattccttaccaccccttttcttgccaaaaacttattttaacaagcacttttttacaatcattcatgtaagaaagcaaacgaaatcagcctaattttcaatttagtctgccttttctttttaattcgcaaccgtgatgcgttgggccatcgttattaatttaccggaaagccccatatattaagggtctacaaaaaagtgcaactcaccgtcttcacacatccgacggtcagttgcactattttctaccataatttatttaaaataattaattccaatggcgtcttgcatttcacgccacgtttggtcagcgaccacgttcgctttcgctgtaccatccttcaaaatttgtaagacttgagctggatcagcttcgtaaattgcacgccgttcgcggattggccgcaatacaccgtccaacacgtccatcaagtagcgtttaatcttaacgtcacccaagccaccatgttggtaggcggccttcaagtctgcgaccttggccttgtcttcatcaaaaatatcaagatacgtgaagaccacgttaccttcgaccttacccggatcttccatatgaatatgatcaggatcggtatacatggacatgactttcttcttcaaagtatcagcatcgtcagaaaggtaaattgcatttcctagtgatttactcattttggcattgccgtcaagtccagggattcggcccaagccctttggtgggaagtagccttcaggttcgaccaacgtatcagtttggtaagtcttattgaagctccgtacgatttcacgggtctgttcgagcattggttcttgatcgtcaccaacgggaacggtcgtcgccttgaaagccgtaatatcagcggcctgactgactggataaacaaagaaaccggcaggaacactttcaccaaaagctttttgcttgatttccgtcttcacggttgggttacgattcaagcgcgctaccgtcactaagttcaagtattgattcatcatgtcagttaatgctggaatttgagactggactaagatcgttgacttttggggatcgattcccactgccaagtagtccatcgcaacttgtaataaacttttacgaatcttttcgggatcatgcgcattatccgtcaacgcctggttatccgcaatcataatgtatgaatcatagtccccagaatcttgtaatgcgacccggttacgtaatgaaccgacatagtgcccgatatgcagcttaccagtggggcgatcacccgttaaaatcactttttttgtcattgtactcatcctttctattggcactaaaaaagcgcctgatcaactaatactagttaattaggacgcatcaccgtggtaccacctaaattgcagaaagcttgtctctgccactcattgaccgataagggtgggtccccggtgttcaccgaatctccaaaaagccaattcattagtccgccccagctttcagcacgtgctaggtctctgttattggacgccttactgttcttttcttcaacgattaattagttctagtgtactggttatacctgaccgtgtcaaaataaattctgggcatcattcgcgttaactagccgctaccatttcatcataccgaccgtcatttcgacgtttaagcccatcgaaattcaagcgggcgttccttcaacaccattaaaattcagttaagtgctcccagccccagtccccaatttacgcttcagtataattccgggcgccggtcttcaaacactggaatctgaccacgaacctggtcaacttgtgttaaatcaagctcggccgtaatcaactgggcatgggcaccaccgatagccacaatttggccgagcgggtcaataactagtgactgaccaccaaattgattatcaggatcactgccaacgcggttaaccgcaaccacgaatgcttgattttcaatcgcacgtgcttgcagtaatagccgccattgcatctgccgcactgtcggccactcagcactgacaaaaatcacttgggggccacgggctgcttgtttacgaagccattctgggaaacgaatgtcataacaaatcgcccccatcgcaacagttccgtcgagttcaaaaacgttctcggtctcaccagcggtaatataacggtcttccgccattaacccaaaccggtggactttatcgtaacgactcagtaactgtccctgacgatcgacgactaacatctcattatagtaatgcccatcgcgagcgaccgcgactgagccaccgacaatgttgacgcgaaactgccgagctaacttgctgagtaattgtaacgttcgctgcccatcatcatccgccaagacattcaggcgagttaacgcataaccggtattccacatctccggtaagacgatcacgtcgacagtttgctcagctgcccgttgaatggccacttcaatctgctcgtagttggcatccggatttccaaactgaatattaagttgtgctagtgcgacacgcattcgttccacccactttattagaatgattaaaatcatattagaataaatagtcataggttgcaagtttcagccttgccatcgtaaggctgccgaacttgcccaccgttggctagcacgccttagtgccactcataatcacatttcacaacaattactgataaatcagtgaatttgcaggcgctttgattgacatcatccctaaacccgcctaaaattgttcaagcgatttagacgattatcagacgggaggccctctacgtggcaacatcagatcaagagcaacaacgcgaacaacaacgggttgatcgagtcatcgagcaagttaaagaacgggcacaacagaccgacgacttgctggcaaaggctcatcacgaaaccgatgtcattcagaaaaactatggtgataataattccgtcaacacgtttgaagtcgatgaccggattgaaacgaacgcggaactgcaacaacaaaagcaaatggttgaacgcgccgtggaatccgaagccatcttgaaacggcaagtcggtgtcttgaaagatctcagtaactcaccctattttgggcgcattgatattcaagatagtcccgacgaggaagccgaacgtttatacattggcaccgcctcatttgtcgacgctgaacagaatttcttagtttacgactggcgcgccccgatttcctcagtctactacaatggtactctgggtcaggtccagtaccaaacaccggccgggcagcagacgaccgagctgatcaagaaacgccaattccagattaatcatggtcagatcaagaatatgttcgacacgaatgaaacggtcggtgacgaaatcttgcaggccgtccttggagaacaaaatgatgcctacatgcaaaatattgtagcaaccattcaaaaagaacagaacgatattattcgtgacaccactagtgacttactagttgtccaaggggttgccggctctggaaagacgtccgccattttacaacggatcgcttttctgctctaccactcacgggcttccctagaagcggaccaaatggtattattctcgcccaaccgcttattcagtcactacatctccgaagtcttacctagtttaggggagcgcaatatgcgtcaagtcacgcttgccgaatttctcagtgcacgttttcaaggcctaaccgttgaaagcctctttgagcgctacgaaagtgaccgccagcgtgaacaactgacaccggcaattcgcgattttcaagaaagcgccgactttatgcgccaagtcgatcaatattgccatcagctaccagccgaccaattacgcttcaccaacatcgtctttaatggcgaaatcttcttcgctaaagaggtcattacaaagattgcgacggccttaccagcagcgatgcaaccagctgaccgtttcctagcaatcaagaacactttaattaaacgcttaaagcatcgcattgacgatgaagcccaagctgactgggtcaatgatatcattgaccaattgagcgacgaagcttaccacgacttattaggttccaagcgccgcggtgattttcaatcactcgacgatgaagtcttctatattggtaagcaaatcgtgaccaaacgactgcggcaagtctacgatgcgatctataatggttacttcttagacacctatgaacaatataacgatttcttagcgcaagttgatcggcccaccaccgtgacgcctgaccaatggcaacaacgaattgccgcttaccaggccgccgttgagtaccatcggattgctctggttgactgcgcgccactattgttattacgcgatgtcctaactggcagtggtcagaaccggcggatgcaatatatctttgtcgatgagatgcaagactattcgctagcacaactgttatatatcaagcacgcgttcccactagctaagttcacactgttaggtgacagtgaacaagcattattcaaggggattgagttaccacagcaattactggaacgcctcaaggatgctttcaatgtccgacgggcgaacttgattacgttgaataagagctaccgttcgaccgaacagattacgaactttgctaaagcgctattacccgacggcgaccagattcaagcgttcacacgtaaaggcgatttacctaaggtcatgattcgctatggcgaagacgccgctctcagcagtctgcgtagcgaagttgaacatcagctcaaggcaactaacaccgttgccgtactaactaaagatttagcagaaagcaagcaggtctaccaatacctgaagcgctatacagtaacaacgttgatggccgatagcgaccgtaccatgccacaaggcgtgattgttatgccaatctaccttgcaaaggggttagaatttgacgcggtggtcgcatacgatgtctccgctaccaattatcccgatgcggattcagttggcatcttatacacgattgcgtcacgagcgatgcaccacttgacattgctcagcatcggtgatgtctccccactaattacccaattggacccgacattatttacgattgaacatcaggtacgagtataactgtaataaaaaaacgactggaagtagcccagcggtattacgctagctacttccagtcgtttttcgttatcacgaaactaatgcttgaccatttttctcacgaccagttaacccagtagtgaaagtgcaattagccaactcaatgattatcaacaggtggataatacaaacgccactgctttatccacctgttgataaccttaaaatttaagatctgctgcttatcagtttaggttatatttgcaaaaaccgtagtacgctaccaagcaactacggtctacgtccttatttaactgacttgatacttttttatctgtgcatattcagcaccatgtatctgtttcaaattacgaatttcaatatcattttgaagttccaagaaataacgatccgacactccaaagaatcgtcctagccgcagcgatgtatcaaccgtcacctgtcgacgatcatgtagtaagtcttgaatccgtgacgtgggtaccccaatctgttgagccaaaaaatatgcagagatatgcaagggagccataaactcttcttcaagaatttcactaattttaggtgttgggatttcattcattttttggtctcctaaccatgatgataatcgactatttcaacatcataaaactaaactcattaccatttcgaattgcaaaacatatccgatactgattattaatcctgatgctatattgcccttggcgatcatgacttaatttttccaagtgattggcaggcggtaggctcaaatcattaattgtttccgcatgatcaatcattagtaattttcgcaatgctaatcgctgaatggttggtggcaattgtttagagaatttttgttggtaaaccttgtgagtttccttatctgcaaaattcttaatcgattatacccgtatcacgtgtatatctcaatccatccgactcttgctcctattattagctgaccacacccaaatatccaattcatctgagtacccgactagtacgacccctattttagctaggaaccaaccagagtatccccagatttgctaacatatgtgtcacgctattcacacgaatatcatgcttagataataggtagatggtccccagcaccatgccgaacagcgtgtaatatgctaatggcaccaagctatttccgctatgcagataaccgaaaagaagcccattgataacaatggtagctgcttggtactcccggtcaagatattggtctgacaagacgtaactaaagaaaaagcccctgaaactcagctcctcagcgattggtccaaaaatgacggcatcgagtgtcatcgctaccggatttttccgcaacagtaaatccaatgaacgttcattacccgattcagtgatgtgccataccgccgtcagcttagcatagccaaaagcaagcgccacgataatgactgcgccgatcatcatgaatagcaaggcccgtttatttagccgcgttcgccacggtcgaaaatcaaattgccgtaattccgcggtcgtcttatagatgttgtacaagaaaacgataatcacggcatataaactgaagctaactaacagtgtaaaccaattggccgtaatcaaataaatatacacgggtaaggaactgatattgacaataatgacactcaacacactcacaattagtaaattaccaataaaccgtaaattcttctgtaacatttcatccactccatccaaacaaccgtaactagaatgttcactaacgggcttttaaatcaacccactcaagttacttgccaagtccatctggcctcatgccattagcatgaggcccagattagctgtgacgtgcacgacactgttaactcgaatatcccggccagataatatgtaggttgccgcgagtacgagacccataaccgtatagtatgacaactgcacccaactaaaaccgccacgcagtagaccaaacaacacgccgttaacaataacggtaactagttggtagcgtggctgatcaaaacgttccgccagcgcataactgaagaaattgccgcgaataattaattcctcgcaaatcggtgcaaaaacacccagggccaacgccatcaatatcggtgagcgctgagacaatgtttgcaagtcagcaacattctccgcgattggatagacagcatcactaacaaatttaacttgcaccgctgccaaaatcagcatgaccaccattgccagtaccgtaatcactaattgacgcgcgctcggcttagcaactattttcgtaatcttaaaatgattattagtaactgattccagataaattcgatagaataaataaattgcaaacaggtagacgaccaagaagatcgccaccgttatccagttatacttgagtgttaaaatatcgatgggcgccgtactaagccccatcacgattgctgccaataaactggcaagtagtaatctaccaataaatttgacgttttgatgtaccatgctccttcacatccatttcctgataattatccccaatggtaactaatccacaacttgcggtttgaccggatatcactaactgaaacttatccccacatcatgttaataagtgtgaccagccagttcaccagtatatgacatcccattgcggtactcagttgttttgttttgagtactaaccatgaaaaaccgcatcctgtaatgaagatgcccaccgtactggctaactgataaccatggccgagtgcgaatactgcgtttgtcagcataatcgcgcccaatactggcaagtatcgtcgcagcgtattttgaacaattccacggaaaagtaattcttcgagtacggggctaacgatgtttgtgcacactaatgttaataaccccaatggactgtggatcagtgccatgatttcatcattttgtgtttcggttggactgactagcagaccacttatccccatttgaatcaccacgaccaccactgccactaaagcagtcagccccatcattgaccaagaaaaataccctaacaggactggcatctcaaaataatggtgatagcaacgtactagtacgaccgcaacaccaacggttaaaacgactaatgctccccaatgataaccgacgttgatttgttgcgggcgttcaccccaccaattccaatagccatccgctaacaccggtaattgaatgaatataaatagccctaaacccgctaacacataaccaaataccctgatcaatcgagcaaccataccaagcctcccaagttatcccctgtggataaaccaattcttatgttttaattttttatccacaacattaactcatagccgccaacgcgaaaactgccaaattagtccccatgtgcaccagaatattcattctaatatcgcgcttagccaacaaataagttgtccccaagatgccccccattaacgtataataaatccacggctcccaatttgcatcaacatggacacttgcaaatattaagctattaataacaaccgcgatcatctgataattacggtgattatactgattcgttaacgcgtagctgaaaaagataccgcgaaaaatcaattcctcacagatgggggaaaatatcacgaccgaaacaatcatgggaagcggtgcttcaccgagcatccatgccaacgacctggaattgctggtctcgggaatatttagcatcgcgctcaatttaagatcaacaataatgagcacgaccattgtcagcatcgcaataatcacagttcctaattgtgcaatgttcacccgggacttcaacgtcgcgacttggtaatgcctaactcgtgctgtatgccaataaagccaatatagcccccaagcttccaaggcatagattacaaaaccaatcgtgatcatgaaccaattattcttaattaggaaaagatacgccggtgccatactaaagctcaccaatgctaagctgattagactggcaatgactaggttaatgatgaattgtttatttgagtgtgccattacttacctctttcgtatgatatatgtgcttctagataactttactttaccacagtgatatttagtcagttagtactgatggaccaccatcaattattatccagcaccttatctttataataatcaaaccaagtcaccttgcccgtaataatcgccgtttgcccaatcatcccgtagcgcagtaactgtgcctgatcggctgtaatcggaacggccgctgtcacttcataaaaagtcgctttactctcctcgactggtgagaccccaatctttgtgaccacaccgtccaaaataattggcttcggtacgttccgcgtgactttgaatctaatggcttgcttgactttaacggaagaaatatccgccgtcgaaatatatagcttaacgttcactcgccgttgttgcttgattatcggtaaaattttagcgatttcagctcctgaactaacgtactttgcaccacggtaattatctgcaacgtgtaggacgccggttttggttgccttgatcgtgtaagattttgattgtgtcgttaagctatcaatatctgctttcacggtccgtaaatcttgctcggctttcattcgtttctcagcgacttcgcttaactgatcattctttaacatggctaatttggtattgttagtctcaacactgtacttcgtatcatcaaagccttgtaattcttctaactgcactttagctgaggacaacgaatcctgaagcgtatctatctgctgttgaatgtctgctaacgttgcagatttaacttcttttttatcgtttgcgttgttggcctcctttgacttagcgacatactcattaaaaacagacccatacttggcactattggcatacttgctaccattagccaccgcattgtataaggcttgataagcatccagattggtcttagtatttgataccacttgttgtgcggtcttcgttagcgtggctttcttagtactagcagcgctcgattttgctgccaacatttgattctccgttaaatagatttgacgctgttttaaataactttgcaatagttctcggtacccaaattcatcggtcgttggaaaaacatcactgtcagtattgatgccatctttaaaatgatccaaggctgtcacttggcgttgcaattgccgtttgctgacattatcttcgcgtaatttattgcgattaaaaacgttagtataaactaatagattttggcccttcttcactcgcgcaccttcaactaaataattctttttgatggcactattaacagtcgcttgaatcaccggaaccgttccggtcggttgaacagttccggtaccattaataacaatctcacgcttagctacgagtgaaaacagaatcgtacccattaacaatagcgtcactggaataattaataatgttgaaaaattttgaaaccgaatcccgtaaaactcgccactttcgagcaggtcttttctcattattcagtttccccctcagctattgatcaagtcgtaatagtaaccatgttcattcaacaatgccgcatgggtcccctcttcagcgacccgaccatcatgcagaacgatgatatgattcgtccgctttgcaatcgacaaccggtgggcaataaaaataatcgtcttgtcagtcattgccactaaattatcgattaattgtttttcagtaattgcatccagtccactcgtcgactcatcaaatatcaagacttgagcgggtgataataacgctctcgcaatcgttaatcgttgtcgctgaccacctgatagtgtattaccattctcatctagcttagtttggtattgcatgaccattttattaatatccgtatcaattaacgccaattggcaagccttcgcaatatctttctcagtaataccgctgcgattacctaatcttaaattttcttcaatggtcgctgaaaagatgtatggttcctgcgggatgtagttaatatgggtccgcaatgtatgcttatcgatgttcttaacgttgaagccgttcaatatgacatcaccactatttggttgataaaaatcaataagcaatttaactaacgtggacttgccagagccactcatccccaca

SEQ ID NO: 13 - DNA, 103440 bp, synthetic construct
  source 1..103440: mol_type = other DNA; note = Lactobacillus plantarum PDA6 - Contig 13
cgatggcgagaaggatacacctgttcccatgtcgaacacagaagttaagcttcttagcgccgagagtagttgggggatcgctccctgcgagggtaggacgttgccatgcgaaattggaggattagctcagttgggagagcgtctgccttacaagcagagggtcacaggttcgagccctgtatcctccatcatgagccgttagctcagttggtagagcatctgacttttaatcagagggtcgacagttcgagactgtcacggctcatttaaccgcaaggttaaatggatattattcaatttaatatttagtttcacatagtgtggtgatgatggcgagaaggatacacctgttcccatgtcgaacacagaagttaagcttcttagcgccgagagtagttgggggatcgctccctgcgagggtaggacgttgccatgcgaaattggaggattagctcagttgggagagcgtctgccttacaagcagagggtcacaggttcgagccctgtatcctccatcatgagccgttagctcagttggtagagcatctgacttttaatcagagggtcgacagttcgagactgtcacggctcattgttcacggctcataattaaatagtttcacaaaagttattgttgatttatgtaactgagcatgatatgatgttatagttgtgttaatcgtcatgccgacttagctcagctggcagagcatctgtcttgtaaacagggggtcggaggttcgaatcctctagtcggcattaactgaatagttatgcggaagtagttcagtggtagaacatcaccttgccatggtgggggtcgcgggttcgaatcccgtcttccgctttgttccaaagtgttgccggggtggcggaattggcagacgcacaggacttaaaatcctgcggttagtgataaccgtaccggttcgatcccggtcctcggcacttttatgaagcacccatagcgcaattggatagagtgtctgactacgaatcagaaggttgtaggttcgactcctactgggtgcatataacgggaaatagctcagcttggtagagcacctggtttgggaccagggggtcgcaggttcgaatcctgttttcccgattaagtagtcatatacgattatttaacacatcgcggtgtagctcagctggctagagcgtccggttcatacccgggaggtcgagggttcgattccccctgccgcgataggaattagagcttggacctttagctcagttggttagagcagacggctcataaccgtccggtcgtaggttcgagccctacaaggtccatctactattaatagtggacatttcctagttacatcatatggaggattacccaagtctggctgaagggaacggtcttgaaaaccgtcaggtgggtcaaaccacgcgagagttcgaatctctcatcctccttattatcgcgggatggagcagtctggtagctcgtcgggctcataacccgaaggtcgcaggttcaaaccctgctcccgcaatttggtccgttggtctagttggtttaggacgcctgcctgtcacgcaggagatcacgagttcgagtctcgtacggaccgttaagttaatagttctaaatggctacaatggctcggtagctcagtcggtagagcaatggattgaagctccatgtgtcggcggttcgattccgtcccgcgccatatctgtattctgcgggtatagtttagtggtaaaaccacagccttccaagctgttgtcgcgagtccgattctcgttacccgctttttttgggcctatagctcagctggtttagagcgcacgcctgataagcgtgaggtcgatggttcaagtccatttaggcccattttggagaagtactcaagtggctgaagaggtgcccctgctaagggtatagatcgcgcaagcggtgcgagggttcgaatccctccttctccgttgtaccatttaaaaatatgaccccttggtcaagtggtttaagacactgccctttcacggcagtaacatgggttcgaatcccgtaggggtcattatattatcgcgggatggagcagtctggtagctcgtcgggctcataacccgaaggtcgcaggttcaaaccctgctcccgcaattggtccgttggtctagttggtttaggacgcctgcctgtcacgcaggagatcacgagttcgagtctcgtacggaccgtcacaaacgtcattcgttgatgaatgacgtttttttgtgttttcagaatattaactgtttgacgagatcacctaaagaggtgcgcactgtaatcagtaaatagggtgggtgtcattcaacagatggctgattgggctcacgattgctcaactaaagctgacggcagattctttaggatcacactgatcgggacatatgttggttctgactgcaatgtgatgttgtgaacgaggcttatatatcaactgatgagatttagcagtgttgagtaaaagtaatattcatgaaaaaagtcgttgcagttcaatcactgcagcgacttgaaatatccaataccggatgattatgattttaatgaacgtacaaatgaatagcgactttcgtggtagccgtaatctgaggtgatgtacttggcaaatggcttgaatgaagcgcttcgcagccaaacagcatattcggagtcgctatgccaatttgtgacaatcacgaaggctgaattatttttggactcacgtaagatccaaaaatgtttcagcccatctggcttattataatcgtgtcggaaactactaaacttagatttaaagactttttgttcttcttccggtaaatcaatgaagatgaaacttgtcattccatgccagtcagctgatccttttgaaagtaaaacgtcatacgttacggggcttgaaaaaacggttttttcgccggttaaatcgagtagcatatagcgatcttcagtggcgttggcctgcattaataacaagtcacgatcagcattttgttgttggatcatggttagaattttacgtgtcccaaatgttgctgcaatctttccactcatcaatatcactccttatttattacatctattattatacgtgtttttcaaaataattgaaaatatgttaagttgttggtttcattttttcttggtgctatattaaaatagaagtggacagagaaatgaagggatggtcaataatgaaactaacagttcttggttactatggtggttatccatacgatggcgtgggtacgagttcttacctgattacagccggtgattaccatttattgctcgattgtgggtctggggcgctaaacgccttagaagagattttagaccccttacagctcgatagtgtgctcctaactcattatcatcacgatcatacggcggacgttggggtcttacaatattactggcagttgcgtgctggtgaacggaagacgcccgtgctgccgatttacgggcacaccgctgatccacttaactttggtgccttgacctgggcgaatgccacagaaggtcgggcctatgatccggctgctgtcaatcagattgggccgtttgatgtgagctttttaccgactaaacatccagttccagcctatgccgttaagttggtcgagcgagcgacggggcaagaacttgtcttttccgccgatacggcttatttgccagaattagcgactttcgcagccggggcacagttattgatgactgatacgaattttgccgcagataaaactggtaaaatgtggcatatgacgtcggcacagtctggtaaaattgccaaatatgcccgcgtcaaaaaattattgctcacacacttgccacaagatgtctcatttacacaactccaacaagaagcacaagcagccgccggtaatgacattcaagtgacagttgctcaaaagtttttacaattgaatcttggctagtatgatagggcttagcaaatcattttgctaagctttttctgtcagtttaccgttaatagattattgatatcataagtcataattaaattgtatacgaattaattaataacaagaatgactataaaagcggtttattcaatagaaaaaatacatatatcgaataattgtattttagattattagttttaaatgaattaattttgttaaacctattcacaattaaaagtgagtagcgtataatgaattatgttataaaattgattaacgatgccaaggaggacccaggatggttattttatataccgcaccaagttgtacctcatgtcgcaaagccaaggcttggttacagacacacgacattgattttcaagaacacaatctgtttaccgaaccgctttcaattgaaaaaatcaagcagatcctacaactgactgaatcagggacggaagaaattatttccactcgctcaaaggcctttcaacaactgaacgttgatattaatgatttgtcactcaatgaattgtttgacatgattactcatgatcctagtctgttacgtcgaccaattatgcttgatgagaagcggctgcaagttggttacaatgaggacgagattcgccgcttcttgccacgcaaaattcggacattagaattattacgggcacaacaattagcaaatatgtgattatcattggctagttagcttaactaattggccaatttttgtattttcagatagattactttacaataaactgaaataagttagaattgtgatagtgattatggcccttgacacttagaaaggggtggatctgtaatggagatggaacgcatcaacgaagatacgattcgcgtcgttattgaaaatgatgatctcaatgaacgcggtattcgcgtactagatttactagggaatcataagcaaattgaaagtttcttctatagcatcttggaggaagttgatgttgatcatcaatttcaggacaatgatgccgtaactttccaagtattaccaaaccgaaatggtttagaattatttattagcaaaaacagtgataatttacaagatacgattgctaaagcaactcagtcacccgaccaatcggatgatagcgactcacaagatgatgtttcagattatttgaagcgtaaactgatgcagacggatacgaatcaggttgaagatggacaaggtattgcacataatccaactaaggacactaatgatctcgatccgtatttggatgatcctgatacaccaactaaggaatacgtgttgaaattcgatcaatttgaggatcttgtttcattggcacaattattccggccagagggactcgcgtctaacttattcaagtatcgcgaccaatattatctagaactggttttctttgtcgatcaatcatcaacggccactatcaaagatgatgtcgcagtagccttggaatatgcccatttagctaatatttcagctgacgtactacttgaacatggtgaaaagatcatgtctaatgctgctttggaaaccatccggcactattttaaatagcagttaattgcctcaacataacgtttattcgtaatgttaaggcttttttgtatccacggataaacaatctgcctgccggacgctttgccaaaagacgggtgctgctcggggtcaataaatgatgatgggtttacgtgagaattggctttaatgacgtaattagttgttgaaaggagggaccatcatgttgatcgcgatggatgcccagcatcaactcgttaatgcggcgacggctgatcgccaaatagaatattactgtccaggatgtgtgcagccggtgcgattgaaacggggggcagtgatcgtgccacattttgcccacgtccatgccacggattgtgatgctttctctgaaggggaaacaacggaccatcttcgtggtaaacaacaattagcgacctggttcgctgccagtggttatacggtgcgcttagaggctggtttgccagagatacatcagcgcccggatatcttggttcgacgaggtacagcgcaaccactcgcgttagaatttcagtgttcacccttgtcagtggagcgactcgcagctcggacgcagggctatcgtcagcatggctatcaagtgttatggttgttgggacgcccctatcagcgacaattgcacctcaatagcaaggctttgaagtttttgcagtaccagcaacggtggggcctgtttctactttttttggacactcaaagtactagtgttcgtttattgcatcacgtcttgacattggatacggaaccgctgacctatcaaacgattcgactggatacgcgcagccagtcggtgttacattttcgccaattggctccaaaaattaacaccccaactttgccggacacgcatttacggcattattatcaacagctaatgttggcacggcttcgacatcaacgtggttttgatgcgttacaagtggcttgctatcaacgcgggggaacgattgcccagttaccgacgtggacgatgcccactgtgccgcaactaccgctgttatcgggaccatatctggtctggcacgcccacgtcttttttgcactgcggcaacagtccggacggcttactgggccacaattagaggcattgatctgggcccaattacggccattacttgcccggcgtgcctgcctgcaagcacgaggcacgttaatacaacaactgataacgaccatgattacgatgcttagcgagcagcaagtgataaactggcagaaaactgagtggcatgtgaattccggccagcttcgatggcgcaaacattgattccggaacagatgctaccgcgataggcgcaatctgtggtaatctagtgctatattgaaataattggaggaatttgcatggtagtaaccaaacaattgccgacccgttcggccgttcctgaagaactgacgtgggatttgacgcccatttatgcagatcaggccgcgtatgaggcggatattgcacaagtcaaagctgcaatccccaccgtcactgcgcttaaagaaacgtttacaagctcggccgacacggtgctggctggcatccaggctgttttagcgctgtatcgtcggttagagaaagtggcggtatacgcaagtctgaaaagtgaccaggatactggcaatagtaccaatgcggctttagacgatcaagctagtagtttgactgccaaggtatccgcagcgactgcctggttcgaaccagcaatcttggaattaacgccgggccaattggatacgtaccttgatgaaaacgtcgatttacgtgattatcggcatttgttggatacgatccggttgcaaaagggacacgttctgtctgaaagcgaagaagctttactcgcaggcgctagtgatatttttggtgcttctgcgaaaacttttggtgtactgaataacgctgactttcaatttccaacggtaaaggatgacgacggcaaccctgtcaaattgtcacaaggaatttatggggtgttacttgagtccgttcatccggctgttcggcgagaggcgtttgaagcactgtataaagtatacggccagttccggcgaacacttgcttcgactttagctagccaagtcaaggtacacaattttgttgcccaggctcatcattatccagatgcgcggacggcagcacttgctgccaatcagattccgacggcggtttacgattctttagtcacgtccgttgacaagcatttggacttattgcaccggtatgttgcgttacggaaacaactgctcggagttgatcagttgcatatgtatgatatgtacacgccattggcacccaagccgacgactaactattcctaccagcaggctcaagcaactgctttacaagcgctcaaaattttgggtcctgattatctcaaacacgtcaaaacagcgtttgcttcacggtggattgatgtggtggaaaatcaaggcaaacgtagcggggcgtattcgtcaggaatgtatgataccgcgccatacatgctgttgaactggcaggataatattgataatttatatacgttggtgcacgaaatgggacacagtatgcactcttacttcacgacacatcatcagccttatcagtatggtgactattcaattttcgtggcggaaattgcatcaacgactaatgaaaacttgttgacgaactatttcttagcgactgaacaagatccaaaaatgcgggcgtatgtcttgaattactacttagatggatttaaaggcaccgttttccggcagacgcaatttgctgagtttgaacagtggcttcatgagcaagatcaagaaggtcaggctttgactgccgatcgcttgtcaaaacattatttgcagttgaaccaacgctactatggtgacgccgtcgtcagtgatccgcaaattgccgacgaatggtcccgtatcccgcatttttattacaattattatgtttatcagtatgccacgggttttgcagcggcctcaacgttggctgaccgtattagtacgcaacagacagatgctgttgcggattatctcggttacttgaaagctggttcatctgctttcccaatcgatgtcatgcaccgagctggagttgatatgaccaagcctgattatcttgatgcagctttcgaggtatttgaagaacgattaaatgaatttgaacagttggtcacccaagattaaccagttataaaagcaagcacaatgagcgtcaggatgttcggtcccgacgcttattttagacctgacccgcttatcagttagggtgttagctgccgagtccagaaggcttattctggcagctataaaaggtaaatacagtcaaaagcacccggcgaaaatgatcgtcgggtgcttttgactggtaggaccagttgaataattgcaattactggaattataaaacgtgtaattgtgcgttggcaaggctagcacagctggcattagttgcccgagttgcatcttgaaaaggatccagattgccattgactaagtcaaaaagagtcgtgtaattaaaatgttctagcaagacaccataatcatattggtcgcaatcaaaaacgacggccgacgatgcttcggtaatgttcatttcagatgcaagccgctgatcagcatgaaaggcctgtttcgccaagtcactgtcccgatcttccatgaacatgtctaagtcaatctgacagttagttgcaaccgttttgacgagctcttccgaatagtgttgaccagccttgagcattgcagattgcaaggcaattaaaaagttacgcccccgttttttgccttgaaaaagggcggctttataatccaaaataactcggtacaatgtttgagactgttgattttgagcatgccagtcggatgccttgattccttggcactttagagcccgttgaatcacattaatattgagtaatggtacgaattgaaattggatttgcttgtctgagtcgtttgccaaccgtaacacgttttgctcatcacgtacgcattggtttgccaacggatttacaaataaatacacttctaacacgttataattcctccactttctctattcgcgtcatagtgcagaataccaatcaaacgaggtatttgcaagtttttcatttcataaattttttaatgcagaaaatcactcgttacttagcttaaaccttcacccgtaatcatgcaccgatttgctaaattcgtaaagtattttgtttctaggattacagtttggaaaaaaagtgaacttagggttcaatctcgagaacgttaactttttattccgacgatttatggtaaaattttagggtatggattgaaacggaggtgccccgatggaagattggaatcattttttactgccttatcagcaagccgttgatgagcttaaagttaaattgcggggaatgcgcaaacaatttcgtgatttgaatcagcatgaaccgattgaatttgtaacggggcgggtcaaacccgttgatagcattaaggaaaagatgacccgacgtaaagtacaagaagatcgcctagaacaagatatgcaggatattgctggtttgcggattatgtgtcaattcgttgaggatatctatcaggtcgttgatttattgcgaaaacggacggatatgacaattctggaagaacgcgattacattagtaatgaaaagccatctggttaccgttcgtatcatatcgtgattgaatatccggtccaaatggtcggtggtgaaaagaaaattttggccgaaatccaagtccggacacttgccatgaatttctgggcgaccattgaacattcgcttaactataaatatcaaggggatttccctgaaaacttgagtcaacgattacaacgggctgcggaagccgcctttagtttggataaagaaatgtcagaaattcgtgaggaaattcaagaagctcagagcttgttctcgtatgggaaggggccgggcaacgatgagcctgacacgacaaaggaagatcaaaattcatgaaagtaacgatttttgcaaatgcgagtgccaagaccaagaaagtagcgggtgagttacatactaaactgctggctgccgggtttgaaattgatgatgagcacccagacattgttttgtcggtaggaggcgatgggacgcttttagcggcgtttcaccactatagtcacatggttgaccaagttcgctttgttggcgtgcatactggccatttaggcttctatacggactggcgagattatgaaatcgaccaactgatcaacggtttactggaagacaacggccagagtgtgacctatcccttgctagctgtagatattacttatgcggatacggatgcgactgatcattatttggcgttgaacgagtcaacgcttaagaagcttgggagtaccatggttaccgatgtttatattcaagatgaactatttgaacgttttcgtggcgatgggttatgcgtctccactccaactggttcgacggcttataataagtcagttggtggtgctgtcattcatccgcgcttggacgctttacaaatggccgagattgcgtcgatcaacaaccgagtcttccgaacattaggctcgccagtcatcgtagcgccgtatgaaacaataacgattcggccacaacagcagtcacactttgtctttacagctgatcaaatggatacgcagccgcggccaattgaacaaattcgttattcaattgctaatcgtcgaattgcatttgctcagcatcgtcataatcgcttctggcaacgggtcgggacatccttcatcgggttggacgagcaatgaggtttacttggatcaaccatgagacgaacccgatgaaagttaagacactcttggcacaacatggtgtgacacgtagtttgttgaaaaaagttaagtttcatggtggggcaattctcgttgatgaacgaccggtattagcgattcatatgctgacaggcggtgagactgtgacgatggtcacacctgctgaaattggtaatgaccacttaggcgtctcgacgttgccgatcgatatcttatatgaggatcgtgactacctgattgtgaataaaccagcaggagtggcctcagtaccggcgcatgccttacctgacaataccttagcgaatcgggtaaaaggttattatcaagcggcccattatgataatgaggttgtgcatatcaccacgcgtttggatcgggatacgagcggtatcgttctcttcgctaagcaccattttgcccattcgattattgatcatcaattgaaggcccatgcgatgcgcaaaatgtacttagccgtcgtcagtggtgaattgacgactgaccacgggtggctagatgcgcccattggtcgtgccgctgattcatttatcaaacgaacgacccgtcccgacggtaagccgtctttaaccgagtactgggtggttaagcggctgcgtaacatgacagtcgtccgggtacggctgcataccggccgaacgcatcagattcgggtgcactttgcagctagcggtcatccattgatcggtgatgccctttatggcggtcctcgtgacccgtggattcagcgccaagcactgcactgcatgcaactggaatttgatgatccattcattagccagaccctcacgacctttgcaccattaccggctgatcttaaccgtttaattattcataatcaacgtgccaattcataaagtgaccattaagatttggtctgttttatgtttatcctaattagcatgattgatgatgaacacgagccaattgatcagcgttgacaatgaccaatttgttcgcggaagagggctcagggcaagttggcttagtgcgggcgcttgtgccaatattagaccattgaataaccgtgattaatggtctaattttttagtttacttcgccaatcaaaaggcgcatctcaaaaaatgagatgcgcctttttggcagttcttagtaattaataatcttggtcccatgggcctgtttgacgccgagtgttgtggtgatgtcggcgacattggcagtggtaatgccaccaccaggtaggatctgaattcggccagcggcctgtttgatcgtcgtttgcaagtgggggacacagtcagtaatcggctgatcaagtgggccgccatgtgtcaaaatgcgatcgacgtcatggtctactaaccagtcaattgccgcggcttgttgattttcagggatggcgtcaaaagccatgtggaaggtgatcgacatgccaccggctgcaccaattaataacgctaaggcttcttcgtcaagctgattatccgcagtcaaagcaccaaatgcgacaccatcaacacctaatgattgagcctgtagcaggtccgcttccatgatttttaattccgtatcattataaacgaaattgccaccacgggggcgaatcatggtcactaggggcacgtgatgttcactggtatacttggctgcctcagacattacaccacgactgaccgttgtaccgccaacggataggttatcgttgagttcgatccgattggcaccggccgcaatggctgcgggaatgttagtgtaattttcaacacagacttcttttaataacatgagtttcatcctttactagaaacggacgcaaacgccttcaggcacagtaacgtccttttgtaatagacttagtttaccactcgttaagtcgcgtgcatacaaagtggcattatcagtgttttgattaacgaccacgacaaaggcttcagttggatctaaatcaaaatcacgggggaagtcaccttccgtactgatttgctgaatcagggtcaaatgaccgtcggcggttactgcaaagacagctaacgtattgtagccacgattggagacgtagagaaaatgaccgtcgtgacttaagcggatggctgcggcaccgttgtgcgccgtgtagtcggcaggaatggtcttcacaatgccaagctgcgtaaaggcaccagtttgggcgtcatattttaagctcgcaatctgactcgataattcaccagctaagaaggcgtattggccgtctggactgaacacgaggtgacgtggtccaaagccagcttccatagtgagcagggattgttcacttaactgaccggcgtcgctgacgttatagacatagaccttatcgctacctaaatcgattacggctaagcgattatctggcgtgaggtcggtgtaatgaatatgggagccgtcttgttcaggacgagggccatggccactatgttgaacagtatcggtcaaagtcagcgcgccatcagcagcaattttcatgacttcggccgttcccttatgatagttggcactgtagacgagttgccgggcctcatcgacagcaacgtaagctggtggggtgccaggtgcgacaacggtgtttagtttgtgagcagtttgcccgtcgatttgccaagcagcgataccgccctcgtcatcttccttatcgacactgtataggcaatccttagctgagagggccaaataggtgggattttgagtggctgccagtaagccatcgttggttaaggttttggcagtggtgtcaagggttccttggtaaatcccttggcttgtttttttcgtatatgttccgaataaaatgcgttcttgcatgataacaaacctccttgatagataattcaagtatagcatagatatggcccgtgtaagcgatgacaaattggcgtctgtgattaggactatgctacaattaaagcaattaattaaccgatgggggtctcaatatgacaataactgcaacagtacaatcgattggtgcgaatgctatcgattccaaggaaccaattttagttttattcgatgaaacggccacggcaccattacagcaaatcgcggtgattcagaaatttgagcagcccatcgcgagtctgtcgttagttgctggtagcaccattacgatcgatcgacaaacttatacggtggcctttgcagggggactagtggaagctaatttaacgtcaattgggcacgcgacgttgtacttcaaaccagtacctgccaaaccaatggaaaacggcatttatttgacaccaaaccagttaccaacaatcaaggtcggtagcgttattacgtatcaggcttaggaaggagggattgtttgaaacctgattcacagaaacaacggtggtcagcgcaacggctcattcggattttggtcgttattttattagtattgacgatcttctttatgggcaagcaagtcgattggctattagatccggtccggcaattttttagcatcgtgggtttgccgattattttggccggtgtgctgtactacttgcttaatccacttgttgactggctagaaaagcgttttcgcgtacgacgaacctggacgatcattggtttgtttattgtggttgtcgcgctgttggcgttaggcattattgcgattatcccaacgattcgcgatcaaactttatcaattatcaatgactggcccaattattggaaaaatgccagtactgaagttaatcgctggctcaatgatccgcaactcagtagtatccgtgaccaacttgaaagttggaacacggatctcagtaagctagtgagtggccgcttttcgaagtatttgaccgggacggtgacttcacttacaggcgtatttagtaccgtaacgaccgtcatcattgggttgataacaatgccgtttattcttttttacctattgcgcgatggtcatcaactaccgaagtatatggctaagtttgtacctaccaaagcgcgctcaggattcttagaagttttgacagaaatcaattcacaggtcagtaattatattcgtggtcaattgaccgtggcgttctttgttgccgtgatgtttgcggttggttacagtattattggcttgaaatttgcgctgacgttgggaattgcggctggaatcttaaatttgattccatatttagggtcttttctcgcaatggtgccttcagtggtcattgcgttagtcacctcaccatggatgttggtccaagttctgattgtcttcgtcattgaacaaacgattgaaggccgctttatctcaccgttagtcttagggagtagcttagctattcatccgattacgattttagtcgtcctattagcggctggtaaaatcttcgggttgatgggggttattttcgggattccaggctatgcgatcttgaaagttttgtggacacatctgtttgactggtatcgacggtcttcgggattgtatgaggctgaagcaaccccatcaactgatcaaactaacaagtaaggtaattgttggctactcagatggcgctgaaacgcgattaaaccaataacgccaaattaaaaaggttccacagaagtctgatgacaattctgtggaacctttttaatttaactgaatggtgatgttactaatcattagtgaatatcacgccagttgtcactttaccagcttgcttttttaacacctggaatttgaccagcgtgcgctaagcgacgaaagttaaggcgcgacatgccgaacttacgtaggtaagcatgtggtcgaccgtcaagtgagtcgcgccgatgaatacgcacgggtgaagcattacgtggtaattttgccaattcggtatagttgccagcagctttaagtgcttggcgtcgttcggcatacttagccacggttgcttcgatgcgtttttctttcgcaatttttgatttctttgccatctgaatgagtctcctttatgtcattaaattcatgccattcggtagcaaattcattttgacaatttaagtcagcctttagaacagttaataagataccacacctaaatcgtaacagctactattttgtccgccccgatatggtatgattgaacatacgtcctttacacgatgttgtcatcgtgaatccatagtttcaggtaagctggaaagcatcgcttggatatgggacgcctaatgataaaattaaccaaggtaaggtgacacctgtgaaaaaaattgaccgcggcatccagtttgttcaggcaaatatcgatcgctttcgatgcttagtttgtaatcaagcatacgtgacaattgacggccacagcttatgttgtcctaatgggcatcaagtagatttttcaaaaaaagggacgttgtattttctaacgcatcaagtcgctagcgagtacgatgctaacatgctggcagcgcggcgccgagttttgcaagctggttttttcggccccattgtccaagccattaatgcggcattgccaaaaacggcgcaacgaatcttagatattggtagcggtgaaggcacccccctagctgatttgttgacaatgcatgccaattctgaagacgtggggattggttttgacattagtaaggatggggttaacttagcgacccaattgacgacgactgcttattattgtgtggccgatttggcccaattaccctttaccgatggggcattcacggccattatggatgtcttctcaccatccgcttaccaagagtttgaacgggtccttgcgcccggtggacagttattgaagatcgtgccaaatcctgagtacttagttgaactgcgtcatttactatttaaaccgactgatcgacagtatcagtatgataatcaacgggtgttagatctgtttgcccagcactatcccactgctaagcggcaacgaattcaataccaagttgcgcttgataacattgactttaacgacttattagtcatgacaccgctgcactggggtgcggatgctgagcagctcgcaaccgctaaacggcagaggttaactaagattaccgttgatgtgagtttattaacgatgcaaaaaggttagcgcgggtgcttgcatgattgaaacgccggtgttaagataacctttgagaaatcgtttggtagttaacatcgacatgtcgttggtgactaccgagttgtacttcattaacgtagcgtttcgccgtgcccacaccgaaatactacgtttttttgtgtcttcaaaagctgacggtgaggtgtgaccatgtgttgctattgcattcataccagtcctgaataatgccatgattcaccggtgaggttcaatggcaaccagtcaattggcatggctctcgtaatttaaagcggaccttctgaaaagtcgtggatggctatcagaaggtccgctattttatatgtgacgctatattaatgcaatttagaagcagatggttgtttacggctgatcaaccaccctaaaccaaaacctagcagtgcgggtacactccagcctaaccctagattggcaagcggtagccacgcgttgagatgaagcaaagcttgcaaccaggatgcttgtacccaggcggatggcatagcgttaatgccggcaagaatggccggaatcatggtccagacagttgtcattccatataaccagcgggacatcccaagccatggtgccagtactgccagtatgattaacacgattgcgagcgggtagagaaacatcagcactggggttgaataagtaatcatttcagttagcccaacgttagcaagaatggctggaatgagacaagcgatggtgatcagccaatggtaggaaatcttaggaaacatgccatgcaacgtatcaccgaaagcagaagtgaggccaatggcagtttttaagcaagcgatgatgacaattagagctagtaaaacattaccgaatcggccaaagtaggcatcggcaatttgagctaaggtaatccccccattggcagctggagaaaagcgacctaagctcatggtacccataatcgccagcagaccatagatgactgccattaaactcatgctgattaggcctgctttaatggtatcagttgcgatttgccccggatcacggacaccgaggtcgcgaatcacatcaatcacgacgatgccaaaagctagcgaggctaacgcatccatcgtgttgtagccttcagtaaaaccagttagaactggatggctgacataggcgccactcgccgcgacgttaagtgatcccagtggcttaatgatagcgacaagcattaaggcacctaataatagcaaaaagatgggtgtcagccacttaccaacataggtcataatcttaccgggattacgagccagtaaccaagtgacgacgaaaaaagcaacggagaagcccaatagcaccacgggttgtaatttggtggttaagaagggggccagtccaatctgaaaggccgtagttgctaatcgtggcattgcaaaaagtggcccgagggtaaagtaaagcagtacggtgaagacatacgcgtatgatcggctaacgtttgttgccaggtcaaatacgccctgactgcgcgtcagccccatgccgatcacgcctagtaatggaagtccaatcccggtgatcaatagtccgataatggccgcaccaacgtgttggccggcttgctggcccagaaaaattggaaaaatcaagttaccagcaccgaaaaatagtccaaataacatggtgccgatgaagagtaaattccgtcctgataaacggttattcatggtatccccactttcaaataatcatggcaatagtttagcatgctttggtgaagaattaattaaaggtcggtgagggcgttaactggcggtgtaatgcaaccaactggttagtgacaatgttggctacgactgtcgcaatgaggagagatggggcggtggcagcacttagctgttaaatactgccagcaattgcgacgccacaaaaatcccgtcagattctggcgggattaattggtcttatttaaagcgcgtcacagttaactaaattgctcaagtagcgctcggcttgtggtttggctgccactcgatattttagcgctgctaggcaagacgtttactggttagcgactgtaaagcgttcttgatgatgtttgggcgtttccagttcgtttaaaacggctaccgccatcgtgccactattggtcactgattcaccagtagtgttcgtcagtaatgtgtcatggccgtactgggccggggtagcaggacctgctgtgaaattggcggccggggaaattccaacccaatcgacgttggtgacggttcgtaagaaggtcagttcggccagttggttttgcggaatagcgacgaaggcagcattggcgggattactttcaatgtcgtgcacgaagaggtgttgatcatcaccagttgttaaactaccggcccctaagatgaagaggagacgtggccgctgttgttcgcggagctgagcaatcagcttagttgccagatccacgtgtcggtaagccttatcaggactagtcgccattgcgtcaatgaccacgtcaaccgcctgtagctcagatagtgtgagatcgaaagcgtctttagctttggtctgcaaatttgggttagccggtagagcggctagcttttcttcagaacgtccgatggccacgacggtgtggttccgttcaagtgctagtttggtgatggctgagccagccattccggttgcgccaataatcataattttcatagataattcctcctcgagttataaaatgattcgaatgctgccttgtacgtgttaatccggcatgaatcatgatgacaacgtgtcaggtttagattggtgttcgtcagccagtgtgcgtcctgttccgccctccggcgcgtacggtgattagtataggaaagattggttaagaatgcgaacaaagcgttttttagtttcaaagttcgctgttgaaccatagacatggtatgattaataggattgctatgaatgaacatggcgtagagactaatatgaatgaggacgattattttgacaaatcacattgcgttatttgaaccgttaatgccagcgaatactggtaatattgccaggacgtgtgccggaacggatacggccttgcatctgattgaaccgttgggcttcaaaattgatgataagcacttaaaacgggctggcttggactactgggatagtgtcgatattacttatcatgctgacttgcaagattttttagctagtattcctgatttaaatcagttgtacttagtgtctaagtttgctgaacatgactatacggatgttgattatagtgatacgggtaaggatcactatttcttatttggtaaggaaacgacggggttaccagaaccatttatgcgcaaatatcccgaaaaggccattcggattccccaagatgattcacatattcgagccttgaatttatcgaattcggctgcgattgtgatttatgaagtcctgcggcaacaacaattcccaaaccttgaacggtcgcaccactatgaaaatgataagttgaagtaaccaacagaacgtgcactagcgctaaacgttagggtgcgttttttgatggggacgggggaacttgagtttgttataatgaagacagtattaattgagaaaggatgaacgaagcgtggcgcgtagacaagcaacaacaaaaaagcgccggacctcgacgcgcaagaagaagccgacggttgcggctaagcggcagatgacggggaatgtcattggcctgattggactattggtcacgattctcgccttattgaaggtggggttagtgggcatggtattcgcagagtttttccgagccattgctgggaatgcctaccagatttttgccgggctaacactcctcgtcatgggatatttgatgatttttggtcggtggccacgactgacttggcggtggtgggtcggtggtaacttgtttttcttcagttacttattgctattagagatcccgatgtttaatcaattgaatcaccatgccgatttttggtcgttgacgtggaatctgatcaaaaatgattttgccaaggggggcatggccagtaatcttggtggcggattagtcggcgctgctggctatagtgtcacttatccactattggctaatgtcgggacaattttgatcgcactgatcctgatggttgccagtatctacattacctttgatttgccgttccataagacgatgcaagcgttgcgtcaggccttgatgcaattgggccagcaactgcgatccggttatgaatggctgacgcacgtgctccgggttcaaattgcccgttggcgggttcaccaacaagtgcgcgccaatcaagcggcaagtactgagaagcagccaacgtcaaccgtaccacagtcagcagcccctgctgagacaacgagcgggacttcggcgccggactcagcagccagtgcagttacgagctcgcctgccgacttgaatatcacggtggctagtgatcgtgaagcctcgcccataaaatccccaacttcagctgctacggttgatcatgaacaagaactccaagggactgaagtgatggatgatgcggactaccagttgccagagtcaacactattgacgaagattccaaaaacggatcagagtgctgagtacgcaacgattgagagtaactcgcagaagctaacaaccacgttggcgagtttcggtgttcaagttgaagtgaagaatgtcagcttagggccatccgtaacgaagtatgagttacatccagctgttggggtcaaggtcagcaaggtcgtcaatttagcggacgacttagcgttggcgctggcagcgaaggatcttcgaatcgaagcgcccattcccggtaaatcattgattggaatcgaagtgccaaataaacagatttcaacagtgtcatttcgggatatcgttgaggcccaaccagcgcacccgaccaaaccgttggccgtaccgctcggccgtgatgtttctggtaatttagtcgttgccgacttgtctaaaatgccgcacctactgattgctggttcaactgggagtgggaagtcggttgccattaacgtgatgatcacggggctactgatgaacacgaaaccaagtcaagttaagtttatgctgattgaccctaaaaaggttgaattaggggtttacaatgggattccacatctgttgacgcccgtagtcacggaaccgaagaaggcggcccgggcgttgcataaggtcgttgccgagatggagcgacgctatgaattgttcgcggattccaagcagcgtaacatgcaggggtacaaccaatatatccgtcaacaaaatgcggctgatgggcagtcacggcccgtcttaccatacattgtggtggtcgtcgatgaattagccgatttaatgatggtcacttcgagcgaagtggaggatgccattattcgcttgggtcaaatggcccgggcggccggtattcatatgatcttggcaacacaacggccgtcggtagatgttattaccggattaattaaagccaatgtaccgtcacggatggcatttgccgtttcaagtgggacggattcgcggacaattattgatagtaacggtgctgaaaagctacttggtcgtggggacatgctgtatcagccaatgggcatgaataagccactgcgcgtgcagggtgcttatatttctgaccatgatgttgaagaagttgtcaactttatcaaagcccaacagacggctgattatgacgatagtatgctggtcaaggatgacgagacggatgccgctggtagtggggaccctcgtgacggtgaggatgagtattatgccgaagccgttgaattggtgactgatcaacagtccgccagtgtctcgatgctccaacgacgcttccgtatcgggtataaccgggcagcacggatcgtcgacgaaatggaggaacgcggcgtggtgggcccttcggaggggagtaagccacgtaaggtttaccgccaaaaatcggctgacgaagcgcccgcgtcgggtaatgacgcttagcgtccagtaagactggtgggcatcatttgaatggcatgacttcacatggtggcgctgccgatacgattgaataatcgacgttaaagtaaaggttccaatcgttagccagatttgactaacggttggaacctttttcagagacaaatgcgtgatttttttaattcacattgtctcagaagttggtggctaggcttgccgaccatggctgagtgatccaccagtaataaaaaaagttacgcttgttgtgagcaagcgtaacttttttcttggtaagtattgcaaccattcgtggttcgcaaggtgtttaacctagaaggttagtaaacctaacccagataaggcggtaagcaccaatgacccaatggtagaaatgatcattaaccagataacgaccatcgtaattttttgaaaagttgattttttcttcattatgtttgtatgcaccacactttacgagtaattctttcatagtttaacgtggaatcagttttttttcaattgaaattaaaaatagtcatggtttcgtaaatattcgatactaataatgcaaagaataatcgttcctagcatcagccaagtgaaagcgtggacgagaccggcaccaggtaatttgacgttcatgccatagattccaccgataatcgttggaatcgtcaacaccatcgtgagtgaggtcagaaatttcatgacatcattcaaattattggaaattactgaacccactaattgactatattgctgcaaaatctgattggtcgtttcagccatgtcactcgcttgctgggtctcaatcttaatatcatcggtgagtgattggtgattaggtgcgttgaaatgggtgatcgaagtttcaaccgcgtcaagcgtgggtgtgttctgattaagggcggccttaaaacgaatcaaggatttttggtaagccataatggtaaagagttccacgttgtgagtagcttggttcaaacggctttccagggcgcttgtccgttggttgatcaattcgagtgcggtcacaaaactgtgctcgatgtaccacatgatagtcagcacaaaatcttcgtgattatccagacttagcttagacgaggccgggtccatcacaaagtcttgaataaaactagccgggtaattactgacggtgatgaccacttgatccactaaaatcaaggcgaagggatagacttgaaattcaaggtaccccagcttactcgtcgtgagtttgggatactgcatcacgattaagattggttgactggattgcgtggttgataattgctcggctcgtgaaacctccgcatcgtcgaggatggcagttaagtaatctttgggaagatcaaattgtgtgaccagttggtcgatttcagttgaggtcgggcgttcaacgttgatccagtatggctgatcgtgatggtcgttcggcgtagtcaaaaggccatttttaccagtggtaaagtattgtaacaacggtcatccctccagtaatagtttatgtttattatagggctgtcacagatgattgaaaagtttaacgataatctctataatttaacccgacactaatggggaggcaagtacgcatatgcgagatttatggaccacttggtatgggcagctggtatttttagccgccatctcgatgatcattttaggtgctaaacgggttgcacaccgcgtttggccacatggattaagattgttggatttttggccgccatttttaattgttttcacccactttctgacactgcaagcaacggatagttcgctggcaccgtacgaagtgttgtccctaatgattttggggatcggtttaacactgattgaagctgttgaacgcggagaaatcctttactggcgcttttttaagctctattggcggggagcggaattattgacactcgtcgtctatatcctagcacttggcagccacttctttttaacatcgtaaaaatgtcccccactaagtcccacctaacgaaactaacgttaggtgggactttttttgatattttgttaacaatttggaaaagtaacaaaacgatgtggtaggaagtgggggggtgtggtagacttgaattatgtttaatgaaaggggttgattggccgtggcgtctaagatgtttttcggagagtttgaacatgccttagatgcgaaagggcgactaatcattcctgccaagtttcgtgagctattgggcacttcgtttgtcattactcgtgggatggatggttgtatttttggctatcccgctgaacggtgggcaacgcttcaagcacagttagatgatttaccactaactcgcaaggatgcgcgagcgtttgtccgttttttctatgctgctgctgctgaatgtgaattagacaaacagggacgggtcatgatacctgcaaccttgagacaatatgcaaagttggaaaagcaatgtgtgatcgtcggagtttctgaccgatttgaaatctggggtgccgaacactggcaacagtttgagacggagaccgcagcgaacttcgatgatcttgcagaaaacttgattgatttttaaataacaataataatttaggaagggggcgcacgcgtggcaacatttgaacacacaacggtacttttgcatgaagcaatcgccgcgttaaacgtccggccggatggcatctacgtggactgtacgttaggtggcggtggtcattctcgtgaaattttgcaacagttaggtccggaaggccacttgtatagctttgaccaggatcaaaccgcaatcgattataaccaaagtaacttagcgacttatcttgaacgtggtcaggtcacgttcatcaaaagtaactttgccaacttgaagactgaactagatgctcggggccttgaccacgttgacggggtagtttatgatctcggcgtttcgtcgccacaatttgatgatgctgcccgcggcttctcgtatcaacatgatgcgccgttagatatgcggatggatcagagtcagaaattaactgctcaaacagttgtcaatacttggccctatgcggacttggttcgtattttctatcgctatggtgaggagaagttttctaaacaagtcgcacggttgattgagcgtgaacgggcggttcagccgatcgtgacgacggggcaattggtcgaaattattaagaatgccattccagcaagagcgcggcgaacgggtggtcatcccgctaaacgggttttccaggctattcgaattgcggtgaataacgaattgggcgtactggagacttcgctcgaacaagcgattgatttaatcaatgttcatggtcgtgtcagtgtcatcacattccaatcgttagaagatcgtctcgtcaagacgatctttaaggagcacagcgatttgccggagctgccacctggtttaccagttatcccagctgaaatgcaaccagattaccgcttagtcagtcgtaaaccggtcgtgcctagcgatgcggaaatcgaagctaatcgtcgtgctcgcagcgccaagttacgagccatcgaacgtttaaagataacgaataaataatattcaggaataattaaaggagtgattaaaatggcccaaaatggattagcgcgggagttgccacagcaaactcctggcgcaaccaccccggtacataaaacaaaaaccgttgtgaccccgaatccgtccatcaagacgcagcgagttgctttttcattatttgaaaaagtattgtgtgttggtttgagtttggtggtgtttggattagccattatgttagtttcaacgaacattgcaacgagtaacgcacaaagtcagttacagacggtgcaaacgaaagtcacaaaagtgcaggcaaaaaatacgtcggccgcacaagaaatcagtgaactttcaagtcggagccgtttaaataaaattgctaagcagtacgggttatcgctgaacaacggtagcataaggaatgtttacaaatgaataagaacaaacaacgaatgacttcgaaacggtcaccaaaacaaaatcgtagaatttttggccaatggctattttttggcgcgattgccgtctttggtgttttgatcattcgtttttcatatatcgcgattgtgcgccacgtcaacggggtcaatctggtcgaggccaccaagaaactttatacggaagaccagaccatcacggccaaacgtgggactatttatacggccaacggtgacccaatcgctgaagatactagcacgtacacggtctacgccattatggcgaaaaatcagcaaagtgctagtggcaaggcactgtatgttaaaaataatgcgaaggcggcgcgtgtcttatcgaagtatttgccaatcagctataagaaagccctcgcgaccttgcaaaaaggcgcaggtaagttccaaattgaatttgggacggctggtaagaatatttcactgacgactaaggaaaagatcgatgcccaaaatgtggctgggctgcactttattgaatctgaagcgcggctctacccaaacggcacgtttgcttcccacttggttgggctgaccacctccaagagtcagaaggataccgatcagacgcggttaacggggtcgatgggcatcgagttggcttttaacaagcagttatcgggaaccgatggtcgcaagacgattacgaagagcggatatcaaggtagcactgagactggtaagaaggttaaggatggggataatatttataccaccatcgatagtaagttacagacattactggaaactaaagtttcacaagtaaacgctaaggtctcacctaagtcaatgacagcaacgttgatgaacgcgaagactggtgccattctggcgacgacgcagcgaccgacatttaatgcgcaaacaaagaccggactatctaaaatgtggcgtaatttgttggttgaagacacgtatgaaccaggatcgacgatgaaggtctttacaatggcagcggcgatcgacagcggtaagtacaatgctaatgtaaccgtcccaaccggtgaatataagatcggtaataataccgttcctgattggaatacgagcgggtggggcaatattacctatgctaaggggtttgccctttcaagtaacacggcgatggcccacctagaacaagcaatgggggccaagacttggctgaagtacattaaacgctttgggttgcgtgagagtactaatagtggtcttgacaacgagcagagtggttcaattcaatttacgtatccaatcgaacaagcggatacggcctttggtcaggggattcaggtgaccgctatgcagatgcttcgtggattcacagcgattgctaatcatggtaagatgttacagccgtactttatctccaagatcactaaccctaacaccaacaaaacggtttatacgggtaagaagaaggttgtaagccagccaatcagttcgaagactgccagcaaggtgttggatcatatgcaagatgtggtatataagtcatacggtactggctcatcatataagatcagcgggtatcgcattgctgctaagactgggactgcccaggtcagcaacgggagtacgtatgagcaaggtgacaacacctatctgtactcggtcgtcgggatggcgccagctaaaaatccgaagtacattatgtacattacgatgaaacaaccgacacttaacggaagttccgcgtcagatgacatggcagagatttttgataccgtgatgaaacgggcattggaagaacaaaaagcgagtgagactaaagcgacgacgatcaaaatgaaagatttgacgagtaagtcgactagcgcggccaagaaagctgctaagaagcagggacttgacgtggtcgttgttggtaagggtagtcgggtcgtcaagcaatccatttcttctggcactgtcgtttcaagtggtcaacgcgtcattctggttgccaacgggcagatgtatatgccgaacttatctggatggtcggcaagtgaagtggctgattttgcgacgttgacgggcgttaagctcacgactagcgggacgggttacgtcaagacgcaaagtgtgactgcgggtaatccgatcgaagctaagcaggcaattagtgtgacactgaagtagttatcaagtcttagaatggagaattgttgtgagtttattagtgtggggtgcaaccctaattagtggttttattattgtgtttgcgttaatgccgtcacttattcggtatttccgcgcccgcaaagaaggacagatgattcgtgaggaaggtcctaagtggcatgagaaaaaatctgggacgccaactatggggggcctactgttcattatcgcaatcttagtcaccacgttatgggtcggtgggtggcaacatcagctacaaccaaccacctggattttgatgtttatcctggtcttatacggtgcacttggtttttgggatgatagtatcaagctttggcgtaaacaaaacgaaggtttaaaggcttggcaaaaattacttggtcaagtcattggggcagtaattttaacgttggtctatcaacatgaacatttgccaatggcacttaggattccaggtttgggggtctggtcgctgggaatttggtacatgctcttcgccatcatctggttagtgggcttctcaaatgccgtcaacttaacggatgggttggacggattagtcgctggtcaggccacgattgcctttggtgcgtatgccgtgattgcttacgctcaaaatcagtataatgtgatgttattctgtttggccgtcgtggggtcactattaggtttcttcgtgtataatcacaaaccggccaagatctttatgggtgacatgggatcattagcgctcggtggtgctttagctgcagtatcgatcttattgcatcatgaactatccctcctcttgattggcatcatttttgtcattgaaacggcttcagttatcctccaagtcgcctcgttcaagttaacgggaaaacggatcttcctgatgagtccaattcaccatcactttgagatgaagggttggagcgagtggaagattgatatcgttttttggtcgatcggtttagtggcagccgtaatcagtgttgccacgattatttagtcacagtttgctaactcgggcattcttgtccgagttagttgtacataattggtctttgcggtatgactttattcattggtggtcgccaagtaagtgacaagtaaatagtactgattcctatcaacgcaacgattgttctttaaatggttgcgttgtctgccgcagattatgtcgtggaattggtcactggctcaccatgaataatttgctgatgaccacgagttggtgcatcagccacataacaagttaatttaggtatcatctacaaacattatagggagatcttggtttatgaagtcggttgagcagtatcgtaaccaaaaggttttggttcttggattagcaaagagcggggtcaatgccgcacggttgctccacaaattaggtgcgtttgtgaccgttaatgataaaaagaaatttgatgagaacccggatgcacaggaattattgagtgatggaatcaaagttatcacgggtggtcacccgctgtcactactagatgaagattttaaagttgttgtcaagaacccgggtattccatactcaaatccaattgtgagtggggctcaggaaaagggtattccagttattaccgaagttgaacttgcatcgcaaatcctagcgggagagttgattggtgtgacggggacgaacggtaaaaccacgacaacgacgatgatcacgatgatgcttaatcaacgcacaaatgccggtaaagcttacgtagcaggcaatattggcgtgccggcctcagcaattgcacaaaaggctacggcggccgacacaatggtgactgagctttcgagttttatgttgtgtggtattcaaactttgcacccacatattgcggtgattacgaatatttattcgacgcatttggattaccatggctcacgtgagaactatgtcaaggcaaagatgcgaatcaccatgaaccaaacggctaatgattatctagtcattaattgggatagtgaagaatggcggcaactcagtaagcaatcacaagcaaccgtcgtgccattttcacggcaagccaatacgaaagatggcgcctatgaagaggccggcaagctgtactttaaagatgagtacatcatggatgctgctgatatccggattcctggtgatcataatgttgaaaatgcgttagcagcgattgctgttgctaaacttcaagccgttccaacagcaggaatcgttcaagtcttgaagacgtttacgggtgttcgacaccggactcaatatgtcgagacgtatcaggaccggcaattttacaacgattccaaagcaaccaacttggtgtcgaccgagatggccttgaagggctttgatcagccggtcattttacttgctggtggtttggaccgtggtaatacgtttgaaaagcttgctcccgcattaaaggcgcatgtcaagacgttaatcgtcttcggtgagactgctgaaaaaatggcggacgctgggtgtttggctggtattcaagatattgagtttacggacaactgtgagactgctgtgccaattgcttggcaacatagtcaggctggtgacatcatcatgttatcgccggcttgtgccagttgggatcagtacccgaacttcgaagtgcggggcgaccgatttattaaagcaatcgaacagttaactggaaaggcggaagaaaactaatgcgattaatgatttctggcggtgggacaggtggtcatatctatcccgcactggcactgatcgatgccttaaaagcacatgatcccgaagcgcaagttcagtttgtgggaacccatcgtggactagagagccgcattgtgccggaacgggggatcgattttaaaacaatcaagatccagggctttaagcgttcattgtcattacaaaatgttaaaacagtctatttgtttttaaagagtgtggttacggcgcgtaagtacattaaggcgtttaaaccagatattgtggtcggaaccgggggctacgtgagtggtgcggtcgttttcgcggcgagccagatgcacattccaacggtcattcatgaacagaattcagttgttggtgtcactaacaaattcctaagtcggtttgtggataaaatcgccatttcatttgagagtgcgcgatcacaatttcccgctcaaaaagttgtgatgactgggaatcctcgagcccaacaagtggctaatattaaaaaaagtggcgctttggcgcagtttgatctggatcctgatattccaacggcgttgatttttggggggagccggggtgctgcgcgcattaacgcagcagcggtcgcggcaattcctgaactgaacaaacgtgactatcagaccttgttcgtcaccggtcaggtacactacgaaaagattcggaatggcttgtcagcgacagcgctagctccgaatgttaaaatcgaaccatacatcaaaaatatgccagcaattctaccagaagtcgcggttattcttggtcgagcaggtgcaactagtattgcggaaattacggctttagggattccttcaattctagttcctagtccatacgttacgaatgatcatcagaccaagaatgcacaaagcctcgtgaatgcgggggcggctgaactgattaaggaagctgatttgacgggaaccagtttggtagctgcattagatggccttctccaaagtaccacgcatcgtgagacgatggcggctaatgcgaaaaaactggggatgcctgatgcggccgaccagttactacacgttttagaaacggtgattaagtagcacagagactagagtgaaagggtgggtgtgatggccatttttcataaaaagcccaaggagcgtgagcaccccgagcagctgacaccctgggaacgatttcaacgagacgcggctgagaatcatcgcgcagcgcaaaagagtcaccatagttggtcaggtaaacgcctgcgaattggcgataaattaccgaaactcaaatctcagcgccgccgattacttttcaaacgggtcgtgatcttgatgggctgtttcctgatcggtgctggtgtggctggttacttcatttcaccactgagccatgttcagacggtgaccgtacatggtaacgatcaattgtctgttacgcaggtcaagacggcgactaagatcaaccctggagttgccttatggtccgtgattggtcatgatcaacggactactaagcgcgcagaacgcgcccagccgcaaattggcaaggtcacgactaagctagttggattgaacagtgttcgggtgacagttaaggaaattcgcatcgcgggttacttatcgactggtcaacactatcgacgaattttggaaaatgggctgattttgaaagcgacctattctcaacccggtggcggttcaccgatctatgccaactttaaaagcggtcaccgcttagcaacgatgattgcacagtacgctaagttaccatcggcggtcaaacacaatatttctgagatcaagtttgcgccgaacaaggctaatcccgaacgggttcatctttacatgaatgacggtaatgaagtgtacgcaacaattagcacttttgctagcaagatggcttattatccgggaattgtggcgaagatgaaaaccaagggtgtcatcaatcttgaggtgggcgcatactcctatccgttcaagaatcagaataattgatagaatgctaagtgtgacctttttaaaagcgcttaggatatggtaaactaaggaataactggatatgtcagcgaatccttgaatatttatgtaaaatactaggaggttcctctattatggataattcaggaatttatgtcggacttgatatagggaccacctcaataaaagtcattgttgctgaacgtgttaaagggcaaatgaacgttattggtgtgggaagcgcacgttctaatggtttaagtcgtggcgtgatcgtcgatattgataaggcggccgaaacgattcgatcagcagtacgccaagctgaagaaaaagcaagtatcgaaataaaaaaggtgattgcgggagttcccgctaacctggttaaaattgaacgctgtcgtggtatgattgccgtggcagatgagtccaaagaaattaataatgaagatgttcaaaacgttgcggcggctgcgttagttcagagtttaccgccagagcgggaagtactggatgtcatccccgatgaatttgtcgtcgatggttttgatggcatcaaggacccacgtggcatggttggggtccggcttgaaatgcacggcaccctgttcactggtccgaaaacaatcattcacaatacgcggaaggctttggaaaaggctggactgcaaattgaacagattgtgatcgcgcccttggcattaagttccttagtgctgaatgacggtgaacaagattttggttcgatcattattgacatgggcggtggtcaaacgactgcggcagttatacatgatcaccaattgaagtatacttacgttgaccaagaaggcggccagtatattaccaaagatatctcggtcgttttgaatacatcgatcgagaatgccgagaagttaaagcgtgattatggctatgccgatgctcagcaggcctcggatgatgaacttttcccagttgatgttgttgggcaaagtacaccggagcaaataagtgagcaatacttagcagaaatcattgaggctcgtctagaccagatctttgataaggtcaagcagcacttggatgagattcgggcgctcgagctccccgggggcattgttttaactggtggggtggcagcattacccggtatcactgatttggcggcgcaacgttttggaacgcgagttcgcgtctttacgcctaatcaaatgggcttgaggcatccgtcgtttgatgaggcgttagcggtcatcaaatatcaagcggccttgagtgaagttacgttactcgttaagagtgcacttaccggtgatactcgtgccagtgtggcgttggaatttgctgatacaacaccagcacctagccaacccgcagcacaacctaaaaaagcaactaagaaacagtctgcgccacaagcaccacaggaacaggctgatccagatcataagggaactgttgaacgggtcaaaggcttcttcaaccacttctttgattaatatcggatagaaatgacggaggaaaaaacatggaattttctttagattcaacccagaactcaggggctaatattaaagtcatcggtgtcggtggcggtggtggtaacgccgttaaccggatgattgctgaagatgttaaaggcgtcgaattcatcgttgccaacactgatgtgcaggcattacaaacttcaaatgccgaaactaaaattcaacttggaccaaagcttacgcggggattaggcgcaggttctaatcctgatgttggttccaaggctgcgcaggaaagtgaagaggccttgacagaagcgttacaaggctcagatatggtctttgtaacggccggtatgggtggcggtactggtaatggtgcggcaccagttgtggctaaaattgctaaggactccggcgcgctgacagtgggtgttgtcacccgtccatttacatttgaaggtcctaagcgtgctcgtaacgctgctgaaggaattgctcagatgaaagacaacgttgatacgttgatcattattgctaacaaccgtttgcttgaaatcgttgataagaagactccaatgatggaagccttccaagaagctgataatgtgttacgtcaaggggttcaaggtatctctgacttaatcacgtcaccagggtacgttaacttggactttgccgacgttaagacggtcatgcaaaaccaaggttccgctctgatgggtattggctctgctagtggtgaaaaccggacggcggacgcgactaaacaagccatttcttcaccattattggaagtttcaatcgatggtgccgaacaagtcttgctgaacatcacgggtggccccgacatgtccttgtatgaagcccaagctgcttctgacattgtttcccaagcggcaacgactgatgttaacattatctttgggacttcgatcgatgaaagtcttggtgatgaagtccgggtgaccgtgattgccactggtatcgatcagaagcaacgcgaactcaagatggacagccagcctagtcgtagtgaagctagtcagcaacgaggcggcatgttcgcaacgccaactgaccagccagcgacgagtgaagcggcccaatcaagtgagtcccaagctaacgacccattcggtaattgggatattcggcgcgaaccgaacaattcacgaccagtcaacaatggtcaagagtttaacaatgttgaaaaaactgattttgatgtctttaatgacaactcacaagctgacgatagtaaggatgataacagtggtgattcgctagatacaccaccattcttcaagcgccggcgtaagtaaaacggtgaagggagcgcaagcacatggccggattcattagtaacttttttggtgttggtgattctgacagtcagtatgaggaacccaccgaagcttcccaagcggcggctcccactgaatctgcaaccaatactcggagcacgccaaaggtagttccaatgcaagggggcaagtcggtgaatagcaaaattgccctattcgaaccgaaaatttattcggacgtgaaagaaattgcgacgcagttattgaaaaatcaagctgtaatcattaattttgatcacgtcgatgatgaaatggcacgccggattgtggattttttgaccgggacggtttttgccatcaatggtgagatcgaacggattggtgatgaaattttcctctgtattcctgaaaattacgaggtttccggaagtacgacaagtcagtttgatacgagcaaattataaggagtgagtggcctgttagtgacgattattagtcggttgtttcaactgtaccaattagccattgtggtttacattttgatgtcatggttcccgggagcttataatactcgcgtgggccaattcttaggtcaaatctgtgaaccatttctcagtatttttcggcgctttattcccgcaattgccggactggatttttcgccgatcattgcgctgttagtgctccaattagctgaaagtggcctattttatctgataactttattgatatactaaattaaaataacgaggatagtatcgtgaatgataacttaaaacaacattttcgcgatagtgaagccccatttattgaacaggtcactggttggctacggcaagtagctgatcagtaccgaccaatcttaactgcgtttttgaacccgcgacaaatctacattgcgcaaacgctggtcaaccagttagacgacgtgcggatgcgggcatccggtggctttgaaggtgctgagttacaacggatcttattttacccggtgtattacgaacctgaagtggccgattttcaaatcacactgtttaacattgtttatcccgtgaagtttgccaccttaaagcatggtcaaattctgggtacgcttgccaatgccggcgtcgagcgtgatgtctttggtgacatcgtgactgacggaacgacatggcagtttgtgtgcgaaaccgagatggccagctatttcgaggagcaaatcgaccgttttggtaagacgaaagtccacttaacagcggtaccattgtcggcggtgatcacaccggaagacgactgggaggcagttactacgacggttagttcattacgtgcggatagtatcattaaggcggcgttcaacttgtcgcggcatcacgccaaggaattgatcgaaggtgctaaggttcggctgaattgggctgacttaccgaaagctgattacgagttagcattgttagatatgctgagtgtgaaccattacggtcgtgtccgacttgccgaaattagcggtgagaccaaaaaagcgcggctgcgaataacattaaatattattcatagtaaatagatattggaggaattctaatggtgttaagtcctgatgacattcataacaaagagttttcaacgaaactgcgtggttacaatattgatgaggttaatgattttctagaacaaattatcaaagattatcaaattaccttgaagcaaaataaagacctccaagaacggttggactcgagtgaaggtaagttgaagtatttcaatgaattgaaagattccttgaatcaatctatcttggtggctcaagaagctgctgataaagtgaagacgaactctaagaaggaagccgacattatcacccgcgaagctcagaaacaagcgtctgacattgtgagtgaagcaaccgacaagtcaaaccaaatgatcgacgaagcttctcaaaaggccaaacgattatccgttgaaactgatgatttgaagaaacaaacgcgggtcttccggcaacgcttgcaagtgatgttagaatcgcagttagaagtggttaagagcaaggattgggatcaactacttagcgaaacgaatacggctgattatgctgaaattcaacacgttttaaaggaagataaccttgacaactcgggggatgcgagcgtaaactcagaagcaaccgttgaaattacggaagcaacgagtggtgagacccccgttgcggacggtggcgatcaagtccaacaacagacggtggttattttccctgatgatgacagcactaataattaattaggcgatcgtcaggcacaattgaagcgaattgaatgtattgaggagaacagcaaacaattaactaatacgcccagagagctgccggcaatggaaaggcagtcgtcccttagttagttgcagatcatctccgaatgctatcctgaattgagtaagggtggccggtccatggacgttaaccatgctaagagagaatttaaacaattctaaaattgggtggtaccacgataacttcgtccctgggtggacgaagtttttttgtgtctaaaaatccaatggcgattgtttgataaaaattttaaggagtgagaatatgcgcgttaaagaaacgttaaacctcggtaagaccaagtttaaaatgcgtggaaacttaccggtcaaagaagttgaacggcaaaatgtgtgggctgaaaataaagtctacgaacaacggcaaaaattgaatgaaggtaagccaagctttatcttacacgatggcccaccatacgcgaatggtgatatccatatggggcacgccttaaataagatcacgaaggatttcatcgttcgctataagtcgatgaatgggtttcgggcaccttacgttcctggttgggatacccatgggctaccaatcgaacagaagttaaagcaagccggttatgaccgcaagaagatgacggacaatgaattccgagaactttgtcggaaatacgcgttggaacaagttgattgtcaacgtgatgagtttaagcgcttaggcgttgctggtgaatgggacaacccatacttaacgttaaagccagaatttgaagcggctcaagtgcgggtctttggtgcgtttgctaaacgtcacttgatctaccggggccaaaagcctgtcttctggtcatggtcttctgaatcggctttggcagaagctgaagtggaatatcatgatgtgacatcgccatccgccttctacggtgaacatgtcattgatggtaagggtgtcttagatgatgatacctatatggttgtttggacaacaactccttggacgattccagcttcagaaggaatcacaatcgatgcaagttttgattacgtcgttgtgcaaccggctggtgaaaatcgtaagtttgtgctcgcggctgaattgttggacgaaaatgccgaacgatttggttgggaagatgttcaagtgcttaaaacggtcaagggtgcggaactcgaaaacattttgtgcgaacatccttttgacaatagtcggcatctagtaacgatgttaggtgattttgtcacacttgattctgggactgggctagtgcatactgcgcctggttatggggaagatgactaccggatcggtaagcaatacgacctgccaatctttgctcccgtagatgacaaagggttcttaacggctgaagctggtgatgattttgcgggggtcttctacgatgacgctaacaagatcgcactggacaagttgaaggccgctgggttattactgaaatatatgccatacgaacacagctatccatttgactggcggactaagaagccgattatcttccgggcaacgccacagtggtttgcttccgttggtgatatgcgtgatgaaatccttaagtcgatggatgacgttgaattcttcccagagtggggtaaaaagcgtctttacaacatgattcgtgatcgtggtgactgggtcatttcacggcaacgagtttggggtgtacctcttccaatcttctatgctgaagatggcactgccatcatggacgaagtgacgattaaccacgtagctgatttatttggcaagtatggttcgaatgtttggttcgaacgcgacgcaaaggacctattgccagatggttataccaatgaacattcaccaaacggtacctttactaaggaaaccgatattatggatgtttggttcgactctggttcatcacaccaaggtgtcctggcagagcgctcatacctcgactatccagccgacttataccttgaaggttctgaccaatatcgtggttggttcaactcaagcttgattacgagtgtggctgtttctggacatgccccatacaagcaagtcttgtcacaaggtttcacgttggataatcaaggtcgtaagatgagtaagtcactgggcaacacgattgcgccagctgatgttattaagcagatgggtgctgaaatcgttcggatgtgggtcgcttcagtggataccagttccgacgttcgggtctcaatggaaagctttaagcaagtagccgattcctacaagaagttccggaatacggtacgcttcatgttaggcaacaccgcagactttgatccgaagaccaaccgcgtggcttatgaagatttagcaagtgtggaccagtacatggaaacacggttgaacgaattcgtagctgagacgaaggatcattacgatcattatgatttcttggatatctacaagaagttgatcaacttcttgacggttgatttatcaaacttctatctcgatattgccaaggatattatgtacattgatgccgaggatagccattcacggcggtcgatgcaaacggtcttctacgatgttttggttgccttgacgaagctcttcacaccaatgctgccacacacgactgaagaaatttggccattcttgaaggaaccagaagaatttgcgcaattagctgagatgtcagctgttcaaaattatgcgaacagcgacgagttgatggctcaatggacgcggttcatggatcttcggagtaacgtcttaaaggcgttggaagaagcccgggatgctaagttgattggtaaatccttggaagcacacttggatttgtatgttgatgatgatacgcaagccttcttagatcatttgagcaccaatgttcggcagatgttgatggtttcagcattagatctacacgcgttaagtgacgcgcctgcagacgcagaaacatttggtgacacgttagccatcaaggttggccatgctgacggtgacgtttgtgatcgttgccgaatggttaagaccgatgttggcagtgacgaggcttatccgatgttatgtgcacggtgcgccgcaatcgttcgtgaaaactaccctgaatcagtaacaactggtttggaagcttaatctgaattagatttagcgtgagtcttgataacttatgaaaagtgccactaatcagtcgaacgggactgattagtggcacttttttgtgctggcgtgtggggattatcaagtagtcagtaaatccgaacaccgggatgattgagatacagctgtaaaaaactgattgcgtttttcggatgcaagatttaagagctattaagaatttacagttgctgcgcaggactttgaatggttattatgagaaatggtcctttgcaattgaattttcatgaaaaagtcagtatgataatgaagtagtttaaattaaggtcgattttatatagataggatgttgatggctgtgaaaatgatcaaggtacacggttctggtaacgatttttatttattggatcaaacacaatttcaagcaccgttatcggatgcggatttgaagcaattggcaattaacatttgtaaacgtgacggcgcaggtttgtacgatggcgctgatggcgtgttggttgttgataaatcagaacatccacaagtacttggtcggatgcgggtcattaatgcggacgggacggaagctagcatgtgcggtaatgggctacggaccgttgctcgttatttgggcacgcaaaatagtcaggaagacttccgggttcagacgatgtatgcggacttaaaggtgcaggccgttgctgattttgcggcccacgtcccagcttacagtgttgaaatttcacccgtaactttcgacgcgcagacacttggcatgcatgcgaataacgatgcgacgacaattattaatgaaaagattccagcgctgtctgctgacttgaaattctcagctgtggcggtgcctaatccgcatttgattgcgttcgttgaccatgatacgttggttggccccgaattaggacgtatcggtgaatggatgaatgatggtaaaaaccaaattttccctgatggcgtcaacgttagttttgtggaagtcttaggaccaaattcaatttttgtacgcacgtttgaacgcggggttggttttaccaatgcttgtgggactgcgatgtcggcttcctcattgatgtacgtgttattacaccaagaaagtaccgattttaatcaagaaatccacgtcaccaatcctggtgggatggtcaaaaccgttgttcaccaaggtgccgatgaagaatactggatggaattgatcggtaacgcgacgttcgtccggatcgtgactttgccattagaagatgcgcttcagggcgactacagcccagctaccgcaacggaaactggtgagcaggttgcttatgaagatttcgtcgctaaccttgcaaaggcctaatggcgattagtgtcaattggtccgcttgattttaagaattggaaaaatgggttaaggagccaaattggtcgctcgttagcccattttttgcgggttcgttaaaattaccgaaatcgcccagttgaaaattgcaatcgagctaaaaaatcggtatccttattgagagagcagacactgaaaggggttcttgatcaatgacatttgaggaacgggttcagagtcgtcagttggtttatcaaggcgggttggtacaggtcgaacgacaagaagtcactttaccagatcaaacgacggcaacacgtgaaattgtgcgacatcagccggccgtcgcgatgctgatgattaccgcgcaacataaaatgattgttgaacaacagtggcgcgctgcaaccggtgggctgaccgtcgagattccagctggtaaggtcgaatccggtgagaccatggaccaggcggccgtccgcgaattaaatgaggaaacccgattgacagctcagcacttagaagcagtcgcccaattctacacgtcacccgggtttacggacgaactaatgaagttgtacgttgctaccggtctgagtgcggttgcaacggcattcccacaagaccctgacgaacaaattaggctcatcaagctggacctcgcgacggctgtcagtcaagttcagactggtcagattcaggatgccaaaaccgtaatggcgatttggtactggcaaagtcaccctgagttaggagttgaagcatagtggcagatgatgatcgactcaccagacagcaatatcgacaacaacgtagccagccaactggtcacgatactcaggagcaagaatcaccaacggctgaacccagtgcatcccgacaagcgtatgctgctgagaacaaccgggctgttgaagaagccaagacgaaacggctagcccgcaaattgaattgggcgattgctggactagtcgttgggattattattgtctttttaattttatttttaacaccatagaaagtaggcgctaggctcacatgaaatttggaattatttgtgcgatggaagaagaacttaaaacgttacgggacgctttgcaagacgaaaagatcgttaatattaaggatattacgttctatgatgggacaattgatcagcaggaagttgtcttagtgcaatcaggcattggtaaagtgcaagctggtatgactacggctttaatgattactaactttgatgtggacgttgtcatcaactctggttctgcaggtgggattggcgctggtttgcatgtcggtgacgttgtcgtagctaaggcaactgcttatcacgatgttgatgcgacggcctttgactacgaatatggtcaattaccacaacagccactatactacgaaacggatgccaattgggtaaagcaaatcatggcagcggccaaggcaaccggtttgaatgccaagactggactgattgtttccggtgaccaatttatcgcaggtaaggcggctaccgataagattttagcacactttccagaagcactatctagtgaaatggagggcgccgcaattggtcaagcttgtcaccagttccagacgccatatgtggtgattcgcgcgatgtccgatgtcggtgatgaaaatgccggtgttagttttgacgaatttatcctggaagcgggtaagcagtccgcagcgatgttacttgcattatttgcggcgcaaaattagtcagatgtatcgcagcgatgctaataactaagaattatttagaaggaagtatgatgtaatgaagcaagtgtacctagacaatgcggcaacgaccccaatggcagcgtccgttattcagacgatgacggatcaaatgacgaatacgtttggtaatgcctcaagcacccacgcattcggtcgggccgcccgtgaagttttagacgatagtcggcacgtgattgcccaaagcattaacgcagctgacgatgacattatctttaccagtggtggtacagaaagtgataatacggcggtgatgcagaccgcgtggacgcgccaacatttaggcaagcatattattacgacggcaatcgaacatcaagcgattcttaaatcgactgcttttttggcagaacatgggtttgagattacttatttacccgtgaatgaacagggacaaattagtctggatgatttgaaggcggcactacgtcctgatacgattctcgtctcaatcatgaccgggaataatgaagttggttcacagatgccaatccatgaaattggtgaattgttaaaggatcaccaggcatggttccatacggatgcagtgcaggcctacgggttgttggatattgatgtgcaacgggatcatattgacatgttgtccacctcagcacataaaatcaatgggcctaaattcttgggcttcttgtacagacgcaatggcattaactttcctagctttgtcaagggtggcgaacaggaagataagcgccgtgccggtactgaaaatatcccggcaatcgcgggctttgccacggccgtgcaagaactgacgaccgctgagaaagcccaccggcaggctaagtatcgtgagttcaagcaatacatcgttgaccagttaacggctaacggagttgattttgaagtcaacgggtccctcggtgagcataacttgcaacacgttttgaacttatggatcaaaggggtatcgacctatacaatgcaaactaacctggacttaggtggtgtcgcagtttctgggggctccgcatgtacggcggggagcctagaaccatcacacgttttaattgcaatgtatggtgaagactctccccggatcagcgagtcgattcggttgagctttggtcgctatactactaaggctgatctggatcagtttgtaacggtgctgacgaagacgacgcagcgcttattaaaaagcagggggcgtgacgatggcatacacaacaacggttaaactagatggggatactaagacgtatacgctgagtccaacggtcaagaaatacacgttgatggatttgggttttgtgaaaggtcgctcgggcgcgtttagttttgaacgttccttggatcccacttcaccctatcaagcggctttcaagctgaagatgacagtcaatgcggatttgactgggtttaagatgacgacggtaacgggcaatggtgtccaacgggcaaatattttcaaaaatgacgcccatccggaagctgttgaacaattacggtatattttagctaactttattgaacgggatgtcctcacgacggactaatcagggaacgcctggcttgcagccggcgttttctttgttataatggaacttactggacttgtacgaccttcaaatcgtggattctccagaatcttttggaaatgatggtgaaaagtatgactgatcacagtaacacgcgtgtcgttgtcggcatgagtggtggtgttgattcatccgtagtggcgttgctcttgaagcagcaaggttatgacgtggtgggcgtgtttatgaagaattgggacgatacggacgaaaatggtgtctgtaccgcgaccgaagattataaagatgttgccaaagtggcagataaaattgggattccttattactcgattaacttcgagaaggaatattgggaccgggtcttcacgtacttcttagacgaatacaagaagggccgcacaccgaaccccgatgttatctgcaacaaagaaattaagtttaaggcgtttttagattacgcgatggatttaggggcggattacattgccactggtcattacgcgcggttacaacatgatgaagatggcacgatgcaccttttgcgtggtgttgacagcaacaaggaccaaacttatttcttaagtcagctggattcgaagaccttacaaaaggtgatgttcccacttggcgaaatggtgaagcctgacgttcgtaagcttgctttaaacgcgggcttggcaacagctaagaagaaggactccgttgggatctgcttcattggcgaaaagaacttcaaggaattcctaggccattacttaccagcaacgcccggtaagatgatgactttcgatggtcaggtgaagggtgagcacgccgggctgatgtattacacgatcggccagcgccgcggacttggtatcggtggtgatggcgaggataacgagccatggttcgtggtcggcaaagatttgaagaagaatattctgtatgttggcaagggctaccataatccgcacctgtacgcgacccacttaaaggcgtccgatttacactttgtgactgatgaagacttaggtaatgacttccacgtgacggcaaagttccgttaccggcaaaaagattctggtgtgacggtgcattttaatgatgaccacacggaagttaccgtgacttttgatgatccagttcgggcgattactcctggacaggccgttgtcttctacaacggtgaggaatgcttaggttccggtatgattgacgctgcttataatgatgagcgcgtcttacagtatgtttagttcgtaattggtttaccgctgatcaagctgagcttgattagcggttttttttgtatgtattgggtcggccgtggccggcgtacgtcaaagcttaggtcggacttgcttttcttgactaggttgattaagctaaatggagtatgatcaatcggactgattggttataatcgataagctgttgtgggatggaatgattatgagacaattagcacattttaaattttttgatacgctatctaagaaaatggtagccggttttattatcttaattctgattgggacagtcttactgagcctcccatgggcgacgccagcaaacgtgcacacgtcgttgatcgatgtgttgtttacgtcggcatcagcgacatgtattactgggctgaccgtcgtcaatactgctgcgcactggacaacgtttggtcaattggtgattctggtactttcggaggtcggtgcgctgggctacatgacctttgcggtactcctctttaatattatgcgtcgtcagatcggtctctctacgcagttgatggtcaaggcctccctgaatttggaacgattgagtgatactaaaagcgttatgaagtatgtcgtgggtttgtcactgctctttcagctaggcggtcttgggttgctcgcaattgattttgtacctcgatttggttggcgtcacggattgtatgtgtcactataccatgcggttatgtcattttgtaatgccggttttgatgtgtttggcgatagtctgcaaggctttcgtaatgatccatacgtcttgacggtcacgatgatcctaattattgcgggtggccttggatttttagtttggcgtgacgtgctgctgtaccatacgcgtaagcgactgactttaaattccaaactgaccttactcacaactttcagtttatttgtcatcggttttgtcttgttgttgatcactgaacgtgacttggaactgttgccaaccggaatgtcgtgggtcaaccgaacgatcaatacgctgtttttaagtgttaccccccggacagcgggtttaatcacaatgcctactcaaggattgcaagcggggagtttattggtcattatgattctgatgttcgttggtgggacgcctggatcgactgcgggtgggatcaagacgacaacgtttggcgttttgatgttccaaagtattgcccagctacgtggtcgccgtgatgttgagtttagtcatcgtcgttttagtcaggagaatatcaatcgggcgctaatgctgattttcttggctagtattgtgctgacagtggcaacactgatcttaacgcagactgaaaaaattccgaagggcttcgggttggaatacgttttgtttgaagtgttatcagcatttggaaccgtcggactcagtttgggattgacgcccaatctgactttgattgggaagattgtaatcatgatgctaatgtttattggccgggtggggatcttcacgtcactctacgcgctttccagacgtcaagctagggtgaacttgatccgttatccggcagaaaatattttgattggttaggtgggcaacatgcgaaaaagttttgctgtatttggtctaggacggtttggtgagagtgttgttcgggctcttgccgcagctcatcaggatgttttggccgttgatattaacgaagaaccagttaacgagctaatggacgtggcgacacagacaatgattgctgatacccgtgacgagcaggtgttgcgtgatttgaacgtcgatacgtttgattatgtgattattgggattggcaataatatggaagccagtattctgacgacgatgttgagcaaggagcagggggcgaaaaaggtcatcgccaaggccgaaactagcgaccaggggcgggtccttgaacgggtcggcgctgaccaagtcgtatttccggaacgtgatatgggtcagggcattgcccaccgcatcctttccaaccatattttaaactttattgacttaagtgatgagtatacgttggccgcaatcgagattacggatccgaactttgttaatcagaatctgatcgatttaaagatccggcaacgttttggtctgacggtaattgcaatcaaacacgagaaacacattgatgtctcgcccaagccgacggatatgatggccctccatgatgtgattactgtggttggtccagttaagggcgttattgcgttagatgaagcgttaaaaaaataaatgaattaatgatgtaaaaacatcaaggacaacgggccttgatgtttttttggttacaagggtgactgggtatccacgttgtggccggttatcaccaggcgtttaattaatatggaaagttaatgaatcaaaacataacccacagtttcgattggtatacatgataaactatggttggcgtcaggggaagaggacggtgaaagcggaatcataaagtgattagtaaactaatatggtagcaggcgactggaaaagcagtcgattgagaaggaggaagcaacatgcgaacttttaaattaatgaccgggttgagtggtggcgcaactttactatcacttgcgctaatgcccctagcggcgttagcggccggacccggaacagcaagcaacaatttgacgacagtttcgtctggttatgttgcggatagcacgggtaatgcggaagcgttatcgaatgcacaattcacggttatgcccggtgaattaacgttggatgctgtgccaaatatcgcgttaagttcgaccaacgttaagaatattgcatctgctgccacaacgttaaatgcaacaagtagcaatacgtcgggaggcagtggctatgatggcaatggtagtggcaatttaaacgttagcgactttcggggaaatcatgctggctggacgttgacagttgggatgggaccgtttagttcgggagcggctaaagttgactcggccacattgaatttgaatatgaccaagggtaacgctgacaatgctaatactgccgcgccgaccgcattgagtttgaatcagagcgaagtgacaaacggatgggtcgcgagcccacaaacgttatggaatgctgctgcagatagtggtgaaggttcaaatacagcgacgactgccacgagcagttcattgcaagtcggtaagcagtccaatatttctgctggaacttacacagcaacgctttactggacgcttcaaaatgcaccagcagcagctgcagcaacaccaaaagcagcttcataggttcagctgatcatcgcgcgtcgttattcaatgattaagtgaagtgggggtgtttagaatgcgatggaaacaaatcggtcagtggtggttattagtgttggcattgctactaggcgggcttttagggtcattacctggtcaagcggcatctaacacacccgcatcgggttttattctgacacccctactgcccaaggatcaactagataagcaggcgggttactttaatatgaaggtcacgccgggaacgacgtcaacgttcagagtctccgtcagcaatcctggtaaatcagcaattacgttgcaggtaacaccggtcaacgcaacgacctcagatgcaggcagcgtcgcgtacgtgccgtctaagcggcatgacccatctgccacgacgacgtttactgacatgacgtcaagtggcgtcgtagttaagttagcggctcatcaagcgaaaacggtggcttttaagaccacgattcccaagtctgggttccaaggggaggtgttaggtggcctctttgtcaccaatccaaccgccaatgcggcccggccaacgacgagtcaaggttttatgttgaagaatcgctatgcagaggttacagcggtggcgctttggtgtcagccgcaagtgacgattccagttaagttagtcctcgatgaagtcaaagtgacgcccaccaatgggcaaccagtactctttgccaaactccgtaatctgacgccgacactttttggacaactcaaaattcaagcacgcgttattcaacgcacgacgggaaaaaccgttgccacgcagcaacttaaatcaggatcaatggcaccgaatagctggtttaactatcaagtcgcgttgggcacgcaaaacttagccgcagggaagtaccgactaaaattgcatctaacgagcggccagcgtgtctgggatttcacccgtgactttaccttgactgcagaacggacgcaacaacataatcatcatctggttggaccgcgtcaggtcaactggtggctgtggggtgcagtggcactagtcattctcttagcacttctaatggcggcgtactggtttggccagcggcgttcgcgtaaggagtgaggaacgatgagaaagttgatcaaggcttgtggcctaatggtgataagtatgctggttggtttaggtatcgtcacgagtgccttagcagccaaaacggcgccccaatcgccaagcagtccaccgagttccgtcttaggcttgaatctatcgggcggtttttcacaacagccaatcgattcaaatgtgattggtggcaactcagtaacgctgtcggttcgggcccagcgcagtgcgcttgaggcggcgacaagtctgttgagtggtcgcaagtacgtttggtgggaatcgacggatgaggggcaaacctatcagaagattggcactaatagtcgaacctatactttcaatgcgccgcaagtgaccaaaacaacgcatctttattttcaagtccagtatgatttctctggtgttggggcgtttcctgattattggtccaaaatcgcgaaagtgacggtcacgccagcccgggtggtaacgactggcatcaaagtgacgagtgatgacgcgtggctcaataatgcacaaacgaccatggtacatgcagcactgacgccagaggaagcaacggattcaattacttggaagagtagtgacccgtcacttgcggcagttgatgaatatgggaatgtgaccgcagcggatgccgccacggataattccggaaaagcggatgatcacggaactgtcacgattaccggaacctctaatggtctgagtgatagcgtcaaaattttggttggagcgttacaagatgtgacggtcgtagaagggacgccggcaacatttacattaccagcattgcccgagggggtgactgttagcaattggtatcgtgtcaagaatggtaaggctacagccctcaatgtcacggatacgagttatacggtcaaggtaccgaccaatgcggatgatgatggaacggcctactatgcgagtctaagctatccggtcaatggcaagccacagacggtgacgaccaacgccgctttgctaacagttaagagtggtgggcggttatcattgagtgccgttcctaattttaattttggaacgttaaacctgcagcgactcgcacaaggtactgacttggcgacagacccgacggccgtaaaagctaatgacggttatgacggtaataatgactatcggttggccgtggttgatgaccggactgttggggctgactggcagttaatggcgagtctgagtccctttactgctggaaatacaacaatcaagacggctcggttaatgctcaaagactcgacgggagtgctcaatcaaacgataccaacggatggttcgacaaccagcgtttaccggcaaactggtcatcagagtcaaacttttgatgtggcacctagttcattacagttaccagcaacaccattggcaacgcctggtgagtatcaaagcattattacttggaccttggcgattgtgcccgctgcataataattagtggtggtaagtagtgtttcaaagctacttaccacttttttgttaaagcagggtaatgctggagttgaacttggttcggctgatttagtttacataattatatttttattaagtagattggaaaaacgacgatttactcttacggctgagtagtacggtgaataacagccattggcagtatggtgtagcagttgcatacttagtggctaaaagataccatgcccggtcaactgatcgtgtttatcaaataatagcgtgatgatcgttaaaattcgtgaacagattttgaaaatcagtctgaaaactgtcataatatagaacgtaagacgtgttgcgagcgtgacgaagtatcacgaccatccgccacgtcatttgaagtattaacagggttggcctaacggcgattgacgatgagttgcaatgatactgctgaatcatcgcaaccgttattcagtttggaggggccattgctcgaaaataagatcaaatcaagacactagagtaaggaagtaagcaattgacaaaactattatttgttcgccatgggaaaacagagtggaatcttgaggggcgctatcaaggctctcagggagattcaccattattaccgactagttatcaagaaattcatgaattggcagcggcgctccaggatattcggtttagtcatatctatgtcagtccgttaaaacgggcgcgtgatacagcgatgacactacgtaatgatttgacacaatcagagttacccataacggtactgagtcgtttacgggagttcaatctcggtaagatggaaggaatggccttcacggatgttgaagctacgtatccggccgaattcgacgcgtttcgaaatcatccggatcagtatgacccgacagcgattcagggggagagctttcaacaactgctgaagcggatgactcccgctattaagcaaattgttcaagcaaatccacgtcgcgatgacaatgttttgatcgttagtcatggtgcggccttgaatgccttggtcaactcattactgggagcgacactggcgacgttacggcaacggggtggcttgtcgaatacgtcaacaacaattttagagacgcgtgaccgtggtcaacattttaagctattagattggaatgacacctcatacctatcacggcggcccgatgcaactgatacgatttaatatagaaggaagtggttcggatggcaaaaacatcacgtcctagcaaagctaaacagcaagcactagtccatcaactcattggcaagattgatgcacagcccgaggactaccatgcttattatgaactagtggtattattaacggctggtcaagattttgaacaggcagaggcgttagcaatgaaggcgttgggaaagtttgaccaccaacaacccgcagccgactacctgcgttatgcgttgggaaatgtctattatcaagctcaaacttatgacaaagcgttaccatattatcaacaaattacggatgatcaactaaaacaggatgcttatttaatgagtgcacaagctttaatggcccaacacgattaccaacatgccctagtctgggccattacggctcaagaggcacgtccacaacaacttgacgctaatttgttagtagcagacatattacttgcattaggcaataatcagcaagcatcggattactatcaacgcgcatataagattgattcgcaatctgggcgagctgcttttaaccttggactgaccgcaatggtactggggaaaccgtatgccacctggtttgaacgcgcgcagaaattggacagtcaatattttaaaagtcatcagcaacagctaacggatattgaaaaaatgttagccgcacaagcagataatcaaaatcactaatttaggaggatttccgtgacggacgaacaagcacatttattttccgacgatattggtcgggaaccggtcacacactttatcgtcggtaaagtcgctgccgttttttttagcagtgccgatagtttttataaagtcttattagtcaaagtaactgaacagaacattgattggtcggaagatgagatcgttgttactggaaattttgcggatattcaggaggagacaacgtatcgttttaccggtaaaacggtcacgcatcccaaatacggggttcagtttcaagcggataattatcaaaatgaaacgcccacgacacgcgcaggcttgattgcctatctatctggtagtgattttcctgggttgggtaagcggactgctgagcgaatcgtcgatactttgggcgaagatgccattgatcaaattttagctgatccgaaggttttaaaaccaatcggacttcgggccagcgttcagacgactttgatcgacacgctcacggtcaataacggtttggagcaaactatcattggacttaatgcgtacggttttgggagtcggttagctgcggccatctatgcacgctatcaaggtgacactttggctaagattcaagagaacccgtactgtttggttgaggatatcaaaggcgtcgggttcaaaaaagcggatcaaattgcggcccaacttaaaattgatccccaagcggatgaccggttaaaggcggccctattgactgagattaatgagctgtgcgtggaaaacggtgatacgtataccacggctcaaccgttgctgaatcaaacgttgcaactacttgagaatgctcgcaatgttcaaattgatccttcgaagctggctgatcagttggtcgtcttggcgaaggaaaataaaatcgtgggtgacgagaatcgtatctacttgcgcggcctctatgaagccgagtggcgcgttgcggaacatttacaacggttgttagccgccgataatgatgaaaaattgtctgaacgtgccgtggatcatgctatcgagcatgtcggtcgagctagcaacattacttatgatgaatcacaaaccgaagcactaaaagcggcgattacggcgcctgtttttctactaactgggggaccggggactggtaaaacgaccattatccgtggcttagtcgcgctctatgcggaattacacgacgttgcactagatatcaatcagtataaggataagccttttccaatcctgctggcggcaccgactggacgggcagccaagcggatggctgaaacgactgggctcccagctagtactattcatcggttgcttgggttgacggggcgtgaagatggtcccgaggagcctagtaaggaattagatgggggcctcctgattattgacgaaatgtcgatggttgacacggtactgtttcagcagttactgacggcgattccaagtcacatgcaagtcattcttgttggcgataaggatcaactgccatcggtaggagccgggcaagtgtttcatgatttattgcagtttagtgaactgccccaaattgagttaacgacaatctaccggcagggcaatgattccagtattattccgttggcccacgccatcaaagatggtcatttaccggccgattttgccgtcaaccaaccggatcgctcatttattgcctgcaacgcttatcaagtcaatcacattgttgaacaagttgtggcacgtgccaaggcgaagggcttcagtgctgaggaggtccaaattctggctccgatgtatcgcggcactgccgggatcgatcagctgaataccacggttcagaaaatctttaatccgttgaagagtgcccatcagaagcatctaacgtataacggtcaagattttcgggtcggtgataaggtcctgcacctcgttaattcacccgaggataatgtttttaatggcgacattggtaaaatcgtcggtatcgatctggcaaatgattctcacaatgaatcgaagaaagaccagatcacgattgcctttgatcaaaatgaagtgacttatcaacgcaatgaatggaatcgattgacattagcgtacagtatgtcgatccacaagtctcaagggagccagtttaaaatggtgattctgccactggtaccacaatttgcacggatgctacaacgcaatctactgtatactgccgtgacacgtgctgaacaaatgctgatcctgttaggtgatagtcaatcatttgagcggagcgttaccaatgaatcggttaatcgccaaaccacactgacgaaacggttacaacaagtctttggcggggataccgtatccgatgaaacggccactattgcgactactgaccaagcagaggcaatgccagccggcgaaaaagcgacggcggttaagaaagttgcttctgacgaggagtcggccactgaaaaaactcaggaaccgagttcccagtctgctggaccaacaattttgaccccagcgctagtcagcgctggccgaatcgatccgatgattggcatgaatggtatcacgccagctaatttcatgccgcaagtagctaattgataattaattggttattgcaactgaaattacaatgaacgacacattgtcggcgacgctcattatgcaagaaaatttgcttgtgtgcggtttttagccgtggttactgctataatcaaagtagcaaaatcatcaaacaacttttatggaggtcgttatgtcaacagatcaatcttatgccaaactgaaactgtttgccctgaattcgaacctaccgttagccgaaaaaattgcgcagcgggtcggaattccactcggcaaaagttccgtaaagcggtttagtgatggtgaaattcagatcaacatcgaagaaagtattcgtggggcggaagttttcgtcattcaatctatttcggaaccggtcaatgatacaatattagaattattgatcatgatcgatgccttaagacgtgctagtgccagtcaaattaacgtggttattccttattacgggtactcacgtcaagatcgcaaagcgcgttcacgtgagcccattactgcaaaattaattgcaacgttattggaaaaggaccgggccagtcgagtcttgacggtcgatctgcacgccgcacagattcaaggattctttgatattccggttgatcatttatttgcggccccactcttggcaagttattttaaagatcgcggcattaccgataatctcgtcgtcgtgtcaccagatcatgccggtgtttcgcgggcacgtaagatggcagaactattgggggccccaattgcgattattgataatcgacacccagatgatgatgacctagtgccaagtagtattattggtgatgtgaaagggcgcgtcgccattgtgatcgatgatatgattgatacgggaactcggttcgatgtctcggcagatgctttagcacaagcgggagcagcgaccgtatacggctgtgcgactcacgcaatcttttcacaggatgcagtggctaaattacaggcttccaagttcgagaaagtcatcgtgacggatacgattcagatcccagcggataaacaatttgataagttggtgcaactttcggttggtccattattgggtgatgcaatcaaattagtacatgaacagcaaccagttgatcggttgtttgatcctcgcatctagctcgcaactttaagcacattaacctacaaaaaggttaatgtgcttttttgttcgtttactgaatagcgtaactcgtccaaacagtgcaactaattacttgaagtaatcaaaagataacattccgtttatatgcataaacgttgctataacagccaaatacgccgctttggcattggcaaacgttttttaaaataaccggactgttttgtaaaaaaacgagcgattctagtttgtactttggtaaattgtgctacaataaaattatgatttgtaaaagcaggttaagaatttcttaatcttcagtcacaagacgattttgttactgttaatttgagttcaaaaactaaggagtgaattaaatgtcacaagcacatacaacgggcaaggtcctagccagtacggttggtgccgttggtttattgcttgctacaggccaagctgccaatgctgcctcaatcactgtaaaagcaaacgatacagtttggggcctcgctcaacaacacggtgtttccgtgcagagtattgaaaaacttaaccagattaaagcatctgatggtaatatcgatttaatttatgttggtcaaaacttacaaattggtggatccgcaactaagaccgccacgactaagtcagcaactaagaaagccgctactaagggtacatataccgttaaagcgggtgacactctttgggcgcttgctgataagtacaacacttctgttcacgctctccagacgttaaatggtctttctggcgatttaattgtggtgggtcagaacattcaagtgccaggagcaacgaccaagacgaccgctaagacgagtcaaaaaacaaccgtgtcagctactagtgcagcgtcaactacgagtacgactgccaaggccacgacggctgttagtgcgagttccacctcaagtacaagtgcgagttcggtttcaagtgtgagtgcaagcgttgtaagtagcaccagtgcagcaagtcaggatgctgtcagtgcgaactcagcaagcagtactagcacgtcaacgatatcatcatcgaccggctctattgcttcatcaacggctacgacctcaaatgcaccggtcaaagcagtcgcaacgagtgcagccgtatcagcaagtagtgctagttcttcgactgctaccagtcagtcgaagagtgttgcagcgagcgcctcagtaacgagtagcgtgtcctcatcagctgctagttcaacaacgactagtcaaagtaccgcttcaactgcgagtgcaactagtactagcagtacgactgctactagcacagctagtcaagcatcaagtacagctgctagtgcagcatcaactacgagtacagccagccagagtagctcggcagcgactagttcaagcacgaccagtcagagtagttcttcagcagccactagcagtgcaagcaataccgcaagtagtaccgcaacgactaatagtagcagtaccactactagttcaacgagtgatttagctactggttctgtaaccggccttgcgctgaagttggctagtgccaacatcccttatgtttggggtggtgcgagtctttcgggaatggattgttctggtttagtttcctatgtttaccaacatgcagctgggattaccttgccacatagtacggttgcacaggaatcttatgtgacgacgcattccgttgcggatgctcaacctggagatattttattctggggtagtcgtggtagcacttatcacgatgccatctatattggaaataatcaatacgttgcggctccaactgaaggccaaaacgttcaagttcagacaatcagttcatacttcatgccaagttttgcaggtacggttaagtaagccgattttaattgctaatccccctaacacgatattgttaagtgttagggggatttttatttaaatttttttgaattttatgatttaaacttaccaataattgtggtatattatgtttgtcgtttttcaattcgaaaaattggaccatctattgtgataaggaagtgctatcagtgagtaatcgttttgagattctagaagaatatcaagaggctaataccgaactcgatcatttaaggacgctagccgttcggcaacaggatcgctcacgggttgtgaccatttatccgcatttgaaagaacgggtgagtcacttatctcgtaaatgtgaacaacttgacatgcttctggaagcaatcaacgcttctgaggactaagattaatcaagactgactgtgtgaccatattgagatggtcagcagtcttttttattagccgagtgggtggggagtcaattaagtggtcattagcattgctggccggtaagtggacggtgctcaagtagtatgaattgccaatctgggtcctataaaaaagtcgttgcgagcatcttcgcaacgactttttatcgttaatttgtattgttttagcagtagagttagtggtggtcatggatactagtgtcgatccagaatgggtagggatgggtggacaagtagaggtcgtagttacgattcccaataatttgaccatccatctgaccaatttcaacagagttaaccaacaagtgcaagttagcgttgcgataatggtgaacgaaacgcgacttgagatgacggccacccagtagcagtaagacgaacaaccagaggataatccaccagtgaggctcttcgacaacgattaattcgagctgatcatcgtgcagattagcctgaggcagaatttcaactccgccaccaaagtatggaatgttcgagactgtacaaaggaaagcccgcttataatagtctcgcttccggttaacgtgtacggttagcgggaagccttcctgttgggaatatgcggccagcatgttactgagataagcccaacgacccagacggcccttctttttgctacggtttgtgtcatcaacgatttgagcgtcaaatcctaaaccaacgttgttgacgaaataccggtgttcgtttttcaaggtttcatggaaataaccaacatttaacgaacggggccgcatattgttgagtacttgtgcaagtgcaattgctggatcagtcgccatacccagaccgcgagcaaagtcgttgcccgaacctccaggaatgtaggcgagcgggatcggttcagcttgtgggacctgcataataccattcaaggcctcgttcagtgtgccatcaccaccaatgaccagaatgaccggggtcacgtttggtcgtcgttgaatggttttaacgtactcatttgcgagccgaattgtgtggccggcatattcagaaattcgatattcaaatcgaatctgtcgttgttctagaatcggcttgacggtttcccaaacgaccttaccgtgaccagatcctgccagttcattaataataatgtagtattcagcaatcaaaattacacctcatatcagtcttacaccataaaaaaccggaacgagatcgttccggcaagtagttagttcataatcaacattggcagaatcattgggtgccgttcagtcttatcaaataagaaactctgcaggtcgtcaataatcgcattgcggatagtcgcttcggttgctttatccgacttcattttgcgccggatcgtacggaagacatgccgccgggcttcgttaattagatcgccagactcgcgcatgtagacaaaaccacgtgacagaatatctggaccagcttggatctcttttttgttcaaattgatggtagcaacgacaacaaccaaaccttcttccgaaagcacttggcggtcgcgtaacacaacgttaccaatatcgccgattccagaaccatcaatatagacatcgccagcaccaaagtgaccggcaacccgggcagaatccttcgtaaaggcaagcacatcaccattttcaaggataaaactatggtctagtggcacaccacattgttcggccagttcggtgtgaatcttcaacattcgatattcaccgtgaatcggcataaagaactttggtttcatcagccgtagcatcagtttctgttcttcctgaccaccatgaccagatgtatgaatgttattgactttaccatgaatgacattcgcaccggcttcttcgagttcgttgattacgtggttaacacttaacgtattaccaggaatcggtgaacttgaaaagatcacggtgtcgccaggttcaatagaaatctggcgatgagtaccgttggcaattcgcgagagcgccgccattggttcaccctgggaaccagtacatagaatcatgactttattggcggggagggagcgtaaatcgttagcatcaacgatggcttcgtcaggaatgtttaaatagcctaattcacgtccgttgacgatagctgcttccatactacgcccaaataccgcgattttacgatgatgttcaagggcgacttgcgctgcctcttgaatccgcgagatgttagaagcaaaggtagcaaagatgattcgaccttcaacttgttcaaaaatgtggcgaattgattgcgccacccaccgttcagatttcgtccagattggccgttcggcgttagtactgtctgacattagcgccaagacaccacgttcaccgagatgcgccatcttttgaaggttcggcggctggttagtaattggtgtcagatcgaacttatagtctccggtttctacaatcgtgccaggtggtgtttgaacggcgattcccagtgtatcaggaattgaatgggtcgttctgaagaacgagacacgcgtcttacggaacttgagcaccgtatcttcattgatctcgtgtaattcagttgtttttaataacccgtgttcctctaacttacccttaatcaaggctaaggctagggggccggcatagattggcacgttgatctgttttaataggaatggaatcccaccgatatgatcttcatgaccgtgcgtaatcactaaagcttttattttttgctgatttgcaactagataagaatagtctggaataacgtaatcaattccgagaagttcatcttcagggaatttaattccggcatcaatcagaataatctcatcttgaaattggataccataggtatttttcccaatttctcccaaaccgccgactgcaaaaacagcggtttcgttatttttgacgtttaaccgtttcatttattgaactccgttaggtgatactctggatttttttgttcgtaatccaagaagttaccttctaacggttcgataaattcgatgttgtgatctgtattatcttccactaaggtccgtgccgctacttcggtctcagcttcgagatacaaagattgggtcgtttcccgttgtgggttccgttctttggtttcttggtaatatactttgtaaatcatgcgtaaaactccttaatataaacaagatttatttagatactaagtaatctaaatagatagcaaaaataaaagtttgatccgtacaccaggttgtgtaaacacaacaattatcttacattttagcataatttgagatgggtgtatacaatgttaactttcttcaaaaatagagcggttaaaagaattttttttgatgaaacatgctatgctaaacataagtaataaaatgaaaaattcctaaaattgtgaatcattatacaaaaaaagaattgagggttgagcatgcagagttggttaacaatcattggtggggtactaatggcaatcgtcgtttatgaattgctgcgacggcaagtgctgaagcgtgcggcgttgaagattcggcgggctggccaacgaacggttgatagtgcgatggtagcagcattcaaagtgctcgcaaatgcgatgacgattcaagaggttgcgggggcgattcattcggtgcccgtcgcagacgtctgggggcgtggtgtgatggcctttgagtacgtgctagatgcaccaggcatggtcacggccgatttgccagaagttcggcgattattcaataacgaattgcaagcgtacgcaattcacaatcaggtggttgcttttcgggaagctggaccagcgttacgagtgactgatgcgtggctgcgcagcggacagctccacttagatattgcctatttgatgaatgaggccactttagagtatttggaagatttgcgtcggttgaattcgagtgcaccaaaaaagcagtcctgaacatttcaggactgcttttttaaatgactttaagaaattagaactaaatcatcatcagcggcaaatggattgtcgccattgatatggtcgtagaataaaataccatgaagatgatcaatttcatgttgacaaacaatggccggataattcttgagacgaatctttttctcttcaccagccatattatagtagcgtaacgtaatccgatcgtgtcgaataacgtagccagcaatatcacggtcgacggataaacaaccttcaccttcagttaaggcgccgggttggacggagtgactgatgatcacgggattgataatgacgtctttaaagaccggttcatcatcttcattttcactcggaacaaggacagcagccatctgttccgaaacgtcgacttgcggtgcagctaaaccaacaccggcacgcagtccgtattttttagccaattcgggatcctggctgttttctaagtattccatcatgtcattggccaacttctgatcagcttcactcaacggaaatttaacttgctttgcttccgcgcgtaacgtgtgattaccttcgcggataatgtcgcgcattttaatcaattccaattacctccaaaattaagatcgcgcagtttacacttaatatctagtttatcataagcctacgccaaaaagtagcgcccgttatgaaaaagatgaaaacagaattaagcacaaattaaatagttcacaatcatttggacagaaaaagccggcttttcgctctttggaagggcttgcaaaagatgaaacgcaatggtaaattagacttgtaattatgaaaacgattacgaacgcggtgcgatgcacaacgtttgtacgttcatgaaagggatgtgtcatttatggacaacgaaaaaccaattgttgattttggtgcgatccgcgatgcacttgggaaagactttgagcccgtgcaagtattggatggtcaagctaaagtaattaaaccagaaattgtctctaaatattcaaacgaacaactcgttgaattctttaaattaatgttatgggaacggacgttacatcaacgttctaacgctttgacacggcaaggacgcttaggattctatgcgccgactgagggccaagaagccagtgagatggggagtaacgccgcgatgaagaaaaccgacgttttaatgcctgcttatcgtgatattccacaattgattcaacacggactacctgtttacaaagcgttcctgtggtctcgtggtcatgtcttgggtaacgaatatccagaagacttccatgcaatgccaccacagattattatcggcgctcaatacgtacaagctgccggtgtggctttagggattaaaaagaacggtaccgaagacaaagttgcctacacttatactggtgatggtgggacttcgcaaggtgacttctatgaaggtatgaactttgccggagccttcgaagcaccggccgtcttcattgttcaaaacaatggttatgccatttcagtaccacggcgcaagcaaacagctgcgaagacgttggctcaaaaagcagttgctgccggtattccaagtgttcaggtcgatgggatggacttcctagctgtttatgaagtaacaaaggccgcccgggaatacgctgctgctggcaacggtcctgtcatgattgaaacgctgacataccggtttggcccgcatacgaatgctggggatgatcctaagcgttaccggactaaggacgaagaacaaccttggttcgataatgatccattgattcgttaccgtaagtacttgactgatcaaggtgtttggtcagaagatcaagaaaacgaatacgttgaacaagttaaagaagatatcaaggctgctgttaaacaagcagatgaagcaccaaagcaaaaaatgaccgaattcttggggaatgtttttgaggaacaaccacaaaacattcaacaacaaattacggaattccaagcaaaggagtcgaagtaacatgtcaaagaaaacgtatattcaagcgatcaccgatgcacttcgattagaactcgggtcagacgaaaagaccttagtttttggtgaagatgttggtaaaaacggtggggtcttccgggcaactgatggcctgcaagccgaatttggtgaagatcgtgtttttgacactcctttagcagaatccggtattggcggtttatcaattgggctggcattggaaggtttccggccaatccctgaaattcaattccttggattcatttttgaaactttggattcaattgctggtcaaatgtcacgggaacgtttccggacaggtggcactcggcatatgccgattaccattcgatcaccatatggtggtggaacgcatacaccagaaatgcacgcggactcattagaaggctatttagctcaaattcctggtttgcgggtcgtgacgccatctaatccttacgatgccaaggggctattaatttcttctattcggaataacgatccagttttcttccttgaaaacttgaagttataccggtcaatgaaggcggatattccggatgaagcttataccgttccgttagataaagcaaacgtggttcgtgaaggtactgatatttccttgattgcttacagtgcacaagttaaccagtcactgaaggttgcggaaaagctcgaaaaagaagaaatctccgttgaagttgttgacttacggaccttgtcacctttagatgaagaaacaattctcaagtctgttcaaaagactggtcgggccgttgcgattcaagaagcacaacgacaggctgggattgctgcgaacgttgcttcactgattgctgaaaaaggtgcgctttatctcagtgccccagttggccgggtgtacgcaccagatacggtctacccattcggattagcagaagacgattggttaccagctgaagatgaaattgaggcaaaaacccgcgaaatcttgaactattaatcaagacgcggcatcgaaaaacagtcacctgagactgtcatgaaaggaagttatccaatggcttacgagtttaaattaccagagcttggtgaaggtcttgaagaaggcgaaattgcatcatggctcgtaaaacctggtgatgaagtcaaagaagacgattctctagttgaaattcaaaatgataaatcggtggaagaattaccatcgccagtaagtggtaaagttattgatattttagttccagaaggtgaaacggctaaaattggtgatgtgatcgtcacgattgacgatggttctggcgacgctgcgccagcggctaaggctgaaacaccagcggctactaagacggaagccccggcaagtgaagcagctgaaactcccgctgcaacatcagcacaaccgactggaaccccggctgcgggcaatcctaataaacgggtcttggcaatgccatcagtgcgccagtacgcacgtgataaggacattgacatcacgttagttacgccaactggtgcccatggtcagatcacaaagcaagatattgacaattacacgggtgcgccagcggcaacgggtgctaaaccggcagctacgccagcgacaacggctccggctgcaagtgaagcaccagcaccaacaccagttaaaccatatgtttctgacacacctgaattagagacgcgtgaaaagatgacgccaattcggaaggcaatctctaaggctatggtgaacagtaaacacaccgcgccacatgttactttatttgatgaagttgaagtgagtgcgttgatggcacaccggaagaagtacaagcaagttgctttggatcgcgacatccatcttaccttcttaccatacttcgtgaaagctttggttgcggttttacaacaattcccagaattgaacgcgtcgatcgatgatgcaaacaaggaaattgtttacaaacactacttcaatattggggtagctaccgatactgaccgtggattgttagtgccaaatattaagcacgctgaaggtaagggcttgtttgcaattgccaaagaaattactgacaatacgcaaaaagcttacgatggcaagttaaaggccagtgaaatgagtggtgggtctattactattagtaatattggctcaattggtggcggctggtttaccccagttatcaaccaaccggaagttgccattttaggtgttgggcgtatcggtaaggaaccttacgtcaatgacgatggtgaaatcgttgttggtaagatgcagaagttgtccttgagttttgatcaccgtctgattgatggtgcaacagcacaacgggcaatgaacttattgaagcaattgttacatgatccagaattacttttgatggaaggatgaggtcagaatggttgtaggagattttgctgaagaacgcgatacaatgatcatcggcgcgggccctgggggttacgtcgctgcgattcgggccgcggaactcggccaaaaagtcaccgtggtggaaaaggaatatatcggtggtgtctgccttaacgttggttgtattccatcaaaagctttgatcagtgctggtcatcggctacaagaagccaaggacagtaagatctttggtattaaaaatattcaggatccggtgttggattttaaagtgacccaggactggaaagaccatcaagttgttgatcggttgactggtggcgttgaaatgctgctcaagaagcataaggtggaagtggtccgtggggaagcctatatgcatgataatcataccttacgggtgatgaatggtgaccatactggtcagacttataaattcaaacatttgatcatcgcaactggttcacggccagttgaaattccgggcttcaagttcagtggtcgggtcgttgactcgacgggtggcttgaatttgcccgaagtgcctaaagaattagtggttatcggtggtgggtacattggttctgagttggctggtgcctatgccaacctcggtgctcacgtgacgattcttgaagggacaccgcaaatcttacctaacttcgaaaaagatatggtcaagcttgtcttgaacagctttaagaagaagggggttgatgtcattactaatgcgatggctaaaaactccgaacaagatgatagtggcgttacggttacctacgctgtcgacgggaaagaaactgagattcatgctgactatgttatggtcacggttggtcggcggcctaatactgacgacatgggcttggaatacactgacgtcaagttaacgaagcgcggcttgatcgaagttgatgaacaggggcggacggccgctgaggatattttcgcaatcggagatattgtcgccggtgctgcgctggcacacaaagcttttgctgaagccaaagttgctgctggtgcaatcagtggcaagaagacggcgaacgactacgtttcaattccggcagtttgctttactgatccagaattggcaacagttggcatgacgaaggctgaagctgaagaagccggcttgcaagtgaagacgtcgaagttcccatttgctggtaatggtcgtgcaatctcgttgaacgccatggacggcttcttccgtcttgtcagtacgaaggacgaaggcaccattgtcggcgcccaaattgccggaccaggtgccagtgatttgatttctgaattaagcgttgcggtcaatggtgggatgaatgtcgaagaccttgctttgacgattcatccacacccgaccctaggtgaagtagttcaagaagcggcggatgaagcgatgggttacccaacgcacatctaaagcggatgatggcttaataaaagtttgaggcgtgagtctcaaacttttattttacataggatgttgcagccagtatggattaccgaagtaccagtcaagatagtcacgtaaaaacgtaacttaacgcgctgtcaggcgcaatgaaggtcagtcttgttaatcattactcagctgatccgtaagtgacgcctttgaacctgatgcggatgttgttattcaaattgctaactttttagcatgtagtggtctatattaataacatatcaaaatgtgtttgcttcggggggaagtggaccaattggttacgcaaaaatgttacaaaagagtaagctttttattaacatttacttgaattcattgacagctcaggtacaattattatcgaaggttggagggattgaaatgattaatacagtaattattcggggattattcgagttcgtacaacaattaatattagtcgcaattgccaaagatttgccagtgaaattagtggtcgcaacgggtgctgaagaagcgccgcgctaccaagcactggtaacagcgagtttaacttgtcgtcagtttacactagtggcgcaagctaagccggattattcgcaagcagatagcttgattattggaaatttagtgccattggcaagcgaccgtgatgccagtggtgatttaaaggcgactttgccgctatttcgcgcgtttgtgaatgatgcgatgggcgctggttttaacggaaaaattattttggctggtagcaatgatgcggttttaagtgtcttagctgcgcgtttcagtggcattgatcattctaaagtggtcggattgggtactttgccgcagagtcgtttattggagcaactactacgtcagcaattaagtgtcggcccggcggatgtccgcgcattcgtagtgggaactgcggcgacacacctgatctcatggagtcgttcatatattgggccggcgcccgtgatgacttatttggctaaccaggatattagttttgggatggacgaaatgagtgcagcgacggagcagatcgacgaccccacgattgttactaatcagaccttgagtgtgttagcattagtacaagtgctcaatgcgttttacgcccagacaccgtttatcggtaccgtcacaaatatccaaacaccagtcgatgacgaccagctggttggattatcatcaccggtactgattagtgctaacggaatcaaacgaatggcggatatggtgctatctgatgaagagcagaaagaatacgctgagattgcgagccaggttcaagaggaacttgaccgggtcacggcgggggagttggatgaagatgcctaaacacaatgataattaccaatatccactggatgagacgtggaccacggccgagatcattaaggttacgaccttttatcaagccatcgaggccgctaatgaaggaacaatcgctacagcagacctgttggcagcctatcgtgattttaagacggtcgttccggctaagtcggaagaaaaacgactggctcgtgattatgaggctgcttcaggttatcggatttatcaaacaatgcgcgcagctcaggaaactaacaagcagcgatttcaataccgagactaggtgacttaacgtgcaaacgaatgtggtgaaacagttaaatcagaaaatgcaagtcgtgatgcaaactgcgagagcgcaagtgttggcgaagatgggcacccacttgacggttgcggagaagacgagtcggcgtgatttggtcactaacgtggatcatagcaatgaagattttttggtgcgtcagattcgagccttggatccagttgcgaagattttagctgaggaaggaaccggcgaccaagttactgatatgaatggtcacgtctggatcgttgacccaatcgacggtaccatgaattttgtgcatcagcgtaatcattttgcgatgatggtgggcttgtatgttgacggtaaaccaacactgggatatatctttgatgtcatggcgaataaattatatgctggtggtcctgaagtcggcgtcacgcttaacggtgaattgctggctgcacccgcggatgttgatctgagtgcggggctgtttggtgcgagtgcgccgttactaattcaagaccacttcaatatgcagacgattattgccaaatcactgggaccacggattatgggtagtgctggtattcaaattagccaggtcttagcgggcgaactggtcggctacctgtcatacttgcgaccatgggattttgcggctggtcgcgttctcgcggaaagccttggcttggttgtgtctagagttgacggcaacccggttaatatgttatcatcgggtgctgtactgatagcgacaaagcgcgcacaacgctcaattttggcaatcgtctagtaagtagtgggactgtgacccatatgtcacagtttttttatgtcaatggatgaaagccgctgaaaacgtcgttatgaaggtttcaagttgaagctatgacttgatagtaacggcggattgtattaatatatgtaagatttctgctgtcgaagatagtcagaattttgaaggatgaaaggaagatcaattttgaaatttagagatgatatccgcaacattgccattattgcccacgttgaccacggtaaaacgacgttggttaacgaaatgcttaaacaatcggatacccttgacgaacatgtccagattgacgatcgggcgatggacactaatgccattgaaaaggaacgcggtatcacgatcctttcgaaaaacacggccgtacgttacggcgacaaacaaattaacattctagatacaccaggacatgctgacttcggtggtgaagttgaacgaatcatgcgcatggttgacggggtattactcgttgttgatgcgtttgaaggaacgatgcctcaaactcggtttgttttgaaaaaagctttggaacaacacctaacaccaatcgttgttattaacaaaatcgaccgccccggtgcacgtcctgaagaggtcgttgacgaagtgttagacctcttcatcgaattaggtgctgacgaatcacaattagacttcccagtggtctatgtttcagctttaaatgggacttctagttatgaatcagatcctgctaagcaggaacatacgatgcaaccaatcttcgatacgatcatcaagacgatcccatcaccaattgacaactctgacgaacctttacaattccaagtggccttattagactacaacgattatgttggtcgggttggtatcggtcgggtcttccgtggtacgatcaaggttggtgacagtgtttctgtcatgaaactcgatggtagtaagaagaatttccgcgtaactaagttgtttgggttctttggtcttcaacgtttggaaatcaatgaagcccacgccggtgacttagttgctgtttctgggatggaagatatcaacgttggtgaaacggtcgctgattcagctaatccggaagctttgccaatcttacggattgacgaaccaactttacaaatgactttcggtacgaactcctcaccatttgcgggtaaggaaggtaagttcgtaactgcccgtcaacttgaaatgcggttgaaggctgaacttgaaaccgatgtttcacttcgagtcgatgatactgacgaacctggttcatgggtcgtttctggtcgtggggaattgcatttgtcaatcttaatcgaaacgttacggcgtgaaggttatgaactacaagcatctcgtccagaagttatctatcgcgaaattgatggtaagcgttgcgaaccatttgaatctgttcaaatcgatacgccagacgaatatactggttcaattattgataccttatcaaagcgtaaggctgaaatgaagaacatggaaagtactggtaataaccaaacccggttgactttcttagcaccttcacgaggcttgatcggttattcaactgaattcctttcattgacgcgtggttacggaatcatgaaccatactttctctgaatacctcccagttattcctaactggaacccaggccgtcgtaacggtgctttggtttcaatcaaccagggtaagactacgacatacgccacaatgggaatcgaagaccggggaacgatttttgttgatccaggtaccgaagtatatgaaggtatgatcgtgggccaaaacagccgcgaaaatgacatttcagttaacattactaagggtaagaacatgaccaacgtgcgttcttctaacaaggatttgacggcgacaatcaagacgccaacgcatttgacattggaagaatcgcttgaattcttgaatagtgatgaattctgtgaaattacgccagatcatgttcgcttgcggaaacgcattttgaacacgaactcccgtgaaaaagaagctaaaaagcgtaaaatgaacaagtaagttggttgcttggaagcacgtccttaatagggcgtgcttttttggtactggcatgcctaaggctgtatcgtccaaagcggtttgaagaggagtcgtttaatcaccaactcaaatagttgccccattaatggttattgggttcatttagtatggaaataatgattgataaattgttatccagagtatagtattagcttatagggtaaaaagagtctgatggtcttcgttacccgttaaaatggtattgaacttgggaggtgtgatcatcgtgaaaaaaattaataagttgatgatcttaggcatgctcgttttgggggtaacgggggcaacaatgatcaatcctgaaatgacgaccgcagcgcatgctagcgccaacatcaccattgatggcaagatgaacgactggaaagatgcgacgttaacggagggctataatggttacacggcactcacgagtgctggccagtatgtcaatgtttacgtcaagatgaaaaatggtgctgtgccaggatatggcgactataatttcactattgatggtaagacgtattatatttggtctaagaatatttcaggtagtgttagctcgggaacggtcaagtccttcacattaactggtggtaaatggaacgatggtacgatggtactcagtatggaactgtcgggacgggatatgtgaccaacgacggttcgcataattatgccgaatttcagattgacttaaccaagttaggattaactgacagtgcgagtggtaagcagatttcgatggtcaatccgaatatcggtagtgactctacgactagcactgttggaacaattacggcgacttcaactagctcaagtagtagtaccagttcaagtacaaatgcgaattctacaactagttcaagttctacgactagcaccagtagtgcagccagttcctcagcaactagctcagctggggtaattactgataaaagcacggtctcttccaaggcgtcctcgacgacggacaataatgcagccaatgacaatgataatctcaacattaaaatcgatggtaactttaatgattggaagaacgtgactttgaccgagggttataacggttatatggcaatggttagtgacggaaagtacgtctacgtttatgtcaagatgaagtatggacaggttcccggttacggggattataatttcgacattggtggtcagaagtattacgtgtggtccaatgagatgcctagctcgcaaagtgacggggcggtcaaagctgtctcatttacgggtggtaagtacaatgagggccatcagtacgggacggtcggcaacgggtatgtttctcaagccggttcacattcgattgctgaattccgagtggacttgagcaagttcgatatttcaacgatgaccggccaaacgattacgatgtccaatccgaatattggtaatcaaaaaatgaccgtggccgggggctcaactggtccgtacgtaatttccggtgtcggtgtcgtaatcgttgcttggggatactttaaattccgcaagcggcgtcgattaactgcaacggatttaccgaccactaagaactgatgattgataacatgttgtgctcgttattatttagcattaaccacgattaaaacgtgccgttcctttaaattcagaagcagccagcttaaacccgctggaaatagatacgagttggtgtaaacttgttttgctggttcgtcctaagccgacttccaggcatttctgccaattgctggaacgcggtggacacagatttaagccgcaacccacgtcttaaatactggtcttccactaaccaagccaaggacgcttgctaagtggaatttcaccgctgagcattggccgaaacgccttccagtcgggacagtgttcgaatggcggacatgtgcgtacccaacttttggtgaattcgtcattgtttttcataaaccataattttgtcaatcaactgtcagactgaaaatgatattgagatagctcactaatcctaaattgttgtagtgagatttaatctcttgacggagtgcttaatacacctaacgctttgtttaaaattccagtatcaaaatagcgaacaacaaattgtaccgagttcgatggtcgttcattaggcattcgagcggcttcccgaccggaggggctgggtgacaatgctcagtagccaaattattcttagtcggaagtgtctttcttccagcttagaataagactcgtatttgagatgacgcgggttatgcgttagctcaaatcgacgtcggctgcgttccagcaattggcacccagccccggaggtcggcataggacgcgcaccggctgatgaacaggaatctaaaattggcatgttttaatcatgattaaagatagattaacttgtacgatgtgaattgaatcgataactattgaactaatgatatttaatttactgacaatcaatttataaccaccggcggcttaggcgcgtcggtaagctaattaataggactgatgtacgatgaatgtaaagatcctactagggattgtgatatggttatacggactgtcagtgctcaaacgggctcggctatctgccttctacttcattgtgggaagcgccgggctcttttttatcttgacggcaattagtcgtccgtattgggtgtggttttttacccacgctgtgattcatggggtagcgctgtttagtgatattaccggttggtgcagtattatgttcaaaatgggcctggtctacattattaatagtggtaatccggtaatcatgtcgattgattatgaatgctcgggaatcattgagacgtgcgcatttatttcgctagtagccttttacccggcttaccagcgccgtgaaaaggtgttttatggtgtttttggattgttgtatatttacttgattaatgtattacgcctgtccgtagtgattgtgattgttcactttggcggtggtcaaacattctttctggctcattcagtgattgggcggttactgttctatgttctggtcattgtcttatattacaatgtttttacctattcacagttagctcgaggactttatcagcagtttattgattggagggagcgaatcctgtgatgtactggataaacttagcgctgactagaatggggttttggattacctgggccttagtgccgatcgtggtggaaattattccggcaattatgtcgactattaagttaatgcgactacatcgccacatgccccggcttaaagcgcctgctaagtggccgtgggtaaccatcattgtaccggtttataattctgaagatacgttatttgactgcattcgttccatcgatcatcaaacgtatgataaaaaaagcatgcaaattattttggcgaataatcagagtaccgatgatagttttggggcgtatgctcgcgcccaaaatgcgtttcctaatttatttttacggtatgtcaatactgacaaggggaaagctcgcgcgcttaacgcggccatttacgagagtattggtagttatgtcattaatattgatagtgatggtttattggaacccaacgcgattaaaaatatggtactacggttcgagaacgatgagcagattgcggccatgaccggggcagtgctcccacaaagaaacttggttaagcaagttcatggttggtggcatcggctgttggctaaaaatgagtattacgaatatgcacaggcttttctttctggccgtaccatcgagtcgttccgcgaccagttgtttaccatgtcaggagctttctcggcatttcgacgggaagtgttaatggaaactttcttgtatgacaccgatacaatcggtgaggacacggacatgacgtttcagattcggacacgtttaggcaaaaaggtcgttatttgtgcagatgctattttttatgtagcgccaatttcaggcttttctgagttatatacgcaacgccagcgctggcaacgtggtgaactggaagttgcacaacattatatgtcacaaacagctagcatcaagggctttttcaaagaatttttggtgcggcgaattatgattgatcacacgtttacgtttccacgaatgatttggacttttgcgacgattgttttgattgcttttggctattcaactgtggtcgtggggctctcatatctcttgatctatagtttatacgtcatggtaggggttattaactttattagtgttggtattttattaaagccgtatcctgaagaacgccatttctacaagcatttatggtggctaacattaacgctgccactttatatgtttttgacagcttggattcgattgattggtgttatcaatgcgatgacgacccaggcaacttggaaaatgcgggggttcaccgaagaatggcaacgattgttggccgtcttacgtgatgataggcgtacaattcacaatcactatcgacgccggaaaggaaaatgagttgaagcggcacgtgttggctgactacaagatatcacgcgaagttggcggaatatcttgattgtttagttcaggtgcaagaattcaaacgaagtagattaatgatgagatgttatttttatcaatttagtcagaagatgattacgagcgtttggtggttactatttgcaccaatgttgttatttgcagtaatgtcgccgaatattattttaggggataacgagacgtttgggacgagtacgaccttattgacgacggggttgattattgtgattgtcgccgtgttgattatgaactatgcgtatccgcgcgttcatcgggtgctatatcgactattaatcacaaatcagctctggacggctggtgtcttgttagcactcgtttttattggtcagctcgtattcgtgacatttgtccatcccgtcagtggttttgacgctgggatgctccactatgcggctaccagtgcgaaacacgtccaggaggtgggcgtgacggcgtattacagtcttaatcaaaacaacatgccaatcatgctttttatgcactggctatcggaagtgactggtcaaacttcatggcaattttttgattacgtgacgctgttttttgtcgatctttcagcagctttcaatttaatgagcgtatttgtggtacgacgctcggcgttaggaatcgctatgtatctgcacgctggttggttagcggtttttccaagtattattatgccgtatacggatgcttggggactgccgctggtttcgttttgcatgctgtgctattttgtgatgagtcaaacgaagcgaccgccgttactgcgtgtggccgccgccgttgggtttggcgtgagcgtgacattaacgtacttcatgaaaccctcatccattattccggtaatcgccattgccatcatcagctttttagcacgtttgcggtcgcggcagggttcacaaacgacgatgatttttgtgacggtcgccatggcaatcttgatgctcgaaagtgccggcctcacttatcattatacgaatcaggccatccagaaccagacgtatatcaaaatcgataaatcaaggtcgattccggcgattcattttatggccatgggcgtttacggctccggcgggtatagtgaaaagcaggcgatacagatggccgttttgcccaccaaggcacaaaaaacggcttactcaatcaagatgctgaagcgtcagctcaagaaactgggaccgtggggttaccttgaattcttggtaaaaaagcaacgcaataatactgctgacgggacctttggctggttgaaggaaggcaatttctttcgcgaaaatcaaaaaccaagcaaccagggctttagtaattggttaaaaaactttatttatttatacggtcgccatattgcagattttcggtttgtggcgcaactgtggtggttagtactactcgtaattatcgcgttgggttttggcccgcgctggcaattgattcaattgctccggttggcgatgattggtgggtttatcttcctcctcttgttcgaaggtggtcggagtcggtacttaattcagtacttaccgtgcctgctattactgggcgcattctcatttgaacgggcagttgcgaatatccagcgtgttagggattggtatcagcgtaagttgcgagccgcgattgcggcagatgaggccgagtgagcgtgcaatcgttcccagtgcgtgacacgaaattgatcgttaacgagcggttagcaatccaaaatagctgtggtgggtcctaaatggggcttaccacggctattttatcgttcacgttgtcgattgttggctcttgcgggggcgcttatcgcgttatgggtggcaatgcgcgataaattcattccgacgtcaagtgccggaacggcgcgggttgttcaaatcgtctaggtacgtttattaagggaaatacactgatttggaggcgttggccagccggttactaatgaggctaaacgcactagtttgtaaatcagtaatccaaacttaattaaaaaacaacaaattaatatgtgaaaatgctgtgttaaaatcgacttatgctataattgttgcaagcaaacagttcgcgttattgtgggggataacccgaattgagatattaattagggtgggatttaagctcatgtggaaaaagttacactatatggactatgtgctgtttatcccgtatttgattctcagcgggatcggcgttgtcatggtctattcatcgagttcatacgtagccgcacaaaacggttcgacacccaccggttatttagttaaacaactgatctgggtcgtcttaggcttagtgatcaccttggtttgtatgaatttgaagatcgactattttaagcaaaccaagttacttggtatgttagggtttgcgatgttatttgttctggttctcctccgattggttggtcaatcaattaatggggcggctggctggatcattttgggaccagtctcgatccaaccagctgaattttgcaagttttacctgatcatttacttggcatcaattatttctcaacgggaggcacattttggggtggctcgaatccgtgaattgggtgctcagtttgtgatgttgttcgcgatgattttactgatttttgtgcaacccgaccttggtggggccacgattaatttagccatcgcggcggttattttgtttgcgagtggcatttcatactttgtaggtgttggtgtctttgctggggcggtcgctgcctttgaatggattttagtgcctttagtgagtcgcatgccccaaagtgcttttgcaaattcttatcagttacggcggtttctcggtttcctgaatccgtttaaaacggcttcaggagcggggacgcagttagtcaactcttactatgccatctcaaacggtggtttgacaggcgttgggattgggaatagtttgcaaaaacgtggttatttacccgaaccgaacactgattttattatgtcaatcactgccgaagaactcggactaattggcattttaatcgtaatgggcttactacttgtcatcgtgatgcgcacgatctatatcggggttcgtgcgactaatacgttcaacgcgttggtctgttacggtgtcgcagcctacatgaccattcaagcatttattaatgtgggtgggatcgttggtctgattccgattactggggtgaccttcccattcatgagttatggtggttctagcatgatggtattgacgctttcactaggattggtattaaacattagtgcacttgaaaaaatggcgcgccttaatacagttcgacaggcaggctaagacgattttatttggaaatgagggattttggtgaagaaagtattaattgctaaccgtggtgaaattgcgacccgggtcattcgtgcttgccacgaattaggccttcagactgttgcgatttacgccaaagaagatgagttttcagttcaccgttttaaagctgatgaagcgtacttagtaggtgagggtaaggcgccgattgcggcttacctggatattgaagatattattcgcattgctaaagaaaatcatgtggatgcgattcacccaggttacggctttttatctgaaaatgctacttttgctcggcggattgctgaagaaggcatgaccttcgttggtcctaagccagagcacctcgagatgtttggtgataagattacggccaaacgtgtggctcgcgatgccggcgtgcagacgattccgagtaccttgcacccggttactagcctgaacgaggcgttacaatttactcagcaatacggttatccaattatgatcaaagctgccatgggtggtggcggtcggggaatgcgcatcgttcacgaagcttctgaattacaagaagcttttgaccgtgcccgttcagaggccatgcaatcctttggcgatgacgagatttacttggaaaaattcatcgcgaatcccaaacacattgaagtccagattttagcggatgctcacggcaatgtcatgcatttatttgaacgtgactgttctgttcagcgccgtaatcaaaaggtgattgaatttgcaccggccgtggccctgccaatcgagttgcgtcaaaagatctgtaacgccgcagtcgacttgatgaagagtgtacactatttaaacgccgcaacggttgaattcttggttgaaggggaccaattctacttcatggaagttaatccgcgggttcaagttgaacatacggtgacagaaatgattaccgaaattgatattgtccatgctcagctcaaaattgcgatgggtggtgacctattcgaggatttacggttaccacatcaagacgcattgacatataagggtgcggcaattcagtgtcgaattacgacggaagatcccgcaaatgattttatgccagatactggtcgcatcgagacgtaccggtcaccaggtggtaatggggttcgtttggatgctggtaatacctattccggcgcaatcgtaacgccttattttgattcactgcttgtaaaggcttgtgttgcggcgcggaacttcagagcggccgttcataaaatgcgacgcgtcctagttgaattcgatattcgcggcgtgaagacgaacattccgtttatgctgaatgtgattgacaacccaacgttccaagcaggtgaagcggggacccggtttattgatcagaccccaacgctcttcaaattccctgacgatacgcaacgtgaagataagatgttgaagtatattggaaatgtgacggtcaatggtttcgctgacgttgcccaacattcgaagaagtactatccggacgttgagtttaaggatgattttcaaccgatcgcacccgacatcgtcacggcaaaagacgtgttggatcaacaaggtgtccagggattacaacagtggttgttagcccagaagcaagtgttattaacagatacgaccatgcgggatgcgcatcagagtttatttgcaacgcggatgcggacgaaggatatgttagccgttgccgcggcttcacaaaaagcgttgccacagttattctcctatgagatgtggggtggtgcgacgttcgatgtggcctatcgttttctaaatgaaaatccctggaatcggctgaaagaacttcggcaggcaatgccccggacactcttccaaatgttgttccgtggttccaatgcggtgggttaccagaactatccagataatgtgattcgcgaatttatcttagaagcagctaagagtggcattgatgttttccgcatttttgacagtttgaattggattcctcaaatggaaaagagtattcaggccgtcaaggaaaccgggaagattgcggaagccacgatttgttatacgggcgacattatggaccctgatcggcaaaaatacaatcttgattattaccgtcagctggccttggatctacaatcaactggtgccgatattattgccatcaaggatatggcgggtgtgttaaagccagaggccgcctatgaattagtatcgacgttgaaagacgcgctgtccgtgccagttcatctgcatacgcatgatacgactggtaatggaatctttacctatgcccgagcagtggaagctggtgttgacgtggtcgatgttgctgcgagtgcgctatcaggcacgaccagccaaccatcaatgagttcgttgtattacgcattagcccacaatgatcgtcaacctgatgttgatattaacaacgttgaagccatcaatcggtattggcaaggcgtacggccatactaccaagacttctcgaacggtatgaccggaccacagacagatatttatcagacgcagatgccgggtggacaatattctaacttgcagcaacaagctaaggctgttggtctcggggatcgttgggaagaagttaagacgatgtatgcgacggtcaatgatatgtttggtgatattatcaaagttacgcccagctctaaagttgttggtgacatggccctgttcatgatggaaaatcacttgacaccggacgatgtttataatcagggtaccaagctcgatttcccggcatcggtcatcaacttctttgctggcaatcttggtcaaccagtcggaggctttccaaagaagctccagcagattgtcttgaaaggccagccagcgttgactgtgcggcccggtagtttagccaaaccagctgactttgctgcggtcaaagcagagctatcggctaagcttggtcatgaagcgagccatcaggaagtgctcagctacatcctgtacccgaaagtattcatggattacgacgctagccataagcgctacgggcacgtatcactgttagacacaccgacctttttccaaggcatgcggttcggtgagacggtcaatattgagttagccaaaggtaagacgatgatcgtcaagcttaatcagattagtgatcccgatgtcgatggtgtccggacactttactttagtatcaatggtcaaaatcaagagattatggtcaaggacaatgccattcaccaatcggcaaccagcacgcgcaaggcggaaccaactaatgaagatgaagttggcgcaacgatgagtggttcagttctgaaactgttagttaagaagggccaaacggttaagaaaggtgagccattacttgtgacggaagcaatgaagatggagacaaccattcaggcaccggaagatggggtcatcgaacatatttatgttaatgcgggtgacgtcattcagacggatgacttactgctcgagattgcaccacaataaggatatttcaagcaaaaacactagtggcttaggttactagtgttttttagcttcagcgcttcgccaataaaaaccactgcgtagttaagaacttagttgacgaaatgctgaatctagcctaacatttaaacagcaacgctagtagaagaggtgaggttcgatggattttacagttaaaccgcgccggtcgctcatcgtttatatgcattcgatgaagcaggtgcgtcaattgaaacgttttggattaattcaataccaatcgcgtaaagagcattatgtggtcttgtacatggatgaaagtcaaattccggccgcgaccacgaaaatcaaaaaattaaattttgtccgcagggttgaaccgtcataccgcccggacgttgcaatgaactttggcgaacgtgtggatcaaggcttttttaagccaaccacgactggtgcgcctgatgacgatgatgaggattaagttggtgaagatgaaatgcgaattgtagcaggagactttggtggtcggcggctcaaagccgtgccaggcatgcaaactcggccgacgacggacaaggttaaagaagctgtttttaatattattggcccctatttcgatggtgggcagtccctagacttatttgctgggagcggtggcttgagtatcgaagctgtatcacgcggagtggctcgggccgtcttgattgatcggcagtatcaagccatcaagacgatcaaggataacattgccgttacaaaggcccccgaacgatttgaagttatcaaaggcgatgctgagcgtattttggaccgattagcatcccaagatgaacactttgattgggtgtttttagacccaccctatgccaagcaacagattgtgaaggatattcagcattgtgatgcactaggattgctgaatccgggttgccgggtcatttgtgagacggatacgaatgcgaacttgccaacggtcttacccggatttgaattgatcagacaacaagattacggtattacggtcattaccatttaccaaaaagtaatggaggtcgggtaagttatggtgacagcagtttttccagggagtttcgacccaatcacacggggccacttggatatgattcaacgtgccagtcgattagttgaccggttgattgtggccgtcatggtcaatacgagtaagcaaccgttatttacgatgacggaaaaagtcgcgatgatcagtgatgagctgacgggtttacccaacgttgaagttcaggccgcaactggtttgaccgttgactttatggcgagtgtccatgcgacagttttggtacgaggtttgcggaatgaacaggatttcgggtatgaacgtgatatcgcttggatgaacaagtcattagacgagacgatcgaaacgatttgcttgattgcacggcccccgtacgcttacttttcttccagcttaattaaggaagttgccaagatgggagcggacgtttccaagtacgtcccgaccgcggtggcacaaaaactccatcagcggttaggaactgatcagcatgactaagggccgggagttgttaaaacgttactggggcttgctggtcgtgatactggtggtacttgcactatttctaattcctttaccgtactatattgaaggacccggaagtgcaaataatttgaagacttttgtgaccgtcaagcggcatccggatcatcaccggggtaagtttatgttgacctcggtcgcagaagctcgagcgacgccgctgttgtggctttacgcacaattgaatccgcactatgacgtggtcagtgctcaggatatgactggcggtcaggatgacgcgacttataatcgggttcagaagttttatatgcgaagtgcaatcaacgaagctatcgcgacggcgtattcggctgcgcatcagcaataccgcaaggtttatcagggtatctacgttttaacggttcagtctaattcaaaatttagaaaccagttaaaagttggcgatacgattacgaaagtcgatggccaccattttaatacagccagtgcgtatcagcattatattggtaagcagggcgtcggacatcgagtgacgatcacgtatcggcgaaagggccatttgaagcaagcaagtgcgcccctaatcaagctgagcacgcaccgcgccgggattggtatcggcctaactgataatattaaagtgacgacgactattccggttaaggttgatcccggacaaatcgggggtccctcggccggattgatgtttagcttgcaaatctatcagcaattgactaatcagaatttgcgacacggacggaagattgcggggaccggcaccatcgatcaaaatggacaagttggtgaaattggtggtatcgacaagaaagtgattgctgctaagcgggcaggggcgacaattttctttgcaccgtatgtgaaaccaaccaaagcgcttttggcggttgaagaaaagggtcaaactaactatcaacttgctaaagcgaccgcgaaaaagtacgcgcctaatatgaaagttgttccagtgacctcatttaaacaggccgttcattatttgcagacacaccaatagtaaaattgaaatgcaagttagcaaagtttggggtaaaacccaaacttttttcatgggcagccgctccttttgcgtaactattcgctgaaggggtgaaaacaaatgatagattggattaagctgctcaaaatgcactggcggattgttggtggtgttactgccgtgatcattattttgataacgggatgggcactgagtcaacttaagcagcctcaacccgccggtacggataacttgttggcgcattcgttcaattccacatcaatgggaggcgcgagtcgaacgtctgccaatgctgaccagcccgcaacgagtacccaaccgtcgaacgctacaccgagcccagcccgaccgacaggtgctagttcacccgggtatgtcgatattaagggtgcggttaataaaccagggttgtatcaggttactgctagtatgcgggtcgcggatgtcatccaactggcacaaggcatgcagccacaggcagatgctcagcagatcaacttggctgccaaagtgactgatcagcaagtgatctacgtgccagctaagggcgaacaggccccggctgttgcgccaccagtcgtccagtcaacggggcctactggcggaacaccaactagtaatcatgcggcaacggataaggtcaatctcaacacggctgatgtggccgcgctgcaaacgttgagcggaatcgggcagaagaaggctgaaaaaatcattgattatcgccagcaacatggtaattttaaaacaattgatgatttgaaaaacgtcagcggctttggagaaaagactgtggccaaatacaaagaccagctcaccgtctagtttcaaagcgcacattttggtatactactgtcattgaaagtgaggcataaaatgatgaaagatcaacgaattccatgggatcagtattttatgatgcaggcggtcttattggcgagtcgaagcacgtgtgagcggctttcggttggtgccacgattgttcgcgacaaacgcattattgcgggtggttacaatggttcagtatccggcgatgttcattgtatcgatgaggggtgttaccttgttgatgggcactgtgttcgcactattcacgcggaaatgaatgcgattttgcagtgtgcaaaattcggtgcagctacggatggtgctgaaatctatgtcactgactttccatgtttacaatgcacgaaaatgttattacaagctggaattcaaaaaattcattatttacgtaattatcataacgatgcgtatgccatgtccttaattgaacgaaaacacgtggctttacaacaagttcagttcgaccaatcagatttggataagctgaatcttgatcaaatcttgttagatcgtgactaattgcgcgcactattttttgccgccattgcgtgcggcttacttagtagttggttagttgaccaacaatggctggcagccggattattattaatttggttattgcgagtcatccgattacgagatcgacagtgtttgatggtgacgattggctgtgttttatctttggcaatctggctgaactggcaaaaccaccgtttcgcctccattgttcagcagcccagtcaggtggtcacaagccatttggctgtccaacccgatgcgattacggtgcgcggtggtcagtatcagctgattgccactagtccaatgggcaaagtacttgttagaggacagctgaaaagtgccactgaaaaacagtatctgacccagtttactcaccggacgatctggcacgttcagggggaagtcgccgccatcgcacctcctaccaacccggggcagtttaatgcgcctaggtattatcgcagtcaaggcatcgcccgccaagtgacggtcacagcggttcaacgaatagaaattgcgccgcagcgtggttggctggtgctacttgatcgattacaccaatggcgtcagcaattctttctagcctgtcaaagattgccaccaacgcttagtcgttatgcgacgagtctactggttgggatacgccccacagattttcagacgacaatgggggccgttcaacagctgggactattgcatttgttcagtttgtcgggtatgcatgttattttattagttaaattcttgcaatgggtcttgttacgactgcatctaagtcagcaagcaatcgatatttggttattagggctcttgccagcataccttgtcttgggcggcggtgccgatagcttgcggcgggcagttgtaaccgcggctttaccaattatttggcagttgctaacacatcagtcaagtggggcgttgggtggttggagccttgccctgataatggggattgcccataatcctttggtattgagccaattaggtggtcagctcagttatggactagccttgctgctgatcttaatgcctggtttgccgccgtggcgattagcaatttggattcaggttatcagtttaccggttttgcttgtagctacggcgcagtggcatctgtggtccttagcagtcaatttggtggttgcgcctatttttagttgggtattattaccggtgacggtcgtgggggcgagcattggctttggttctaccaatgtcaccagcgtgtgtgaatgggtgttggttaattttcagaatgggcttgagtgggtcagccattggccaggcctactcattatcggtcaaccgagtacactgtgggcatggacgctcagtctattgagtttgtggttgttacggacaccgcggcgtcggtattactggggactgttactggcatatgcttgttttagtcttagtctacgttttccacttcacggtgccgttcaatttatcgatgtcggtcagggcgattcgatcttgattcgccaaccatttaaccgccaagtgagtttgatcgatactggggggcaactacacttttcccggccacgttggcaggcagagcaggtacaaccgcgatcgcgtgcggaaacgattacggtcaattatttgcaccggctagggatcactcacttggatacagtttatttatcacacaaggatgttgaccatattggtgatttgggtgaactattacgcttgatgccggtcaatcaagtggtggtacctgccggaatggcgcgcctagccaagtttcaaaagctgctagtgcccgccagaaagcggcctaaagtggttgaagcattggccggccatacgtttgcagatggattggttgcggtgcatccgtttaaaccgggacgggcttaaaatgaagattcgttggtgctaacgggggtttttggtcagcaacgtttcatgtttacgggtgatcttgaccgagcgggggagcgtgcaatcgttgcccgatatccacaattacgcgtggacgttttaaagctagggcatcatggcagtaaaacagcctcggatccgttagctttgcgccaattaggtgtgcaccacggtattttatcggtgggtcggcacaatcgctatgggcatccgaatcaagaaacactaataactctagctgaacagcatattgtcacttattcaacggctttgcaggggatgataacctatcgtttcgttaatcatcgccagggacgttggcaaacatttttaaaggaaggtgatcgccatcaacgcacaacaggcgttaaaatcgattcgcaacggtgacttggcatcgatctatgttatcttgggaacggtcgactatttggccgatcagctcaaacaggcttttacgcagcaaattcccagtgaagaacaaacgatgaacgtcggcagttatgatatggaaacgacgccagtagctgtggctttagatgatgcaatgtcggcaccgttttttggtgaacggcgattagtctttattaatcacccgtactttttgacgggtgaaaataagaagaccaaggttgaccatgatctggcctcactacagcactattttgaacaacctgaaccaagtacgattctggtgtttatggcaccctatgagaaattagatgcgcgtaaaaagctcgttaaaacgttaaaaaaacaggcgacgacggttgaagtcaaccaagtctcggaggctgaaacgcaacgctatgtgcaagcggcgttagatgagaaacagattcgcattggtgcggacgcactacaggaactggttaatcgaactgacgggcagttgggactgattatgggacaattaccgaagttgatgatttacgcagcccaatcccaacgaattgatttagcggcagttcaggctttggtgactaaatcactgacgcaaaatgtttttgatttggtcaacgatgtacttcgttatcagacgcagtcagcggtcgaactttaccatgaactggtggcagctcaggaagccccactaaagatcaatgcaatcttattaggacaattccgattgttgctacaggtcaaaattatggcgcgtgcaggctatagtcagggcagcctagctagcacgcttaaagtgcacccatatcgggtcaaactagccatgcaaacggtccgccattttgatcaagctgcgttacgggcggcgtacttaggactgctccaaacagaagtacaaatgaaaacgacacaacgcgacccggagttgctctttgagttatttatggttcaatttgttaatgagcgacaggcagcggtcggaacgcggctgtcccgttaggcattggcttgttggacaagcgagaacgactattcacgaaggcaaaagtaatagtgcttagatatggagcccccaaaaaagatggtcgaccggaattctcagaattcggtcgaccatcttttgagtcattaaaggcgataaaaaaacgccgtcgcaatgctcgggcgtaaaattagcttatttagcgtaacgtgcagccatccgtgacttgtcacgggcagctttgttgcgcttgataagacctttagaagcagccttgtcaacggcgctagttgctgctaagtataaatcgtcgacgttgtcggcaccagcagttttagcagcttcaaattttttaacagcagtccgcatcgcactcatttgggcggtgttacggacgtttgctttattgtttgttttcacgcgttcaatagcggatttgataattggcatcagattcacctccatcattttttcaacaaatgctattatacataagccccggcttgaatgcaaccgttatgtgtaaagtaatttatcttgatatgtattgaaacttgctttttactccttagtttgctagactatatcaagtgttcagcaaccctttacttagtttttcgtgcaccaccaacgatttactcagtttagggcaattattggaaaggtggttgaaacacatggcaatttcacgcgaaaagaagacggagcttattaacaagtatgctcgtcacgaaggcgatactggttctgttgaagtccaagttgcagttttaacggaagacatcaacgaattaaacgaacatttacgagttcacaagaaggattttcattcacaacgtgggttgatgaagaaaattggtcaccgtcgtaacttgttagcttaccttcgtaaagaagacgttaaccgttaccgtgacttaatccaaagtcttggtcttcgtcgttaatattgagattacgagaactgcctgcgggtggttctttttttgtgtaaaaaattacagaaacgatacataaactttattaaacccaaacaaccgttcgctatacttatgtttattcaaaagtgaatgaggggatttcatggaagcaatggcaacgttgactcgtaactttcgggtcttatggtttggcagtttaatcactgatttaggtaacgcaatgacgttaccgtttattgtgctgtatattcagacattaggcgattattcaacgacccagttgaattttctaggggcagcggcgtttgccgtgacatacgcctgcaaagctttagtcgcaccattgtggggccgattggcggatcaaaaggggcgtaagctgatgtgtctacgcgcatctggcatgatgaccttaacgattctcggtgtgggactagcacctaacgtgatcgtcctcttgattttacgagccgcacagggagcgttttcaggttacatcaataatgctaacgcactgatttcgattaccgtacctgcggaacaacgtggccagtggttaagtaaactggtcactggtagcatcagtggcacattgatggggccacttttgggaagctttctggctaataccgttggctatcggggggcgttcgtggctaccagtagtttgatggcgcttgtctttgtcatgacctggtggggtgttcaagagaaggtgacggcagttagtcgcgccacgttaccaccattgcgaccaatcttacatcaattgggtggtcgctttatttgtgccttgctgacatcgttactagttgttcaggcgacgaccaatgcgataacaccactgttaagcttgctggtcggacagttagcgccccaagcaacggcgcagacgattatcttgatgacggggattgtggcggctgcgccgggacttgccacgattctaatggctggtcgtgttgggcgcattctggatcggctgggcgctggccgttgcttagttacttttttgattttagcgattgttgacttattgttgactagtttggtacatcaggtcgcgtggctggtcgggctacggctaatactgggaattgcggatgcggcactattgcccgcgcttcaagtgatgacagtcgagcatgtcccacacgcagcgtttgggcgtgtgtttagtttaaatcagtccgcgcaagcttgtggtaacgtggtcggccccgggttagccgtgattgttgccaattggtgggggtatcagtcaatctttattgttacggctggattacagctgatggcattgatgctgtgggtcgcgtattttagtcagcaacgaccacattagattgcattgaatggtctaactattgctttactttaaaatgtggtaaactggggagagttacttaatcggaacaggtacgctggtacttgtaaattttaatagaggagtttttagatcatgaactttgcaaacgttgatttgatgaccgcaatggtgacccctttcgatgatcaccaacaattggacgaaaagcggttagcaagtttgattgaacatttattggcacacggcacccaaggtattctggtgggtgggacaactggtgaagcaccaacgctaaccgaagatgaaaaattaaccttactaaagaaagcagctgagattgtcgatggtcgggtaccaatcgtggccgggaccggctcaaacagtaccgctgctaccatcgcatttactaagaaggttagtcagattaaggggattgatgcagctttagtggtggttccctactacaacaagcctgatcaagctggtatgattgcccactttacagcggttgctgatcaaggtggcttaccagttattatttataatattccgggccgggttattgtgaagatgaccgtggccacgatcttaacattagcacaaaatcccaatattattgggattaagcagtgtgcgacgatggaagagtttggcgcgattgtcgaaaatgcaccggctgattttcttgtttatactggtgaagattctcagagtttggctgccaaggaaattggtggtgctggggttatctcagtggcaagtcatatctatggtgacgaaatgacggcgatgtttagtgccatcgaccagggtgagattgccacggccgctaagtatcaacgggacttaacacccaagatgagtgccttgtttagtgcaccatcgccatcgccagttaaagcggccttaaatcatttgggtcagccggtgggtgaaccacggttaccaatcttaccattgagtactgaacaaacggctcagctttttaaaacattaaacatttagaagaatcaaggtgaaataattgagtagtgaaattcaaattaccccatttggtggggtccgtgagaacggcaaaaacatgtatgctgtcgaagtcgatggtgatatttatattttagattgtgggttaaagtacccagaaaatgagttattaggaattgatatcgtgattccggacttcagttatttgcgagaaaatgctgatcgaatcgtcggtgtctttttgacccacggccacgctgatgccattggtgcgttaccgtactttttgaatgagttcaacgttcccgtgtttggttcagagctaaccattgagttggcaaaaattcaattgcaaaaggaccctaaagctaaaaactttaatgacttccacatcattaatgagaagacagaaattgattttggcacggtcacggtttcgtttttccgcacgacccattcgattccagattcaatgggaatcgtgttgcaaaccagtgccggtgaggtcgtttataccggtgactttaagtttgatccgacggccgcaggcgactatcagactgattttgcgcggttggcggagattggatcaaaaggcgtcttggcgttacttagtgattcagctaatgcagaaaattatgaacagccggtcagtgaacgtgaaattgcggcctatgttttagaaacgtttaaatatcatccaggacggatcattgtcgcttcagttgcatccaatatcttgcgtattcagcaagttttagatgccgctgcaaagtctaatcggaaagtcgctttaatgcctggtgacgttgagagtatcgtgaagaccgcaatcgatttaggcaagttacacatgcctgaagacgttgtcgtaccacttaaagccattgataaacttaaacctgaacaaatcgtgattttacaaacgggccgaatgggcgaacctattaaggccttacaacggatggctaataagcaggagagcaaggtcaatatcgaaaagggtgatctggtatttattactaccacaccgtcacattcgatggaaaccgtggttgccaagacccgtgatatgatttatcgtgctgatgcggacgttaaggcgattgctgatgaaatgaattcctccggccatgccgctaaacgtgacttgcaaatgatgatcaacatgatgaagccccaatatttcattccgattcaaggggagtatcgtctgttggatgctcatgcggactttgcacgtgaagttggaattccggacgaccatgtcctgatcgcagccaagggtgaccagttacgttatgacggtgataccatgcacttggccggttcaatcgaagtcggcgatacgatgatcgatggcatcggggtcggtgacattggaaacattgtgttacgtgaccgcaagattttgtctgaagacggtattttcgtggcagtggtcacgattgatcgcaaaaagaagaagattattgcgactcctaagattacttcacggggcttcgtctatgtcaagactagtaaagacttgatgcaagagagcgctgagttagtcaaaacgacggtgcaagaaaatctcgataataaagagtttgattggggccatttaaaacaggctgtccgtgagaagttgaaccattatttatgggaccagaccaagcggcacccagttattttaccggttattatggaagttaatcagcatcatcggcgtacaaagaaggctaaaccagccaaaccagtcgagactgaatctaaagcttagtattaaaaaagtcggaagctacttccgacttttttggttacaatgaagaggaggaaggttcaatgacaatagctgaaacacaattggccgccgaacaagccagtcgagctcaggattggtccaaggcggctagtttgtgggagcaagtgtatcaggcacagcaaacggcaccagttaattacgaactggtccaagcgttggttgctgatcaacaatatgtggcagcagctaattatgccagtgagtttgaagcgcagtatttagcaaccgatgcggccgcagatctgtatctgaatgcattggttgctaatcatgacttcatttctgcccacattatgatcaaggcacgcccaacgagtgcgtggactacggctgcaaacacaactttaaaagcggcggagagtacggctgagcgaacgctaggatcgacattgaccacaacaatgcgtcatttttatcatttatctgaccagcccgtccagaaacaggtggcaggtttgcaagcagcccgtcacctgccatatgagcgctatctgacggcagccaagtttctattagtagatccgtttttgcatcccttaacacgagtagaagtgttatatacactgtaccaattgcaagtatcagagacggtcaagatgcagtggctactggatgagaagatgttgacactgtgtccagcaaagttagtcgcactcggtcaggacgagacgagcaaggccgtttaccatgctttgaaagtgcgacttggtaatcaagatgtctttttatatgaaagcttacgagaacttttacaattgcaattaatgtatttatatccatgcgctgcacaggttattacagattccacggcttggatcgatcttttgattagtttgcaaactgggcagacgataacgccgtctgatgaccaaactgaaaaaatgatgaaaattcagcaaaaaattcagcaatttagccttgatttacaatcataagcgtgcgtaataagaatttactaacaaaaattcaattttttaaataatatctgtttacaaatcagattaggctatatataatatttaaggattctcagtgatgggtgcgcgatttggccttttcactaggatgtagtataatactaactaaagaattgttgagaccattttggcctcgacgttattcttgcgaaaatcacaggaggtttcattaatggcaaaagaacattatgaaagaacaaaaccccatgtaaacattggtactattggccacgttgaccatgggaagactactttgaccgctgcaatcactaaggtattagcatctaagggcttggctaaagaacaagactttgcttctatcgatgctgctccggaagaacgtgaacgtggtattactatcaacactgcccacgttgaatacgaaactgaaaagcgtcactacgctcatatcgatgccccaggacatgctgactacgttaagaacatgattactggtgccgctcaaatggacggtgcgatcttagttgttgccgcaactgatggtcctatgccacaaacgcgtgaacacatcctcttggctcgccaagttggtgttgactatatcgttgtcttcttaaacaagactgatcttgttgacgatgacgaattagttgacttggttgaaatggaagtacgtgaattactttcagaatacgatttccctggtgacgatattcctgttatccgtggttcagcgcttaaagcacttgaaggcgacccagaacaagaaaaggttatcatgcacttaatggatgttgttgatgaatacatcccaactccagttcgtgatactgaaaagcctttcttgatgcctgttgaagacgtcttctcaatcactggtcgtgggactgttgcttctggtcgtatcgatcgtgggactgttaaggtcggcgacgaagttgaaatcgttggtttacacgaagatgttcttaagtcaactgttacgggtcttgaaatgtttcgtaagacacttgacttaggtgaagccggggataacgttggtgcgttattacgtggtgttaaccgtgaacaagttgttcgtggccaagttttggctaagccaggttcgatccaaactcacaagaagttcaagggtgaagtttatatcttgagcaaagaagaaggtggccgtcatacgccattcttctcaaactatcgtccacaattctacttccacaccactgatatcactggtgttattgaattgccagacggcgttgaaatggttatgcctggtgacaacgtaacgttcactgttgaattgattcaaccagctgccatcgaaaagggtaccaagttcacggttcgtgaaggtggtcatactgtcggtgccggtgttgtttcagaaattgatgactaatctctaactgattttcattgattgatctaagcgacttggaagtcttcttccaagtcgctttttttaagaaaaacgaacaataaatcgcgagcttacgcgcttttttagccaatttggtttactttacggtgtcgataggttaaacttaacaagtatgcaattgactagaattgtagaaattataatgtttcggagggaatacaatggctgcaaagtgggaaaagaaagaaggcaaccaaggcgaattaacattcgaaattggtgctgataaaattagtgaaggtatcgacaaggccttccaacggactaaaaagaacttaaatgttcctggtttccgtaagggtaaggttccacgtcaaatcttcaatcaaatgtatggtgaagaagcactttatcaagatgctttaaacatcgtgctcccagaggcatatgaagaagcaatcaaggaaactgaaatcgaaccagttgatcaacctcaaatcgatgttgatagcatggaaaaaggtaagccttgggtattaaaggccgttgtaacggttaaaccagaagttaagcttggtcaatacaaggaacttagtgtaacgcgtcaaaatactcgcgtttatgctaaggatgttgatgccgaattagaatcacggcgtgaaaaacaagctgaattagttctgaaggaagaccaaccagccgctaagggcgatacggtggttattgatttcaaaggattcgttgatggcgaaccatttgaaggtggcgaatcagaaaactactcacttgaattaggttctaactcattcatccctggttttgaagaccaattagttggtgtcaaggctggcgacgaaactgaagttaaggtaacgttccctaaggattaccaagctgaagacttacaagacaaagaagccactttcaaagtgacagttcatgaagtcaagactaaggaactccctgaattagatgacgaatttgccaaggatgttgacgaagatgttgacacacttgaagaattaaaagctaagatcaaggacgaacttaaggaacaaaaggaatccgctgcgcatgatgcaattgaagacgaagctttaaaccaagcggttgacaatgctgaaattcaagcaattcctgatgccatgaaagaagacgatattcatcgtcaaatggatcaatacttggctaatatgcaacaacaaggtatcgatccaaagacttactacaagttgactggtactactgaagacgacttgcacaagcaatttgctgctgatgctgaacgccgggttaagactaacttggtcttagaagcggttgttgaagctgaaaacatcaagccatctcaggatgaaattgcggccgaagttaaggatttagctagtcaatacaacatggaagaaagtgctgttcgtggtgctttaacggatgacatgttgtcacatgacattgcgattcgccaagccgttgacttgattgcggattctgctaagcaaaatgccaaagcagaagacaaaaaagacgacagcgacaagaactaattaattcaattagatacaagtcgagggtcttggaagaataattcttccgagacccttttacatagcgtcagctaatcgtaagattaatttaatagctatttggctgacgcctgtgatttactgcgagaatcattcggttttcaaagtggttagccggatgattgaacagataatttcgggtttaggttcgtccatgttatagtagtggacgtagaagacagtgcctaagctggttttagctcagaacgtgtttagaatcttttcaagagtattcgcaggaaggctaagctaatcatcatcttactggtgttcagctttcgctcacaattgcgccagaggcgccgatatttt

SEQ ID NO: 14 - DNA, 98567 bp, synthetic construct
  source 1..98567: mol_type = other DNA; note = Lactobacillus plantarum PDA6 - Contig 14
accgagggttcaaaggactccaggacaccttggaagcatcatttatttaagttagatacatattatatgtacgaaggcatttcatttacacaagattcttgacactccccttgttctttatcatagctataatcatacaacaaaataatcgcattataactatcctcttgatctttaaattgagaactcaactgattatcaaatgacattgtcacttactctattacttgatgaactgccgttaaccaattctgccaaacctcagtctgaatacgttggctgtgtggcagatacgctgccttccagagattacaactcaatttacgtacaggatgcgtatgcagtgcattgtccggaaattcaatttcaaaataatcccttaccattaagaaggccttcaaaatatctaatagctttttattaccagagcatctcgaaaacttccccttccaatagcgatattcttcattattttcactgatagctctattttgctgcaaaaaattacccaattcactatcatcactaacctgataataatgctgtaaaaatttcacaaacgcataatacgactgtgtcaagttcaccttttccagactgggccccatcggaatttctggtcgtggcgctggcaaaaccttggcaattggaaattgattttgccgaaaacccttttcctttggattaggcaatgattgccccgttttaagaaagggcgattcattgactggcacaacattaggattcgtaatccaattaacagccgcgacccaattttgccacacgggttcctgatttcgttgagattctgtcatctcacaaattattctaatgttatatgtcaagcttcctgatactggtgtcgttgctgcgatatccggcaaatattcattcacaaactgcttgacggcttgaaagctctcaaacacagtgtgattttcgttgctcacgtcgctaaagaaagcatgccagtcttccgcaattgcctgatcaaacaattccccatcatcactccaaagtgtgacactccccaatagacttccaagatcatcgtctctactagcccaatagtaggattccaaaaactcagacattgaaaagtaactttcctgttcacttaatctttttgtcaaggtaacttcactccattcttgatataccaagaaactttatgcattccatctttcatagcaggaactggtcgactattaataccaccatcagttattttaccatcgcggaccctaagcaaagtatcatcgtgtccccgtgaccaagttgtaaccggtagcggcatctttccccgtgatcatggtataaatatcattatacctaactagatccgttagacatgaaatgataccttgattaatactggtaacagtctaaaagtccagaacgcgtaatttcatcaacgttctggatcttcaaccgaactattttgtttgcttctgcttctacaagaagcggaagaaaatgagaaaaatgactcttctaatccataaaacactataaagaaagtcagtttgttggtgcccgaggaactcactaaatagctagcactttaacttgttcctcgagccttttcagcataacatgcccatcgtttgctttagcatttgaatctgttctttaaaatcttttctacttcgccctcaaaatctagcaaaatagcgtattaaaaacctaattccttcgttaaaagttgttttacctcacagaattaaccgattactctaattctaatacttttttattcaaatgaaatttgtactgtgttttcatttgtattctgttttacctgttgaataatttcttgtacttcagcttcggaaagcttttcatcttcatgtggcggttcccaattcttcatagaatctttgaatacaacaaattgacctcccactaacatttctccctctgccttcaccgcatactcattctccaaatcaaatttcacatgtgaactactacctgtaattttcatttaacttacttcctctcaaaaattattttttcaattcctgttttaggatcaatcgttgttattttcgttactttaggattattttttaatctaggtagctcaacgttttcccaaatattcccttttctcaactctgaaccaactaccgcacgaacttcaccagaaacttgttctgcatacgaaccagaagccaaatcccaagctttcattgactcaggtttattaaagtcccattctggcattttaatatttttatttcctattgttgattctaaagtaacgccacctttacttttagctacatcagccgctatgtcagctccaccaacgccatctgttctaccagaccaaaagaatgcagtatctggctctgtttttaatttgggatgaatttcgtcaatattaaaccctttagccccactggctttcttagccttatggtccttttttaccttattcttagcctttcgttttgtagtcttagctttagcacccttacgcttgcccggcttctttttagtaccgccctttttccgtgcatacgaagctttcctagccttgcccgcagcttttttcttgttatatcgcttctgctgcttcttggtcgttttatgcttcgtgccatgggaagtctttttgggctttgcctgttgatgcttagcttttttggcagtcttgacctttttagctttacgagccttctcagctgcctttttcgcagtctttttggcgggctttcgtttagctagtttctcggccgctcgctttgtcgccagtttagttgctcgggcggcccgtttgatccggccaccattcttcgcaactttctcggccttcttagcagttgccagaaccttcgcggcctttgctaacttagcgactttcgagacaggcacaaagttcaaggctgtccaagccgctcctaccaaccgcgagcgcttcttaccggtagcggcatcttttcccgtaatcatggtataaatatcattatacccaactagatccgtcaaaagcgaaatgatgcctttactgataccggtcttacgactaagcgtggcaattacagcactacctttggatgcatgctttttcgaagattttttcttgttagacttgccgtgcttcttagatgatttcttcttactggatttaccatgcttcttggaagatttcttcttattggacttgccgtgcttcttggaagatttcttcttgtgcgacttgccatgtttcttggaagacttcttcttactggacttgccatgtttcttggaagactttttcttattggacttgccgtgcttcttagaagacttcttcttgtgcgacttgccgtgtttcttggaagactttttcttattggacttgccgtgcttcttcgaagattttttcttgtgcgacttgccatgcttcttagaagacttcttcttgtgcgacttcttatgtttcttggccgctttcttcttgtgtgacttcttgtgcgacttcttatgtttcttaacggccttcttcttatgcgcctttttatgacgctttggcgtttttttcttatgccttaccgcaactttccgccgatgcggtgctttacggtggacgactctgcgcttagctttgcgatgtgcacgatgagacttcttggcgtgaccactagcgctatgtcgcaccttatgcttccgagtgtgggtcacaccacggcgatgtgcggagactgtgtcgaccgagctggaaaaagccgtgaaaactagaacaaacaccattaggccaatgaggatttttttaagaacctggcgtaattttatcatattagtcacgccctcgtttcttaataaccatcgtaatcgctaccgtgagtatcaataaacccactcctagccagaccaaccaggtcgcgaccgcggagttcgttttaggcaaaatttggttcaagattggatgttgcttcttgaacgccgatcgttgcttagcacgacttgccgccgcagcacttgctgaggttacacttggaactgacgcacttgccgtcgtagcccgcgactgccgtggcgctgtagaactggtagcggctacgacagttgctcggttagccttggtcgttggcgtggatgaagcctgcttcgtattagctttagttggtactgacgattgactagtgaccgtgctagagcctactgcttgactgctaccattaacactattcgactgagtttggctggaacgagctgcggcctgtttatccgcgtcagccgaatcaccggtcgtacttgagcttgatgagctttctgaacgactattttcacttgagctagttgaatgacttgattggctcgcatcactaatacttgccgaactagtcgaatggtcggccgcacttgaagctgtacggctactatcactactattagtgctcgactcactggcagcactctcagagctggtcgtcgcactacttgctggtgccgcagtcacatcattgttttcggctgcccacgcatagcctgaacccaatgtataggccattcccttatcaccatcataggtatctaggtaaaagccgtcaccatcggccccaccatcaacttcaacggttgtatctggcgacacataaaggttctgttccccttgatcagcctgcagcgttccttcatataacagtttgccattttgagtcagacgcgcccgggtattcgtagcttgcgcaaggggcgttgctgcgctgcttggattgttgttcggcgaaaccccttcatcattactgaataccggatcattgactggcacgccttcctcaaaagaagcgtcctcacccaagacaaccggcgtggaattgggttctgcaatcaatgcttgtaccgctgcactcgtatcactattgagactgctcgaagtttgggcgctgcccagtgcactacttgtgttttgatcctcagtaaatggtgacttgaaacccagtccactgtcagtagttgttccagtggtcgtatcatcggtattggttgtttcaccgtcagtagtttgactagtgcttgatgccgcactactatccgtctttgaatcagcacttgcactagtacccgactggcttgtagcctcagtgtcgccttgactattcgctgaacttgcatcgacactactggacgcgttcgttgcgttggtcgaactaccagctgttgattcattagtctcagtttggtcagtcgctgtcgtacttgtcgactgattactaccagactgactagtatcagtcgttgtcttggactcagtcgttgctgcttgactcggattgatttctttttgtgcggtaactttcaccccattcaacaatcctaagtcgtattgttcgccagtcaccattgatttcaacccgtcaaccgtgttggtctgctgactcttagtgccattcgcgttagtcaccgtggtcactgtcttaagctgaccacttttatcaaaagtcgtgaccgtttgctctgcgcctaacactctagtcgcagtcacttggccttgatcatcaaccttaaaagtgacagtctcattcttagataattcaaacgtatacttcgaattataatcaaagactaagctgttatcttgggtaccgtttgtatcactagccgcaatcgcaacttgagcagcatcctgattatatttgaccgtaaagccactatcgttggcataaatctgcgagacagaacggacattatgcttcgtatcttgtcgtactaaaacactactttgattaccaacgtcaacccactgcccagtcgttggttggtaataataattgaccgttgttggcttttccgttaccgttccctgggcattcgtcggtaagcgatcagtatcaactgtgtacaaatcttcgaaatcagttgtctcagtcgtgtaagtatcaccatatagaccagtgacatccaattcgtccagcttctgcccatccgttaacaagtaattgacatgaatgttgtatggcaacggatcataatacatcacggcttctttggtagtcttgctagcagtgccacgggtatgttcatccaatgtggcattacgcttatatccagttatcgttttgacctgcttagtaacatcataagctttcccgtaaccaactttgactgtttcatcaggagcaactttatcagtagaatcggtcatgtaatgatgtaccgtgatggtcgcttgattgtcaatggtattggtgacggtattcgacgtcttagtctgcttatctattgccgttttactcagttaatgaaagcatgaatttcaaccattactcacaaataaaaccgtgaggaccgttgtcaattccaacagtcctcacggtttatatcaaatcagtcataaaattatggcaatacattaaacaacagtgcgcctaacgcgccaccaaccaatggtccagcgattggcacccaactgtaggcccaatcagaagttcctttattggcgatgggcaataccgcgtgcgcaatgcggggacctaaatcccgggccgggttaattgcatacccggtcgttccacccagagacagcccgatagcgataatcagaattccgacaacaatcgggttcaatcccgccgtaaattggcctttcgtgaaggctaacaagccaaagactaggacgaacgttccaatcacttcactgataaagttccagaaatatcgccggataccaggaccggttgcaaaaatgccgagaatcgcgccagcatccttagttgcttgccagtgtgggtagtagtgcaaccaaaccacgaggccaccaatcaccccaccagcaatctgagccgcactatatggaatcacgtaggcccatgggaacttaccggccactgccattcctagtgagaccgctggattaagatgtgcggggctcataaagctggacgcatagacgcccatcgtgactgcaaatccccaacctaaggtaatcgcgacccagcccgcattttgcgctttggatttattgagcgttaccccagctacaaccccatcacctaacagaatcaagataaaggtcccgagaaattcccccaacaattgtagtgctaatggatctttcatcatgaccaccccattccttagccctgcttcagtgctgttaagtccgattcagcaatcgtctgattcaataattcggtttgtgctttgaccgttgcagcatcccaaccaaggtaatcggccattgtcgctatgacgccatcctttaagccatccagcgtatctcgcatgaataacaagtgattagtgcgccgcagcaagtagtcgactggcgtcagggtcatttcttcatccaaagcataacgtaagctaatcgtttcggctaaactcagaccatgcgtcggttcaactttaccaatcaaactaaagacccgcgcagcattggaaccgtacatatttgcaatccgcaacgcttcatcattcgtcaaaccattatccgtcccttgtttagcataaaatgcaatcgttgcatccacgttgtgcggatcaatatcgccaccagaaacggggaggttcttcgaattgatttcattaaagtgggcatcatacttatctgctaaaatcttggcaatcagcgccatggcacccgcagccattttacggtaatcagtaatcttcccaccagcaagggtcaacagcccgtctggactactagtcaacgaactaccgcgtgacaccgctgacggactgagtttgtcctctgccaaggaagtttccaagtcattcaggacactttcgacatcttcacgactggcttcctgactttcaaactgatcaacaaccttgataacttccttgaagctcttatcactgattttccctgaattaccaccgttataatcggaactaccgttagcggcaatcagtggccgcaatccggcccaactagcctcaatatcatctaaggtgattttagcagttggaaagcgacggttgacgatttccaacaagtagtcaacatcttcttgcgtaacggtcgggtgtttcagatcaccatgataatccgtatcagtcgttccgaaatacgtcttgttttcacgtggcaccacgaagatcatccggccatcttgatcaccagaatcaaaataggttggttgtggcactgggagtttctcagcgtcaacgactaaatgtacacccttggttggccgcatctgggattgatacttttcagtatggtccatcttacgaatcgtgtctgaccatggaccggtcgtattgatgacgattcgggcatgaatctcgaacgatgcaccagtcaataagtcttcagcggtgataccattgatccggccatcatcatcatgtaagaggccggtcgccttcacatgacttgccataatcccaccattttcgtgagccttcttaatgttttcaatcactaggcgcgcatcattattccgaaaatcaaggtaaacaccgccaccaactaaatgtttagggttcagctgtggttcccgttgtaagacttcctcgcgtgaaagggtataattggtgaatttaggatctttaacttcggcgagcttatcatacagatccatcgccactttgacagaaaagaggtcgaaggtcgctcccgtctcatcataaatcggcaataacattgggtcgggcttaggaatgtgtggcgcaatcccctggacaaccgcccgttctttaacggtatcggcaactacccccacgtcaaacgtctttaagtagcgaatgcccccatggaccagtttcgtcgaccgtgatgaagtcccttctgcaaagtcttgcatatcgatcaacccggtcttcatgttcattgcagttgattgaatggcgacaccggcaccggtaatcccaccaccgataacgagtaaatctaacgtttcattttgtaagcgttcaatattttgttgacgcgtcgttgctgaaaatgccatgttgttgtcctcctctattttcctgcgtggtatggggtgtgcttaaagacttgggtcgctttgaccgctgcctgccatccctcgtataagttcgtccgttcagctggccccatctcagggtcaaaactcgtgccgggcttatacgacgcttttaattcttccaaatcctgccaataaccaacgctaagcccggctaagaaggcagcaccaagcgctgtcgtttccagattagcagcccgcataatttgcgtatccaagatatccgcctgaaattgcatcaaccagtcattacgagcagcgccaccgtcaacttttaatactggaatctcaataccggaatctttcttcattgtttcaaccacgtcccgcgtttggtaagccaatgcttgcaaggttgctttaataaaatcttcacgagtcgtgccacgcgtcaagccaaagactgagccacgtgcttcagagtcccaatatggtgcccctaaaccagtaaaggccggaaccacatagacttcattttcattatgcgattcgcgcgccgcccgttcagaatcaggagcgctttcaaccaggcgaatcccatcacgcaaccactgaatcgctgaaccggcaacgaaaattgacccttccaaggcgtagtacactttaccgttgatgccgtaaccgatcgtggtcaataggttattatcggataattggggtttttcaccggtgttcatcacgataaaagccccagtcccgtaagtattcttcacggttcccggttcaaacgccagttgaccaaacaaggccgcttgttgatcaccagccatcccactaattggaacttccgacccaaagaaatggtagtccttggtcttgccataaacttcagaattagtgcgaacttctggcaacatcgccgctggaatatttaataattgcaaaatctggtcgtcccacttcaaatcatgaatattgaagagcatcgtccgactggcattggaataatccgtcacgtgggtggccccaccggtaagtttccataggagccacgtatcgatcgttccaaagagtaattcacccttttcagctcgttcttgggcccccttcacgtggtctaagatccagcgaattttagttgccgagaagtaagcgtctgtgacgagtcccgtatgttgatgaatcaaatcaccatagccatctttaaccagcttctcagcaatcggcgcggtttgccgtgattgccacacaattgcgttatagattggcaagccagtttgcttgtcccaaacgatggttgtttcccgttgattcgtaattccaataccactaatttgagcgggtttgattcccgattcaatgaaggcattcgcaatagtagacaagacagcattccagatttcattggcattatgttcgacccagcccggctgcgggaaatattgtggaaattcccgttgtgagtcggccactttatggcccgcatggtcaaagataatggcgcgggtactggttgtcccttcgtcaattgccataatgtacttgtcggtcatggtgtgtcactccttagtcataacagttttatgaaaacgctatcataattgatgattgaatcataccatgtcgcgaccgttttgtgaatagatttgcataaattaaattttgcacaattgaatttactttaaaactagtttgtactatgtcacagttcgatactgccatagcaagcatcgtagcatttaagcgatcgcttctagttctataaaataattaatttgctaacattagtgccaccgcgacgagctacaattttgacattttttcacagtacttacacgccaagatagtcgcacaacgaaaatgacgaccgtctgtttgcgacatcatttggccttcgtattccactccaaacgccggtcaaacaaaaaaagagtgaccggtcattcctggtcactccgttagtgctgacatattcagttaagctgaatagctggactttgatttaattcaaccacacattaatacaaatattgtaagtcactagccggcgttgggtaagccaataccaaccgttgtaaatctggtaaagtcacgtgtttttcaattaacaacgtgaagtagttaatcatctcgtcggcaacatcacttagaagggtagcacccacaacctgcccactcgctttagcaaccactactttagcttgggcttgttgtgcgccaaagcggtaataagtgaaccacttcgtcatatcaagtgtattgacacgatactcatctggatgctcagtcgccacggccgcgctgatcccgacttgcgctaaattgggcgctgcaaaaacctgcgttggcacaacgggatactttatggctgcgccgggatgcgtcaactcaccgaccagataacgcgcttcaaaacctgcaactggcgttaacttcggtaccggtgtatcgctgacatccccaatggcataaatgtgcgggttggccgtctgcaaatgatcgttgacttgaatcccatgccgatcaaaggtaacgcccacgttggctagacctaactggtccgcgttcggaatccgtcccgctgagctgatgaccagatccgttgtcagctcgaaattatcagctgtcaattgtagaccggtcgccgttttagtaattgcttggacatccgtattcaagtcaaacgtgattccatcagccgtcattgcggccatcaaatccttaaccaaatctgcatcaaaagcttttaacgggcggtcattatgatgaatcacgtgcacatcagcgccagcggcattcgcaatcgtcgccaattcaaagcctacgtagccaccacctacaaatgtcacgcgtttaggcatctggtccaaatctaagaagtcagtgctcgtcttaaagtattcgtgcccggtaatcggtagaatcgccggacgctgaccagtggcaatcacgtaatcagtcgcactgactactcgatccccgaccgctaactgattgtcggattgaaagtgtgcttggccatgtaacgtcgcaatatcttgccccgttagtccgttcaacgtcccatcgttgatgccatccgtatagcctcgtttatgcgccatcagtgctggccaatcaattttgggcgcgccaatcaggccctgcccttgtaaatgttgcgccgcttgtcgcgcttcgacggcgcttaacaggattttcttagggtcacaaccgcggttaggacaagtgccgccccacagatccgcttcaacgatcaacactgtcttgccctgggcctttaatccgctagccatggcattgccggctggtccgccaccaatcacaacaacatcgtactgttccgccattcgaaattcctccttaaattcattagcgaccatcaattatcacaacctagtgtaactgattcatccttaattgacgattaagatacttcttcatgttgactcaagtaagccacgattcgttggcgatccaaatagccaacaacccgattttcttccgtgaccgccacataatcgtgatctgtcaatgccgtaaaggcggtgcgtaacgtggcttgaacgtctaacgattgaatccgaccactcgcaacactgggttcttctgtgagataaccctgaataagccctacacgcccaacgtagacatcatagacatttttagctcggctcgcgccaaagaagttccgcacaaagtcgttcactggatgctgagccagagcagccggcgtatcgacttgtattaactgaccgtgttgcatgacaccgatccgatcacccaacttcaacgcctcattcatatcatgcgtcacgaagacgatcgtgttgtgatagcgggcgtgtagccgtaagaccaagtcttgcaattgttgccgcgagatggggtctaacgcactaaatggttcatccatcaaaacaatatctggttgcgccgcaatcgcccgtaagataccgatgcgttgctgctcaccaccggataattctgacggcatccggtcacggtattcctttggatcgaggccaacttccgccaatagctcatcaatcgtttgattaatttccttcttagctgtccctttcatttctggaatcacggcgatattttgcgccaccgtcatcgttgggaacaaggcaatttgctgtaagacataccccatttgccaccgtagacttcggactggtatcgtggttgtatcagtaccattaactaggattttaccagccgtcagtggctctaagcagttgatcattttaagtgacgtcgttttgccactcccagaagtccctaccaaaacaaatagctcaccctggtcaatcgttaaattaaggtcgggaatcacggtctgcccattaaagtctttctggacgtgttgaaattcaattgccgttgtcatttaacgtccctccttcaataagccgtgcttcacaagatagcgatgtgcaaccgtcgaagcggactgcttcttaacattgacttcatagttcatttcttgcatatcagtttctgaaatctttcctgctaacttattcaacgctttaacgaccttaggatgtttgttggcaaagttcgtcttcatcaacggtgccccttgatacgttgggaagaagtgcttgttatccttcaataaggccaagtgatactgccgtaattcactatccgtcgcataggcatctaccaagttgattttccccttactgatggcttcatagcgtagcgccggctccatcgacttggcagtcacgtctaacccataagtcttcttgattccttttaagccatcattacgatcaataaactctagggtcattccgggtttcagaatcgattcaacttgcgttaagtcgctgattgtcttcaaatgatgttcttgttgaaatttcttagtcactgccaatgcgtacgtattgttatactgcatcggcttcaagtaagtcatttgttcctgtttagcgaggcgctgtttggcgagctgataggtctgattagctgtttgaccagctgggttatttcccttaactaaggtctccagcaccgagccagtaaattcaggataaatatcaacctgattattctttaacgcgctgaataagaacgtggtcttgccaaagttaggcttgagcgtcacatgaacatgctcatcttcagcttcaatcagctgcttatacatattaatcaagatttctggttcggaaccgagtttacctgcaatcgtaattgtttcaactcgattggcataaacactataagccccgccaccacctagtaaagctaaaataccgacaaagacgattaaggcgtggcgtggtttagccgtttgaaaccaccgaacgagcgcactcagcagaattgctaacaatgctgatgagatagccccaatcaataataacgaggtatcattacggtcaataccgagcatgataaaggtcccgagacccccagcaccaatcaaagcggccaaagtagccgtcccaataattaagacgagcgcggtccgaatcccagcaatgatctgtggtagggcaatgggtagttcaactttaaacaacttacgcattcgtgacatcccaaaggcatcggcggcctcttcaattgaggcgtcaatttctgagatacccaaataagtattttgaaaaattggcagtaaagcatagatcaccagcgcaattactgctggcaccgttccaatcccaactaacggaatcaataaccctaacagtgccaaagacggaatcgtctgtaagacactcgtgagctgtaacaatccctcggcccaccgtggtcgtcgaacgacccaaatagccaacggaatcgcaattaccattgcgatgactaatgatgctaatgaaatccccaagtgttgccatagcgcagtcagcaaatccccgcgtcgatccataaacgtctgtattaatgtctgcatgctaacctccagtgctcacctttattacttaataacttcttaattatccatgtatttaatcgtagcataatccgccaaaaatcatagtaatacgcactgacaattcactaaattttgtaactattgtagtttcatgttaaagttattcattaatttaaaatgaagctggctagtttttacgaaactattagatgaaccactcaatggattatcattacaactaaggaggccccaacaatggctacgattcatctttaccttgcaagtaccaaccaccaatcgaccaacatcaccgcaacaacccccgctgcctgggtcgtcattctgcgatacgctgaccatcaaaaggcgctaaacgacggtggctacggacataccgaaacttcactggccttgagtgctctgaccaccgcactcgccacgttgaaacgtcatgatttacccgttcatgttcacaccacaactgaacaagtggcggcggttattagcgaacaacgttatttaagctggcggcaaaacaactgggacgttcccgaagccgaccagccagacctaccccaatggcaaacgctgattcccattatcgaagaatttcccaacctcaccatcacctaccaccccgtggacgatcccgcgatgaccaccgcaacgactacgctaacggcggtgatgacgaagctataatggcggtgcaaacctaagtccaaagcagccagcttaggcccgctggaaaagttcgggttagcgtaaacatgtttggttagttcgtcctacaccgacttccaggcatttctgccaattgccggaacgtggtgggcacagatttaagtcgaaacaccacgtctcaaatactggcctttcactaaccaagaacaagacgcttgctaagtgaaatttcaccactgggcattgtcagaaacgccttccagtcgggatagtattcgaatggctgacggtgaggcactcaacttttattggactcatcattgttcttcataaacagtaattttgtcgagcaactgtcaggcagaaagtgacattgtgatagcttactatttcggaatcaccatagtagtaatcaaacgtttcaacaaagtggttaatgtaaccctaacctctagtttaaggctccattatcaaaatagtcagcgaccaattataccaagttaagtggccgttcatcagccattcgagcggcttaccgaccggaggggctgggtgacaatgctcagtagccaaattattcttagtcggaagtgggctacttccggcttagaataagactcgtatttgagaccgggcgggtttgtgcacgggctcaaatcgatatcggcttacgttccggcaattgtcacccagccccggaggtcggaataggacgatcattgctgccgaacaagaatccacctgcttgtcatcatccaagcaccagctaaaataataactaacgagaccctatctctcccatgctacatgggggaagcttaaagtttagacttgaaataaagaagcgaacccctaccacaataacaactgtgatcgttgggctcgcttcttagcatcattattcagattaattattatcagcgggtatttttccatgccgataatgccgactcccggttcgccggtccttacgccgcgtaacttttgacagcttagccgcaccattgacggctgagttcatcatgcggtcaaactgacgatcactcaaccactgacgagccgttaatgagacccccgcgcccatacctgcgtgatagcgagtcttgggcttcacatcattgacagcgcgaaccatcagtttagcaatcactcccggattggaagcaaactgatcgaacaatgacagcatcgcaccgaccttaacggcttgttcatgataggctgtctcaccggaaactgccaacagctttttttccgcaataccagcccattcagtcttgattccaccaggttcaacgatgacaacatctataccaaatggtgcgacttccatccgtaacgaatcgctcatcccttcaattgcgtgtttggtccccatataccaagcacttaaaggctgatagatctttcccccaattgaagaaacattaatgatccgaccacgatgttgtgcccgcatcaacggtaaaactaattgtgtcaaccgcatcacaccaaagacattgaccttgaattggtactcgccttctgcgaccggaacgtcttccaaggaaccgtatgagccataccccgcattgttgattaggacatcaatgcgcccctgttcgacctgaatcgtcttgacagccgcgattaacgtcgcttcatccgtcacgtcgacttttaaaacgtgcactccagccgctgctaaatccgtcattttttcaatccgccgtgcggctccgtacacaatgttcccctgagcttgtaacttcaaagcagttgctttaccgatccccgaagatgcgcccgtaattaagatgacccgtggttgactcataatccgttcctccatcgttaactgtatttactgtcatgctacgtcaaacccttcacaattgcaatcgaattcattgcccgtagtatgctaaaatagaactaatttcaagcacgtcaatttaattggaggaatgaacatgtcaacaaagattatcatggacactgaccctggtattgatgatgccgccgcaattacctttgcgttaaatcatcctgacttggacttacaattaattacaacggtcgccggcaatgtgacggtcgacaaaacgacgctgaatgcgctcaaactaacgcgcttctttaacagtgacgttcccgtagcgggtggggctgcccaaccgctgatcaaaccgtttgaagatgccgtccgaattcacggtgtttcaggaatgccgggttacgacttcccgactgaccttgcggaaccattaccagaaacagccgttgaagcgctccgtgactacatcatggctgctgaacaaccgattacgttagtgccaacgggagcctataccaacattgcgctcttatttaagacctaccccgaagtaatgccacacattaaagaaatcgttgcgatgggtggggccttaggcaaaggtaatatgaccagcgccgcagagttcaacgtctttaccgacccgcacgcggctgaaatcatgtaccaatccggcgttccaattaccatggtcggcttagacgtgacgatgaaggcccttttaacgcgcgaatcgattgaacagttaccgaccctcggtaaaactggcgaaatgctccacgccctctttggtcattacaacgaccgcaaccagactggcgttgcgatgcatgatgtcaatacgctcttctacttactacatccagaagccttcacgactgaaaagatgtggattgatgtccagacggagggccccgctaatggcgagaccgttggcgatattcgtggtgcttaccatgacggcaaaaccaacgcgaccgtttgtgtcgatattgatgcggctgctttcaacaagtggttcctagaaaccgtggcagccattgaccaacctaaataaaccactaccaatcgtcattaattaagctaaaaaatgaaccacttcagcttgcacaattatcatgtgcgcttgaagtggttcatttttagtttgcgttacgcttttatcaaaacgtagtgctactcaaagtgcttaatacgctcagcaaccactgaccgtacctgattaaatgtcatccggcgtatctgggactaattgaatcaatggttgaccgaagttgacttcttcaccattcttcactaggaaggctttgaccgtccccgcttgcttagcaaccactggccgcatcatctgcatcgcttgaatgaggccgacttgttgaccaacgctaacgtggtcgcctaacttaacgtatggcgcttcttctgaagaatgcgctgggtaatagattcctacgaccggtgccgtcacgcattccttaggatcaatcggcgctggttctggttcaggatcaggtgttacaacgctcgtcggattgctagccgtactggtcgccactggggttggttccgcctccgcaacaactggggtactaactgttgagaccggtgtcggtgtgaccggcgttgggtcaatcaccggctgattgggaagtggcgccggctgcggggtcaccgtcgtcttgccgtgtcccttcttacccatttgaatttcaaaatcttggtcccgatactcaaaactagttaaactgctttgttcaaacttgtccattaactgataaatcttatctaattccatacaacaccctccaattaatttacgctttgattataacgcatagtttagcgcaggagtgtggtggaagtatgaacgcttctttaagaattcgtcaatatttcgtttaagcagacgccaactcatgatccgccggaactaatttaaacaaaaataatggtgctggtgacttacctgcctgcgcgtacgctaacactgtatcaacgtggtctagctgtaacaaccgatcatcaagttgccacaagccgcgttggtaatagtcgcggcaatattgcacgaggttggtcaaaaagttaccgacggcctcattgaccgtcgcgccacgcccatcgacaccccaaaaatcggcggattctaaccagtaccgttgttccgataattctcgataacgaccaacttcatgaattaacactaaccgtgctgtcattgccaaggcccctttcaatctcaatgccactttcataataacatctaagatagcaccgataattagccctgacaatcctgaatggcaaacccgtttcaaattaaggttattaacgaaaatcgccttatttttcaatcaagtgacgctttttacttaagattctgaatcttgttcgtgttgtaaaaacgtaccgtggtggttcaggtcggcttgtaaatcagccattgtaaactgatgatagtaagcccgatattgacggtcagctactgtaaataaatccgtcaacgtttcactaatattggccgcaatcggggattgatcagcctgttcatccgttttggatggtcccgtaatgaagcgcgcatagctaattgttggggggatggttaaatcatatagatcgccgaggttcatatcggccaacgccaagtctaattggtagcccccatttttaccaaccgtccccgttaaatacccatgcttatgtagaactgataaaatattgcgaatcatcaccgggttaagatgcagtgactgcgcgagttcccgactagcgaccttactatcacggtgtgcatcaaggtacaggatactatgcaccgccaccgaaaaatcaagtttcatgttacttcctcccacactttgtcataattctattctaccaccaactgtaatgactctcatttcaattagccccaatatgcaggtataatgtgtttgggagtgaaaaaatatgtcatctacaatcagtgccgcaacgttcaagctaaatgatcaagctgcgttgtcaccggcacaacaatcattagagcaccaactattaacttttatccgtacccatcgccagcaaaaacagcccagcctctttgttattcatggtgatgcaggaactggcaagagtgccgtattagccgccgcgtttgctcggctacaagccctcaatcgtagcttgacaccaaacgatttgcaggccactgacaactatctcgtcgtcaatcacaatgaaatgctcaaaatttataagcgcttagctggtgaagatcccgtcttgcgcaaaaaagacttccaaaagcccactccgttgatcaaccggttggcaaaagaacaccggcaagcagacgttgtttttatcgacgaagcgcacctattactcacgcaaccagaccgctataaccgctttacaggtcacaaccagttaacggaactgatcaatcatagtcgcgtcgttgtcctcgtcttcgacacccgtcaagtcttgaagttaaagagctactggcacagcaacgatctcaagccatttttagaccagtacccgcacgcgaactacaacttagacgagcaatttcgggtcactggcggcgccgatgttgtcgactggatcgatggttttacccgcgggcaattacaaccaaaacccgttagcgataactttgatctacgcttttttgatgacgggcaacccttatacgacctgatcaaacaacgcgaccagcagtatggactcgctcggatggtggcaaccgctgacttcccgtacgtcgttaatcatggcacttggtacgtgacggccggacaattgaagcttccgtgggataaagtcaacttaactgatgatccttgggccttacgacctgagacactgaatgaagttggttctatttataccattcaagggtttgatttgaattatgcgggggtcattcttggcccttctgtgggctatgatgaagaccatgatcggattgtcgttcgccctgaacgctatgaagatcaagaagcgttcaaaaaccggacagacttaggcgatctgcgtccccttaaacagcagattatctttaactcaatcaacgtcttgatgaaacgtggtcgttatgggctttatatttatgcggttgacccagcactacgccagcgactattagcgttataataagactaattacacgaggagggatttgcaatgcaactatcaattccgaccatcaatggcgcccttgcagccacctattccaaacaagcggccgttacccaaacgtataagggccaccccatcatctcgtttcccgttgacattagtgatgtgccagctggcacccattcactggcgttcactttcgttgaccacgatgcaattccggtaggtggcttcacctggattcattggattgccgccaatttaccggcaaccacgacccacatccctgaaaatgccagtcagaccggtgctattccgatggtccaaggtaataattccacagcgggcgcctatgttcacgagactgatccgaaagttagccaacactacgtcggcccgtatccgcctgacaaggatcatcgttattcatttaaactatttgcacttgatactgagttagacctccaacctggatactggctcaacgaatttcatgatgccattgccggtcacgtgctagcaactgctaaaacgacggtcattggcaaagtgtaatccaatctgccatataatatggatagcttagacaaccaaaaacgttgctacagaatcacgtagcaacgttttttattaacactaatataatggcattacttcaaagaaccagctaagcaaaatacatcagaataaacgcaattaatgccggtagcccctgaatcacgacgatcgcgcgactgacagtaatactaccataaaccgcggcaaccatcacacaggctaagaaaaacagggttgcaccggcgctcgcgacggccggaatcacaaacaagctgtataaaataccgacggccaagaaaccgttatataacccttgatttttaaacaataattgcactgacggcgactgtagcgtttgccgtggaattccaaacgcttttgcggccatttcactatccgcattaaacatttccagccacaaaataaataaatgttcaacggcaaccaagatcgccataatcattgctgcaacgtgcatcctaatcccctccttttttcggtccttacttgaattgtaccagttactgcgcctaaactgtagaaatacagacttacttgtctttatacgagctaattcgtcacaaatcatgattaaaacatggtaaatccggggtcaaaactgccaccgttttgaccccgaggtgcttttaaatgataaagcccggctacgaccaagcagataacttgctggttgcaaccggactttattcacatctcattaccaaattagcttaatctacacttacataccgggcatccaaacatcttcgggcttgatgccttgttccttcgcaaaagcattccgtaaggtgtccatatccattaaatgataagtttgtgggtgttgtggatcatatgattcaatttgggccatcataccaccatcttcatgttcgatgatatggcagtgatacatgtaaactcctgtcagctcaaatttgaccttgatccgcaccgtttcaccagggttgacaccgaccgtatccttcagcccatgttcattaggataaactggaccatcattccgtgccaaaactctaaactgagtcccatgaacgtggaatggatgaaccatgccgttttcagtactgttggtgttgcggatttcccaaatggcgacatccccaactttctgccgagcgtcgatgcgactcatatcgaatttcttaccatccagcgcgacttcatcatccatcccatccatcgtgattgtgcgaacaggtaagtcaggtgttggggtttcatcaggaatatcaactaaatgttctggtagtttggtgtcatccggtacgaacgacttgattcggaaacgacatagcggcgtatcatccgtcatcagcgtgacttcatcgcccggctgatactgaccgaaatcaacgacaatttcgtcccgttccgcacaggtcatcatcactttagtcatataaaccggtgccggcaaaatgccaccatcggaagcgacttgtgcaaattccaaatcgtcattgaagtgcagacgccattcacgccggttcgacccatccaagattcgtagccgcacccgctgcgtcgtcacatcaaaatatgggttgaccgtcccgttaactaacgccgtatgcccttgaacaccatctggatcatagtccgcccggtaatcaaattggttatcatcgtgaaattcacggtcttgtaataccaacggaatatcatccacaccataattacgtggtaacggtaactgatcttcaacgtcatccttaataatcaccatcgttgctaggcctttccagacctgcgtcgcagtcgatgggcacggatgagcatgtaaccacgtagtcgcagctggttgatgtactttaaagtcaatgtgattcgtttcaccgggatagaccggtgcgtggcagccaccatcggtaatgggccctgggacattcaagccgtgccaatggaaagtcgtcaattctgggagtttattttccaagtcaatatgggtctgcttaccattacgaaagacgatagtttggcctaggaagcccgcattatagccccacgttttagtcttcttaccaggtaaaaactgagtttcgctttcttgtgccgtgacggtatagtaatcatccgtatccgtctggcgatccggcttcaataacggcggaatcgctaacggttgtggctcgactttcggtgtaactagtggaatatagccaccgtcatgtgtgttgtaagcaggttcctcaaaaaaataatcagtatagactttttttgccatgttgacatccccttagatatttaaaataacttagattcaaaaaatggtggcgcttttatacgtcaccttcagtttagaattattttaaaaaagtgtcaaacgaatttcagtgctcaattgctaatcattaaggtcatgctgtcgtccctgataacacttaaaatagcgcgttgactgtattcgtggttgcatcgcccaaccaagcattcgtcaccaaatgatcaaaatagctcgtttcaacaacaccagccaaagttgccaattcaacattcaggtccgtaagtttggcatacgttggaaaatgacaatcgatcaataaattgccgctatcggttaacgtgaagccatcccgattattagcagttcgaatggttgcctgaccgccaagatcactcaccgtccgcatgactaacgataaggccgctggtagtacttctaagactagtggcgtcttgatatcaaattgatcgactaaccgatcctgcatcgttaacagccaatattcatccgccaaactggcaataatcttctcattagcatggattccaccgccacttttgagcgcgttaccgtaatgatctaactgatcgcagccgtcaaaagcaatatcaacccggtcacaatatgcagtatctacaacggtatacccgagaacggtcgcaagctggcgggtcgtcggtgatggggtgacgaccgtaatatcattcacatgattggctgcctccttgaccagttcaccaaccgtcgagccaccaccaaaaccaacaaccatttgcggttttattaacgtcaaagcttgttgaacaattgcctgtttaatcgtcatatcaatttccttccatcatcacaagatattctcatcatagcacgcgataacctatttaactaactttaatcgcaaccaaatcacacgatttttggtcaaattcgggtctaggatgaggcccctatctcagcaacgttttaaaatacaattattgatggcgaccttcgtttttgggggaaagagggttacaacaatgaagaataagtacagtgctaagttaggtttaaccacattaaccgtgatttttggtcttgggctgacaccaattgccaacgcaaaatcgattgcgacaccatattcacggagtcgttggccacacgctcaagtgacctacgtcattcaagcatcatcatacgagcggcacgtctatcaagcggccatccaagcctggaatgcgactggtcactttaaattcgtgccgggaaccactgctcatcatcaaattactttggggaccagtaatgccaccagtgggcagtattatcgcttagctggtattactttttcgaccggttataccaatggttattacacaaaagcgcaagtgtacttgttaacacgtaattttgtacgctaccactattcttatacggatcaagtccacgtggctgaacacgagttaggacatactattggtttggaacacagccgtgatcgccacagtgtcatgttagctgataatcgctataacggtattagtgcagccgatagcgcggcggtgcgtctgcgttaccgcttacctgttggcaggctttaggtaaagctatccaactaggtctgccattaataccttgggtgcggtgaccccactttgatgtttacaatcaataccgcacccaggaaggccgcgatgatgagtcgcgaccttttttatgagcaccgatggccgtaatcattgttgaaacataacttaattagcacgctaaaaatgattgcagacaacaagcactttgatacggtcgattcctcgtatcaaagtgctgcgcttagctgtgcagtaaataaccatagcttcctaaaataactagtacataccctgtagccgtgactaatgctagcaacatgccgcttccaggttgccacccgcggcgatgacaaaaagtcaaacagccactggttaacaacattagcgcaaacgttgctgcgatgactccgaagaactggccccattgaccaagcaaggcacagcctactcccaaaatcgtcgcgatcacaatcacgaaccaccgttgccggtttgttaattgtcggcgcatattcatcccaccatatagttaatgcagtcaacgttctgcttagtaaaattttaacattttggtagaagtttgccaaacaagacaattaacaaccgtcactttttaggcttgttgacgtttttttactgattgatcgcttaaaacgtcatcaaaggcgtggaatttctcgataatcgtgtccgctgaattacggaacttagcttgttcatcagcagtcagagcaagcgtcgtcacactctcgaccccatctttgccaatgattgctggctgaccaacatacgtcccaaaggtctcactatacgcagagaccgggcatgctaagcgagcatttgcaaagaccgcttcacttaatttaaccgcgcaagtagcaatggcaaaactggtataccccttaccagaatgaaccgcccagccaccatggcgtgcagctgcctcaagtgcatctaagtccaaatcatacttatcaactaaggatgtaattggaataccgttaacctgaaccgttgaccacgcgctgaattgtgattcgccgtgttcaccgtaaacatacccgctaatgttttttggatcacagttgaaggcttctgcgacaaccttttgcatgcgcgccgtatccaagaaagtcccagtcccaaagacctgttggcgtgataatcccgttgcgcgttggaaatagtgagtaattgcgtcgcacggattcattgtatcgatgaccacgccattaaatttggttgctttaactttcggcgcgatatcttgaacgatttgcttcgtatattcaaattcagcccaccggttaccggaagcgtggtctaacgcgtgaatgttgccgctagtaacaaacaagatatccgtgtcgtctaattcatgataatcattaatcttaataatcgttcgactatctaaccgggcttgagcatcttgtaaatctagttgttctgcgcgggccttggccgcattggtatcaatcaagattaattcatccgcaattcctttacaaactaatgtataagcaatagtcgctccaacgtgaccgaccccaataatcgcatattttcgcataagctgaacctccgttttaattattaagacgttatgtaataatctcaccatcttttaatttatgtggtgataaccttactgctccggttactaatggtcaactgctgaaagcgccttatctttcatatcatcattttcttaagcaatagcacgcactatagttaccaattcccctaattagtttaagataattaatcacttgcccccccattgcctaattattttcattaccgaactaatcgcgaccactcttggaagtcacttcctacatttctgccaataagcaaccttgaccggcttttgctaagaatttacaaggagtccactcatgttttcaatagttttgcgtcacaaaatctaacatcaacagttccataatgacaccaaagcccgtttgtaagtttaatatttaacctaaacacaaaaaaagagtgcgtcgctcaataatcaatgttataatttctaacatcaaatggtatggataggggttgggagtatgaacgctgcaaattcaacgtttttagtgttatctagtatattggtattattcatgacgcccggattagcatttttctacggtggcttagtttccaaacggaatgtcgttaacaccatgttatccgtcttcatgatttgtggcttagcaatcttgttatggctcgcattcggttattcactatctttttccggtgatttaggtggctttgtcggtaatctcaaagccacttggttgcatggtgtggacttgaccgcgcttaccgcgacaaagattcccaacggtttatatctcatctttcaaatgatgtttgccattatcacgccagcactatttgttggcgcggtggtcggccgtatccgttttaaattcttattagccttcatcatcttctggtcactcctcatctactatccaatggttcatatggtttgggataacggtttattagctaaacttggcgtcatcgatttcgctggtggtaccgtcgtccacatcaatgccggtatcaccgctttagtcttatcagcattcttaggtgcccgccacaagtatggcaaggatatgacccagcactataacatcttatgggtattgctggggaccgctattttatggatcggctggtacggtttcaatgccggttcggcgcttgccatgaacgacatcgccatccaagccttcttaaccacgaccgttgccaccgccgcttccatgatgacgtggatggtcgttgatatgctaaccaagggcaaaccaaccctagtcggtgtctgcaccggtaccctttgtggtctcgttgcgattacacctgcttgtggctacgtcaccatttctggtgccttttggattggccttatcgccacattaactagttacggcttcattacgttcatcaaaccacgcttaggtatcgatgatgcactcgatgcctttggatgccacggtgtttccggcatggtcggcagtatcatgactgggctattcgctagcaaagccgttaataacacaatttctctaaacggtcttttctatggtggcggctttaaattattcggattacaactattagcaacgatctttaccattggctttactaccatcgtttgcatcgtcattatcgtactattgaaacgagtcatcagaatgcgcgttgacgaacaagaggaagaactcggactcgatcaaggcgaacacggcgaagtcgctgactacaccgttcaaatgagtcacgacttgacgaacatccaacaccatagcgatgaatttcgtggtcagttagcgcaactgctagataagcaacaacgattccgataatcggaatcatgggcgtaatatgcacaggtttcagtgcgttcgagaaagcagtcgcatggcatttctatcaatgctcagtatcacaagcgggcataaatcagacgggagaagactgaggattagcctaactagggaattaaacgacgagtttggcgtcataacggcgctaatccgaggtttttttcagtgagcttatgccctggatctttaaaacaagcctgatttaaccagaccccctttcagcaacatcaaggatgcaagaatataaaaacgtgtcgcaagaaatcatctcagatttctcgcaacacgttttttgatttgctaatgtttacttggcaggtgccgtgcgtcgatgttttagtaaccgcccgccagtaatgaccgtcgcaactaaacaaatccctaacgagaccatgaacgcaatgtgcataccatcaataaagatctccgggtgagctggcaggtatgacgtaaccttataccccgctgattgactcattgccgaatatagtacggtcgtggcaaccgaaattccaacaatcatgcctaattcacgtgccaacgcgttaatcccgccagcaacgcccaagtccttgaccgccactgaactcatcacgatcgaattattaggtgccatgaagataccattgccaaatccaactaatccgacgaataataagaagaaccaaagtggtgttgctagccccacaaccatgtaacccacttgactgattgaaatcaggaccaatcccacgaacgttaacaattctggtccgatcttgtcagaaatcgtcccagcaatcggggcgaccaccacttgtacgatggggaataccatcaaggcgtagcccgcatagtttgccgctagcccccgagcattttctaaataaaacggggcaatcacgttaaagaaaaagttcgcaataaaaattaataacgcacataagatactaatgctaaaacaggcattcttaaataattgtagcgctagcagcggattttcatggcgcaactcgacgcgaacaaaaataatcagcgtcacaattgccactgcaaacaaggctaagataaccggctgcaagaacccaatctgttgcccgataaacacacctgcaaatagtgcaaccatgagtacggcaaatagccccgccccggtcttatccaatggttgttgcgtcgtcgtaacgtcttttggcaaaatcattgcacctaaaatcatcgccaagattcccaccggaacgttgatccagaaaatatagccccagctcaaatgagctaggatcaaaccaccgataccggggccagcaatactccccaatgcaacgaatgagccaatcatacctagcgcccggccccgttccttaaacgggaaaacttcggtaataatcccgttgttcgtactcatcgtcattgccgctccgactgcttgaatactgcgtgcaattagtagaaatggtaaccccacactgaatcctgacaataatgagccaataatgaatagtaaggacccgattttaaacacccgaatcttaccgtaaatatcacctaatttaccaaataataacaataacgcacaaatcacaatcaaataaattgagacgacccattccgcctgattcattggaatcgctaaattcttactcatgactggcaaggcaatgttcacaatactcccatctaacgttgacatgaacgtaaataaacataccgcaaccagtatccaccagcgatgcttttgaatttgtggatcagtcgcaaacgacattgttttcatcccttaacttcccctccattgcgcaactggcggtcaagccagtctaattgtgcttgggctcgtacccgttgtaactcattgaccatcaacgcatcttgaatatcagcggcaagcatgtgggtattcgtcatcacccgtttgtgctgcgccgttaagcgtgcgacctgtccccgtgcaaattgctgaaaatccaacaagattacttgctgctgatcacgacttaataaatgtaaaaaattcagctttatttgaaacgttaactgcgtttgcttgttgagcgcgactggcgtcataactaactgccaaaattgcgtgcgaccagccgctgttatcgtggctaacttttgtggccgtttattagtggtccgcttaaacgccagtgttaattcttcagccgcggctaacttatctagcaacgggtacaacgcgccaaaactaatggttaattctgaaccgactacgtttaccagcgctttacgcaactggtagcccgtcatcggatgatccatcaactgtcctaaaataaacaattcatacattaaattcaccaatccttcgcgctgttaagtatatatatatcttttagatatattgcaaggttccaaactgattttttaattatgcccctccgttaccgaataacccagttcacgtttaatactagattaaaacggctaaacatcagcgcttctcaaatcgatttttaggcaaaaaaatagcacctctcaggacgacatcatcgtttgaggtgctatctcatttaatcatcacttatgtttcgattttttatctttaataaagaagtacccgaatactaacatgaccccaatagccggtacatctaacgcattaaaggggttctgaaattgcggtccggccaaaatcaccagtattgcgacaaaacatagcccaattaaccaccacccgtatttttgaaagaaacggataaaggtactgtctggaaatttgaatttgatatattgtaataccaatattaatagcacataggcgacaacatttaagaatagtggcatatccatgatatgaccccctttatgctctagtattaagataacccaccaaatggtattccaggcggaaaataatctaatgcttataacgaatataactagattgctgaagcattacaaaaaatcaagcttaatttaacccgaaaccaactcataaattgtgcattgaagtttagacattttcctttcaaattggtagtacggtcagcccaagcttatcccctcgaattaaagcatcagcggcccccagtccgaataatgcgcgacgttgtattgtactttattccaaccaaagccagcttgaattcacgcaaaaaatgggtgattgccatcgcaatcacccatcgatattagtatgttaacttaatgcaaccactaaccagccgccgtcacttactattgaataagaccgactgacttttaatataatgattgactggatgtaacagtactgtcggattctcaatcgccgaagtaaccgagtgacctgaaacattcactaacgcaaagaagacgaacaggacaattgccactaacatgacgagcttggtggcaatcgtcatcttttctggcaagatttgcttgtatagcgtccgatgaacttgacggctaactgcctgcttactcttatcgctatccttagccttttcttcgactaattgtcgttcataagcgacaatgtcaaagtccgcttgttccttcttcttaccgacctgatacttcttacgataagccgccgtttgcgctttgaaatccttagagaatttccggtaatgatcaacagtttccttggtctcgccgacttctaaaagatccccaaagtgcatccaagcgacccggtcacaaagtaattccacttgccgtaaattatggctgacaaagataatggtcttcccttgcttcttgaattccataatcttatccacacatttttgatagaaggtgtcatcaccaaccgagagtgcttcatcaataatcatgatgtcgggattgatatgcaccgcaatcgcaaatcccaatcgtgaccgcatcccggtcgaatagtccttaactggttgaccaataaaatcaccaatatccgcgaaatcaacaatatcatcacgaaccgcttggatctctttaatactcaacccttgcatgagtcctttcaaccgaatgttttcatcaccggttaaattccactttaagccggctccgattgaaataatggacgtatcaccgtgcacatccactgtcccagtcgtttgaggaatgattcccgaaatgatattcgaaatcgttgacttaccagaaccgttgattccgataatacccaacgcttcacctggtttaacgtttaagctgaccccttttagcgaccaaaaccgcgggacatcaacattaccaatgttaaaaaagtgttttaacttatcgttgttactacgatataaatcatattctttagtgacattatgcaattcaaccttatattgattttccatcagttccgcctcctaaatcaaatccacaaagttcgaacggaacttgttatagagatacgttccagtcagaatcacaacgagattgaagagccaaaagacaatcgtcaacgtgatattaggctgttgccagatccaaccacgattaagcaacgattcccgcattccgttgagcacgtagtagaacggatttagttctagtaggcgcacaaaaactgcggggaagttagacgttgtaaagttaaatagcaccccactcatatagaacagcatccgcaatacggattgaagtgtgatatgccagtcacgaatcagaacactgaccgtggcattaaaaatcccaagtgaatacattaatacgatcatacaaccaaagtagtagataaattgaatccaagaaactgagggccaaatgccattaacgaacatcaggaagattccaaaagcaatcatcgtccagaaactatataagttaccataaattttaattgacggtaatacgttgactgggaatttcatctttgaaactaacccaacctgacgataaatgctagaagacgcgtccagcgtcgttttgttcatgtataaccatggtgcaatcccgacaaccatccatggtaaatacgggattcctggcatcggatcgccacgttttaacgcgaccccgaatactaaataataaattccgatttgaatcagtgggtttagaaattcccacgctaacccaaggtaatggctttggtatgtggcccgatcatcatacttcgccattcgccgaataatcttgaaattggcgaactgatcgccaatcgtcttaaacatcgtaaacatagtgcactccttaaatgtatgtcgcaacacgatcaagcgcctcttgaaaggtcatgacagatttacggtcaagataaaccgcagactacattataacgataaacctcgttaatagcaccgaaaataacattttttattaaatatttacctattatcaatagatacttattgaccgatactcctatttcacaagtaaagaaagcccttacatttgttgtgttttaaaaaaaccgtatgcgtttattttggcaatcatcatttgaatatcgaattgcactttaagatcactagctgtgaacgcatcatcggaacactattttttatgtagcgatgaccagaaccgtgttgtgttgcacacataccaaacagccgcactcaatgccggtaacagcgtccgggtgcaagcgaaaacggttttaaatttgcagaacaaggcccttctaatgagatgagcgacctgaatagcacgtgagcatccgtttacttacctagtcataacacacttaccaaaccagctgaataatgacttataatggcgtcttcacctcaaaaagtgctatgatgagggaacattaactaagggggttagacacgatgagttcaattattgagaatttacaattagccgcacaacaggttcacctcatcaacctatatcaagccaatagcgaagtggtttacaccggctacatcgaccgtctggcacctgatggcgttgtcgtgaatacttacgatgatgctgggctccaggacggcgccgtcttcatgcgctacgacgtcattgatgaagttgaaatgatgagtgaagaccttgataacatggcctttcgccttgaaaatgcaactactgaaggtttgaacagtgtgccacaaccaaccgtagctttagacgatcaacggccagtcctaacacagttagtcacccaagcccaaaccgatcatcaagttgtgctactagtcctcgaagacaacgaaaattatttagaaggtcaggtccaacaagtcactgaccaaacgattacctttaaaacttttgacaaatttaactttaaaaacaacgggcaacaggaaattccattggctgctattcagatcttagagttctgcggcaatgagctcttattggaaagcgcctttgtcaagaccatccatacgcatcgagcaaccatcaaagttagcgagtttgacgacgttgatcatactttaaacaacgccttaaatgagcaccaactgattgcaattcggtcagcagacgggtctgacatgttctttgttggcttcattaacgcattgaacgctgatagtgtcctgctcaatctgatcgatatgacgggccaatttgggggctacactctttgtcgccgttcactaattgaatcggtgacaacccagtccgactatttacaaacgatgcgtggctttattgaattaaatcgccagtatgagttaaatgttcaacccgtcttaaacgacgaacggttatttgacgccacaactgatctttttgattcaattttgcgacaagccgcaactttcaataacctcgttcacatcacgacagaaaaccccatgttgccagcaatgactggctatccgggaacgttaacgaacgggcacttcatcttctataacgtggatgatgataatcaaattaatcatgttggcacgatgatcgaactcgatcaggtcgttgaattatcctttgggtacatggacgcgtacctgttagagaagcggttaaagagcaccggtaatttataataattcaatacctcgaatcaaaataacgcaactggcattcacatgccagttgcgttattttgataccgttattacagctcaatatttccgagcaatcaagaacgagttgcgcccccgttgcatgaattatgctaagcaagtgactgactgtcatcattaatgctaagaggtcatcctaacgatcgaataagtgcagttttgcaattcgctgacaggcttccgtgaagcggggttcatcaatcaagagtccaacgcgcacatagccttcgccacccgcgccaaagccatttcctggcgccaccgcaaccgccgctttatccaacagcaaatcggcaaatgcttcactggtatacccttcagggactggcatccaagcgtaaaatgagccccctgatgggtagggctcccacccaatcttgcgggccgccgtaaagaactgattacggcgtcgttcatacagcccaaccagttcgtggaccgtctgttggtcactgttcaaggctgcaatcgctgcatcttgaatggccggaaagacgctaacaaacagatgatcctgaatcaaatttaaggcttcaatcatgtcagcattaccagcggcaaaaccaacgcgccaacctgccatgttaaaggacttagataacgtgtacatctcaattccaacgtctttagcccccgatgtctgtaggaagctcactggtcgctgaccatcgaacccaattgcaccataagcaaagtcatgaacgataccaatctgatgttcatttgcaaaatccaccgtgtcttgaaaaaactgcgacgttgcaacagcaccagtgggattattcgggtaattcaggtacaacagcttggccgccgcagccacttgtggatcaacctgctgataatccggtaagaaatgattgtccgctgttaaccgtagtaaagccaacttcacctgtgccaacgtaataccagataaatagtctgggtaaccggggtcaggtaagatcattgtatcgcccggatttagtaaggcaaagggtaactcgaccaacccaatcttactgccacccaatacggcaatctcagtctccgggtctaatttcacaccgtactcgcgttcgtaaaaatcagccgcggcttgtttgaatcgcggcaaacctcgaaacaacgaatacttgtgatccgcgggattggcagttgcagtctgcattgctttaacaacaaactcaggggtgggttggtcaggattgccttgacctaaattaatcacatccgcaccggccgccgctttggcattgacctttttgaccagattcgcaaagaactgttttggtaattgctgtaaaattttggactcttcaaatttcaaaattagtgcttcccttctgtcaatggttgtcagtactaatttacaatcaaccatactctcaagcctaattatgagtttttaattagaatatgtcaattttttaattgtttttctattaatcactaaattcagccaaaactaccaaaaatacgtctcaattttacttttcaaagtaaacctggtcatgcaaccgacaccgcgggttaaatggccggtgacagtgcgggcattgcccctcatgataccgatcaaccgtcattcgataacgacaagcaccacacatcacggctaaatccgtcggagcgctggccacaaaagtatgctggcacaacgtatcatggcaccggtaacacgcgtaatagcgttgacatcgccgacaccacaatgccgcaatatcagtttcaaggtgataatgttggcaccgaccggcagcgtctaaaccgatgccgtaaatcactggtacccactcagtcatactggtaaccctaccctgatcacttcaccactcgtaaatgtccgccgctccccggtcaacatgcggaccactaagccaccatgttcatcgatatcttcagccaccccattcaccacggaatcgcccacttgaagtgtcacttgttgacccaacactagtgatttagcccgatatgctcgcaaaaagtcggccgtagcgtagcgttttgatagcgctactagtgctgataataaggccgctgctaaccgattgcgatccactggtatgctcgggtcgaccgcctgggcacgggcttgcaattcccgcggaaaatcggtggtcgttaaattgagccccacaccgacaataaaggccgttgcggaagtcgattctaattccaaacttgcttctgtgataatgcccccgaccttatgctgatcaagataaatatcattgacccatttcaacccaaagttcttattaggataaaattgctgtaaaacattcaagacactcaccgcgacaccagttgtcagtaaacccacattgaccaatgcattcgtgggattaggaacaaccaagctaaaatacagtccagttttggccggtgaatagaagtcccggcccaaacggccatagccagccgtctgttcgtccgcgaagaaggcggcaaactgtggctgatgatgacttaaaaagctcttagctagaatctgagtggacggcgtctgggcgaccacttcaaggggccccgtaaattgccgttgcccatagatttgaatggctttggcatccaaattacggcttcccagataacagtagccccggtttttacgactctcaatctggtgtccttgctttctcaaagcattgattgccttccaaatactctcacgactacagccgactgattgggcaagctggtcccccgattgccactcaccatgatgacgcaataaaattgttaagacttgttctttagttgtcattatgacctcctgacctgccaatcacattagctatttactaagctggcaatccaaaatcaacgatggcccgcacacgccgggcaataaatacggccaaagtccctttaatgatgtcaccaggaagaaaggccacgttcgacagcaaggcggccgtcaaagtcatatgagactgaacagctagccaactagcaccgattacatcaacaaataagataccagccaaccagacaatgccaacttctagccaccaataaccacttgtcatcgcccgagttattttgatcaacgttccaatcagcattggtgccagcaaccaagcaacgagatagccacccgttggcccgagaaaaatcgcggcacccccacgccccccagataataggggtagtcccagtgccactaatcctaagaacaatccaactgcgatcgtcccatatttgcggccaagtaactcggcggctaaaaagatgcccatattctgcaacacaatcgggacgggaataaagcccactggaattcccggaaagaaacctaatacaataatcaaagcggtcaccatcgccgtctgggtcaggtgtttaatcgtctgtcgattcgtcatcatcgcacccctgttaatcaatttaaacgctattataaaacaacagtaacccaatatcaacatcatgggttactgtttagaaaataaaaaatcccatgacccttgttactgatcatgggatgattgcactattcttttggaatacgcttttcaacgtgatattgacgtgcttctggtcttggcgtatctgctgtcagtaagtcatccgcgtaaaaaaccgaataaccgtgatcctgttctagcggccgcgcaatcatgagtccgcgcttacgtccgtgacgcgcattataaatatccgcactacggagcgcttcattgtagtcatgcgattctgaaattgcgtcaccaggattaaataagacattttcatccatttgccatcagctccttgtcctcttaataacttaattatacacgctgataccgtcataacgaaagtttaaagattgatatcaacattataggttagtttcgagagcgttaaacctttggtgactaattgaccaatcaaagcttgggctttatcacgcatctttgcgaccatcactttatcttgttcagtcaagaaagccgttaactcgtcaccagataacttcgccgcttgtttatcggtcgcagccacaaattgacccagttcgattcgacattctttcaaataatcaatatcatcctgaacgaaatcagcatagtgtgattcaacaatcattgatagtgtccggtagagccagtaagcactattcatatcatgttttagcggggtgttcgcaaaactaggatcagtttcagaaacgttcgcatggaatgggaggtatggcgcaaaagctggtaccccaaatgtcatccacataatcgcgctttgttctgctggtacgtcattccgcacttgcataacgtgtgaattctgcgtccgattcattgaaattggccgaaactttttagcttctggtgtattcaagaagggatcgtacttcgtttcgttataatgagaacccagtacaaattcaacgtcggcaactgaaatcttcttggctgcgtgacaaatgaacggtagctcactcgactgtggatcttgttcgatctctggattgaaataacgttggccgtaccagacccggggagtattataatgccggtctttttcattatcagtaccgaagatatgacggaagttaaaaccttccttgtcagggttcaaatggtgttccgcaacaaattcttgaataccatcagaccacataaagttatcgggatcatcaaaatcaacccattgaatcgcaacttggttggcagccaccgcgtaagcatcatccggaatccgttgtgcaacccagtggtgaccagtgacgatctccatgtaccacacatcatctttatcattgaacaaaacaccgttaccttctggcgaaccatatttagcgatcaactggcccaagtattcaaccccaccacgggcagaatcaatgaacggcgtgagcatggttggcaatgaatcttctgcgagaccattcggcacgaagggatcaaaagtcagcgtatgttcattaccataaacactttcagttgaagaaacaccaacgtttttttcgttaaagccattttcttcaaaaacacccttttcggcgacttcaatgttcgggacagcttggtaacggtagccatctgctggaagtggtgcggtaaacccattcttcccagaagttaacgtttcgttgcgaccatgaacggcgggatggacgataaatttttgcggtgtaatcggcataaacgtatcatcattgcgggcaatcatcgttgaaccatcaacggtcgccttcttcccaactaaaattgtggtacaagcttgttcgtacatgcaagcatctcctgtctttaatttccgtgatcattattaatgatacacgctctaatttaaaaagccaccattgcgaaagcgctgacagataattcttacgcaattttaattgccgataaatttatcaatagtcataaatcttttcgtaatctaatcaataattcttaaatttgaaaaatcatcgtcacattttcttcacaattcgttgttaatatgtatctatagcaattaaggatccccctccaagattgctactataataattaacattcttttcatttactcctccaaagtaatgaaatccgtcaaagcgtaacaactttgacagcttgatgagcggcatgtgaacgtccccccgcttatatgaataaacgctcatcaagttatcagcatatgattccccgtcatatgctgacctactccttttgaccttcgtattcccgtacgaaggttttttgtcggcttaaatacttcaagcgctcctttaactccgtattactgaaccgccctctaaaacgagcttatccaaatagttactgagcgatatgcagcatgaattcaccatttatcgccatactttatcaacaatccaaaactcacccactattttataacggccctatcaatctaaccaaaaacagcatataatttaattattatcacattaaaggtgggtcatctatgcaagagggatacttagatcagcgcttaatcggtcagcgcttcattatcaaaccgaccgatctaactgacggcgtcgcattctatggcatcttgtaccatttgcacgccgcaacaccattgcacaccggcgataccgttgaaatcacggccgtcagtgctcatggtctaacggtaacgattatcgcaccacaacaatagggggaaattattatggtaggtatcatcgttgcaattattgtcattctactggtcgttttagtcctaatcgcttccatccgcatcatcacccaaccgaaccaaggtgtcgtcttaacatttggaaagttcgagcgcgtcattagttccggctttcactttattaaaccgttcatctcacgtgtcatcaccgttaacacggctcagacacccgttgatcttaatcaacaagtcgttatcaccaaagataacgctgaaatctcagttaagatttcgcttaagtaccacgtcactaatattgaagacttcgtttttaaaaacgaagactccgttcgtagtatgattcaagatacccgcgcggcactgcgtggtatcattgggaacaaagaattaaacgaagtcctgaatgggacgcaagaaatcaatgccgccctcttcaaggagatctcctccgttacggcgggctacggtttaaacgttgaccgggtcaatattgattccgttaacccttcggcagatattcaggcttccatgaataaactcctgcaagctacgcgggaacgggatgccaccatcgcaactgctgaaggtaagagtaagtcaatcacactggaaaatgaagccaataaccgggccttactagccaccaataaagcccaaaacgaagctttagtgaatagtgcaaaggcgaaagcaacagccgttcaaactgaagcagatgctgatgcttaccggacgcggatcttaaacgaagccttggcacaatcatccgaaaactactttatcttccaaaacacggaagctgtcaaagccttagcggacggcaatgccaacaccgttgttttaccaaaccaaacgttagatagcttgggcttaatcccagcactcaccaaggtcagcaaattaacaactaagtagcttttaatcaggacaaacaatgcacagcctgcaggttgacgaacgccacctgcaggcttttttctgatcaatctaagacctaatcaattttgtaaacctttccgttaggtttaagcgtgcaactaggttagaattagattgtgcaaaaccatacttagaggtgttaatattgaaacaaccttggcaaacagcttggccggaacgaattagttatgggctcagtgatgccgcggataacttagtctttcagatgatgaccacatacttattattcttctataccgatgtttacggcctatccacgagtgcagcggcgattttatttgtcgttgcgcgcttagccgatgtcgttgaaagtctgattatcggcgtcatgattgaccatacccattcgtgcttcggtaaaagccgcccgtttttcttatggtacgcgttaccctacgtcttgttcgccgttttgacctttgtgaccccgaatttcggagcaactggtaaactcgtctgggcttatgtgacctatttagggttaggattcttctataccgccgtcaacctaccaatcacatcgattttaccagcactctcccagaatgaacgtgaattaaccttactaggcgtgattcgccaattcttcggtagtagcgttcaaattatcgtcgctgtcttcaccttgccactagttgctttatttggtcagggtgatcagcaacgagggtttttactgacaatcgttctatttggcattatttcgttggtactgatcctcaacaccttcttccaagtcaaggaacgctttagtcaacctgagcgtccgcaccaatcactcagtgcggtgtggggcatgctcaagcaaaaccagccgtggtttattttatccagcgtgattttactgtattggttaacaaccgccatcaagaatcaaacgaccatctactactttaaatacttgattcagcgtgaggacttagtgccagtcgttaacggctttacgtttgcgtcactgattggtgtcattttgattgtccgcttagccaaccaccacgggaaaaagaataccatgttggcgggtatcgcaatcgccgctgtgggacaactgatcctcggtctcgggacagccatcaatcaactggccttcgtcttcggtggtacgttgatcaacgctgtcggtaacggtctcatcattggtttggtctcaattatgattgctgatacgatccgttatggcacggcgcttggcattcaagcagaaggtattttagcctctactgatgacttcggcgtcaatgtcggcttaggacttggtggcctagtcaccgccggactctttcatctaagcggctacacggccaatcatgcgcaaaatatcgccactcagcatatgattaccctgaactatgcgtggttaccattattactttacgtggtgatgtttatcgtattaattttttacaatgagcagcaattgcaagacgcgattaatgtttagttatccgttcttaacaccaaaatgaggtcagtgaccctcggcattcgagaatcactgacctcactttttccttcattcaattggataccaacagcatcccattaagttacgattattttaacaaaccgcaaaattaaaaatcacgctataatcggttccccgataatagcaaccggaaaagggcacactaacactggcactcccaggtggtaagtcagtcccaagttctccaaaaaagcgcaggaaaaaagccgaccccgaggagtcgactttttctgaatcaaaaatccaattatttaacagctggagtcttgaaccagccaatccgtgatgtaacaacatcaacgatggccttcttaccaggtgccaataacttacgagggtcgtagcccttaccgatttggtctgcgccagattcgatgtaagcacgagttgcattggcaaaagcaacttggttttcggtgttaacgttaaccttgctaatacccaattcaacagccttaacgatttggtccttaggaataccagaaccaccgtgaagtaccaatggcatcttaacggcttctgagatttcttgaagacgatcgaagtgtaagccagtccagttttctgggtacttgccgtggatgttaccaatcccagcggctaagatgtcgataccagtagcagctaaagtcttagcttcttcaacatcagctaattcaccttcaccgatgataccgtcttcttcaccaccaattgaaccaacttcggcttcaacagagatgcccttagcatgagctaatttgacgatttccttagtcttttctaagttttcggcaaatggtaggtcatggccatcaaacataactgatgagtaaccaacttcgatacattccttggcagcttcgtagttaccgtggtctaagtgcataacaacaggaacagtgatgttcatgctttccatttcatcagcaactaagtccataacgagcttgtagccgcccatgtacttagcagcacccattgaaacttggataataactggggtgttagtgtcttgagcacccttcaagatgcaacgagtccattcaaggttgtttgtgttgaacgcaccaatagcataatggttcttgtatgcgtcttgtgtcatatcaacagcatttacaaatgacataaaataaccctcctaggttaattaagagatacgatttttgaatcacattcattttagcacattttacataggagtgataaccgatttgtcatatttattaaccaacgattccccgtcaattcttgcttatttgacaaccgcccgtttgtaaacccttccatttatataaaatcagttacagatcaagccaaaagttgctttgaatttaatcaataattaattgtgaatattataacagcaatccgttcggtgaaaatgtaagcgaacagtttatttacatttatatacgctattaaatcaataattatagtgttttaaaagcaatttatgaaattaaatattagctatttacatttgtgaaaaagtatttataatagtgattgtgaaataagaaacaagttgattttgcataggaggaaccgtgaatgctgaaagaaatggaagaaacaaccgtatcacgttcaatcgatcggttagtcttaaatgcttcgttagctgccaaccgtcttgaagtcatggaccaaagtcaagttgatcaggctgtcgctgccatggcccgcgctgcccacgctgctcgtggcatgctggccgctatggccgtcgaagaaacgggtcgcggaaattatcgtgataaagttgcgaagaacgactttgcagccaaaaacgtttataactacatcaaggatgacaagacggtcggtatcattaatgacgatccagtcagtggcgtgatgaaagttgctgaaccagttggaattattgcgggggtcaccccagttaccaacccaacatcaaccgtcattttcaatgccatgttagcattaaagactcgcaatcccattatttttggtttccatccctttgcacaaaaatcttgtgttgaaactggccgaatcatctgcgatgctgctattgccgctggcgctcctaaggattggattcagtggatcaagacgcctagccttgaagcaaccaacaccttgatgaaccatccgggcgtcgctaccattattgcaactggcggtgccggcatggtcaagaccgcgtattcaactggtaaaccggcactcggtgttggccctggtaacgtgccatgcttcatcgagcaaaccgcagacattcaacaggcagtcagtgatgtcgtcacttccaagtcattcgacaacggcatgatctgtgcttccgaatcaaacttaatcgttgctgatcagatctatgatcaagttaaacgtgaattaagtcacaacggtgtgtactttgtcggtaccgagaacttcaaggccttagaagcaactgtcatgaacctggataaacaggctgttgacccgaaagtagctgggcaaacgccatggcaaatcgctcagtgggctggctttgatgtcccatccgataccaaagtattagcagttgaattgcctagcatcggtggtgaccaagtcttatcacgagaaaagttatcaccagtcctcgccgtcgttcatgccaaggatactgaggccggcttcaacctgatgaaacgcagcctagcacttggcggactgggacatacggccgccttgcatacgaccgacgaagctgttatgaacaagtttgccttagaaatgactgcttgtcgagcattgatcaacgtgccgtcttcacaaggtgccattggttataaatatgataacgtcgcaccatccttaacactcggttgtggaacatgggggcataactcgatttcacacaacttggaagattgggatctactaaatattaagaccgttgcaaaacgcttaactaagattcgctaaagtttcatcaatcaggataataaatttaaaattgccgctaacaaatgcgcccgctgaagtcagtctgcttaacttcaacgggcgcattttagatttatgaccaagttaagccaacttcttaaccgtccacgcatcgcgaaaacgatccggtcggtacagaaaccaccgccccaaactccaagttagataggcaacgaccagcgccattataatcccagtcgataatggcatatgcgcatgatagttatccgttagcaaccctaaaacaccattaccaaattgtgaacagcaaattgcaacaattagataaataattgaaaagcccaggacggctccgcgccactgcggaaagcggaaaaaatccccactattttccaaagataaatgctcaaacgcccagcggttaagcaaatacaggccgccaccgataacaccacaaatcacccaagtggttagtaagcccccgggtttccagctcggcagctgacctaaaacatccacctgctcatatttaagcttcgttaatcctgcagcaagattgatcaagccatcatatgcaaagagcaagctacaaacgaagacaaatgtcgcaagcgcactcgcaaagatatggccaacccataacccgaacgtagcggctaataatccaaacactaacattactgccaggattccaagttcttcatacaatgtcgtaagccaatcaatccgcacctgctgtttagccaacacgcgccaagcaatcagtccaaaaacagcttccgccaacatgtatgcgctgaccaacatcccaataagtaacccgatcttacgccgataaatttgctttcgagcgaccggcaaactaaataaatattgattaaaattcgtgaaattatcgcttaagaatagtgcgactcctagcaccagactaacgatgatggcgaccaccgtttccatccgaagatgagtggcttccatcaacgcaaaactactgacattttgtgcaacataccgtgacggattatgggcaatactgtagccttcctttatgcctactagtagtaagacaccgcccgccgttaataacaacgtgcgatagtggcgccataacaactgccataactttcgtttcgtcattttatcgtccccctaagataataattcaaagtcagcttcatccgtcagattagccataaacaagtctgctaatgagagtggtaaatcttcttgaaataccgggttagttgtcgctaattgcgcctggacctcagcattataatcttcaaacactaccacgataacccgaccagaaacgtgtacaatatggcctaattgtttaacaacggctggaatctgcttgtcacgatacactaattgaacttttcgtgcacttcgtcgcatggcttctaattgatagtcattgacaatgcgaccgtgtttaagcatcaacgcgcggtcaataaccccctctaattcagccaaattatgtgacgcaatcacgattgaacggtttcccgtagccacttcatcaattagaataccaagaatgttttttcgaattaggacatccaaaccatctagcggctcatccaaaaagagatacggcgcttgcgtcgcaacactgagaatgattgtaaacaaaccaaacattcccttagagaaatggcgtaatttttgtttggacgtcagatgataacggtctaacaattgcgcaaattcggcattatcaaagtccgggtaagcagcttgataataccactggatttgcacaatcgtcgcgcctttaaaaaaatttgccagtggatcaataaaacacagttgcgtccgcatttccggttgatcaacaacctcttgcccatcaaccaggacctgaccatgatccgtgaggtactgcccattgattgtccgaaaaagggttgttttcccaaccccgttacggccaacaacaccgacgatttgaccaagtccaatctcaaaactaatgccatctaacgtctggtgatggtcaatgcgcttacttaactgattaatcactaaactcattatttttcccccatttgatcaagccagccatgcaattcagcaatactgacgcctctttgacccgctagcctgacaatttgtgtaaactgttcccgtaattcttgtcggaacagcgttgaatccaccactttaacgtacgtgccttttcccggaaccgtctcgataatttgctgtgtctccagtcgcttataggctttactgaccgtattcggattcagcaagtgttgacgagccatttcacgcaccgacggcagttgttcaccactttgtaacacaccatgagcaatatcttgttcaataccggttactatctgagcgtaatacggttgtcggcttccatgatcaatttgcatggcccacctccatttaatacacagtcgttacttcgcttacgttaaatagtacagtatagtacagttataaacaagctaagaaaacgttaaaatcaggccacttgtacagtccaaacagtgtcctttagacctagtaggaatagtcctcagccgtcacgaaaaaagcccgtatctgccaatcgtggtaaatacgggcttctatatatacatgctcctgctaaacaagcacgatattaggttacgatctatctgcgagtcacttacttgcgccgtaattccgttgcggcgaattccataatcgccatcaacacaatcaaactaatcggaaaagcaatgacactaactgttaaactagccgtaatttcaaaaaaggtaaaaattaccattaataacaatacggctgcaatcaacatgccagtttcggcctttccccaatgcttaatcatcgtgttaacctcatttctatttattagtcatcacgagtttaacatgtctgatatcgcttactaggccttattgctaagagttccatgagaattctattggagtagccgtgtcatcgtcgtcaccgctaaccgaccaccggcttttaaaggtaagaacagctggttaccagcttcaaaaccgagtttctgccagaagcttgcgaccccttcatcagcagtaacgcgcgttagttggatcgccgttatattcgcttgaagtgccgcttgcatcagtccggttacaataactcggcccactgatttacgttggtaagccttattgaccatgagtaatccaacgaataaaaattgttcttgtggatactgattgagtacatctaaaacggctactaaacggtgtgctaagtaaaaaccaaaaacctgtttttgtgccgccgctaactcgtccgggtgggccgtcaaatcatgttgtacctcagtcatcgttagtggttccggtgagaaatattgatgatagcgcggattactttgttccagctctagcaatgcttcctggtcagctaaagttagtaatcggatctcaaaatccggtaattgtgcttgtaatgttgctaatttcatgattcaatcccagactttctctaaattataccaagtttcaccagcatgttcggagttcgccacaccttgattaataaaaccattacgttcataaaacggaattagtcgttccaaacaagtcaacgccatgcttgtccgcccgtctgcttgagccttctcagctagcgcggtcaataattgactaccgatctgttggtgacgtgctagtggcgaaactgccaacgtgaaaaccagctgatggccgccacgtggtaagttagtcggtgtctctacaaacatctcatcttcaatatagcgggcaccgacagctggtcccacgataaagccaagtacgactgcaccatcgcgggcgaccagaaaagtatccgctaatttctcaatgcgttcgcgataagcagcctcgctgccagcctctgcttctgaaaaaccagatttttcgatcgccatgatttgtggtaaatccagcattttaacaggtgtaatttccattgattttcgccctccaattcgtacgtatattatagcaaatgtcggtcaatagttgactaacttaattttccccgaaaaaccagtgtcgaacgtgtcgttttcagaaatgtcatgctatacttgaattgtgaattcggttacatgcattcgaattcaataattctaatcgaaattaggtgacctttatgcccgctcaatcagcagaacaattatggcatgcttataacgaaagcaccgacacaaacggggcttcttatcaaacacgttggttcggtcaacaaaataaccctgccgaagtgactgctttagccgacgcaattctggctgggacgaagacagcgacaaccacgccgctggacagttataccgcggaacaaattgccattccacaagttggcgactacaacgtcttgctaaatggtgacatgaaaccggtcgcgattctgaaaacggtggtgtctgaactcattccgttttatcgcatctcggcagaacacgcttaccatgaaggcgatggtgatcgcacaattggtgattggcgcaagcgtaagacggcagaattcaccccgacgttagaagaacacggcaaaaacctctcatcggacacaccgatggtcagtgaagtttttgaagtcgtttaccgcgcggattaatcaacaacgctaacggcctaagacggatgtcttgggcttttttattagagtgtgaggggccgcgggttgaagctgagcattgcctagccagcggattaatgcgatttttgcattgattcgttggcgtagcaagcgcaggcttcagcggcacgccacgaaaagtccgtccacaacgcacctaatttattcactaaccaaacgacagtttcaacccctcaacaccactgtttctgggcgatttgaccagacaagctggcagactaaaaaaaagaagctgccaattgtaaaaaatgcttgtcaccacgtcatttttcattataattaaagctcgtactaaacttattgtttagtttaacaaaactaccgattcgaggtgaatgtcatggacattggtcaacgcatccgcaacttacggattcaaaagcaactcacgcaagaagaattaggcgaacgaactgaccttagcaaggggtacatatcacagttagagcacaatcagtcatcgccttcaatggagacgttcttcgcgattcttgaagtactcggttgtgcccccgctgatttttttgcggctgagcagcccactcacaaagtggtctaccatccagcagatcagaccacgtatgacgatgaagccttaggataccgtgtgaaatggctcgtacccgcgtctaacgaaaatcagttagaaccggtcaccgtcacactggcacctagtggtcgcttcaaatcttttgagccgtcgccggcagagacctttattatggttcaaaccggcactttaagcttacagctcggagctcagcaatatactgccacggcgggagatacgctgtacttccatgcgactaagacgcatcagattcgtaatcttggcaccacgtcctgcacgttcaccttggttacgaccgcgtcctacttataatcatgtcacaaccaatcgagctggtattaggttacactagcttggtacacgttttaaggaggtctttactttggcggttaatacacaaccaatcattcgattgacaaatgtcactaaaagttacggggaacatcaagttttaaaaaacatcaacttagatcttgaagcgggcaaattctatacgttactcggtccgtctgggtgtggtaaaacaaccattctgcgtaccattgcggggtttacggatgccacttccggtcaagtttactttgacggtcaggtcatcaacactctgccggccaatcagcggcaagtcaacacagtctttcaagattacgccctttttccacacatgaatgtcgcggaaaacgtggcatttggcttgaaattacacaaagttcccaaggatgaaatcgagacgcgggtccaaaaagcactcgcaatggtccaactagctgatcttggggaacgtgaaatcagtgagatctctggtggacaacaacaacgagttgccattgcccgggcactcgttatgcagcctaaggtcctcttactcgacgaaccgttatcggctctcgatgccaaactgcgtaaggatatgcaatatgagttgcgggaccttcaacaacgcctgggcatcacttttctctttgtcactcacgatcaggaagaagccttggccatgagtgatgaaatctttgtcatgaacgctggcgagattttacaaggtgggtccccagttgatatttacgatgaaccgatcaaccatttcgtggcgaacttcatcggtgaaagtaacattattccgggtaaaatgctcaaagattttgaagtagagtttgtcggcaaacaattcgaatgcgccgatgcgggaatgcagcctaatgaagttgtcgaagtcgttcttcggcctgaagatctcgacattgtggccgcagatcaaggcaagttagtcgtcactgtcgactcccaactatttcgaggcaattatttcgaaatcgtcgcttacgataccgatcataacgaatggctcgttcattcaactaaccctgccgcagaaggcgaaccgatcggcctgacctttgacccacaagacattcacgtcatgcggttaaacgagagcgaagctgcttttgatgctcgtcttgaacaatacgaagatgattaggaggtgtcaacatgcaaccaaaacaacgattaagtcgtaacaccgcctactttatcccgtacatgttgtggatcatcctcttcgtcattgccccagtcctattgttgatctatcaatcattcttcaacattaacgggcaatttacactgggcaactaccaaacgtatttttcatcaaatacctacttaatgatgacgctcaactctgtctggtacgccttcttgatcacactcgcaacattattgatcagttatccgacggcttatttactcaacgaaacgaagcatccgcagctgtggctgctcttaatcattatgccaacatggatcaacttattacttaaggcgtacgctttcatcggcatttttagtcaagccggcatcgccaaccagtttttaagtttcatcggaatcgggcccaagcaattgctctttactaatttcagcttcatctttgtcgcggcctatattcagattccgttcatggtcctgcccatttacaactcgattagcgaactgaacccatcttacgtcaatgctagtcgggatctcggtgccacaaattggcagaccttcaatcgggtaattttcccactgacactccccggtgtgaaggctggcattcaagccgtcttcattccctcactgtcactcttcatgttgacccgtttaattggcggcaataaggtgattacactcgggactgcgattgaggaacacttcttgacgacaatgaactggggcatgggttcgacgatcggggtcgtcctgattattgcgatggtcatcatcatgtggctaactggcagcagtaaaaagcgcgcacgaaaggggttgacgaaataatgaccttacgtaacttcaagtggcgcaacttatacctgtggcttgttttcatcgtgctgtatgcgccaattatttttctagtcgtttactccttcagccaaggtacgactatgaacaactttcatggttttacctggcaacattaccaagacttattcgcggatagccgtttaattgccatttttctcgacaccattttgattgcgctcttatcatcattattagcaactgtcattggcacgctgggggcactcggaatcaatagtacgaccaaaccgattacccgcaacactttgttatcgttgaacaatatcttgatggtttcacccgacgtcatcatcggggccagtttcttgattttctttactgcccttaaaattccgctcggttttggctcagtcttgttaagccatattgctttttcaattccaatcgtggtcttgatggtgctaccaaaaattcaagaaatgagcaccagtttactggatgccgcggctgacttaggtgccaacaattggcaattactcagccaaatcatcgtgccctacatcatgcccgggatcttttctggcttcttcatggccctgacctactcactcgatgacttcgccgtcactttcttcgtgactggaaacggctttagcacgctgtcggttgaaatctactcacgggcccgtcaaggcatcaacctggaaatcaacgccctgtccggtctaatgttcctgatggcactggtgttagtaattggctactacttcattaaccaatacagtagtcggcaccggcggccagcagttagggggcggcggaagtgaaaaaattattaagcattatcgttagcttactagtcgtctgtggcttactggcctttggcgcgcaacgcttgcagacgagctctggtagtactggcaaaaaggttttgaacctatatacttggggtgactacattgaccctagtctgctcactaagtttcaaaaacagactggctatcacgttaacgtcgaaactttcgatagcaacgaagctatgtatacgaaaatcaagcaaggcggcaccagttacgatctgaccgtacctagtgattacatgattgaaaaaatgaaaaaagcgcacttactcttaccgctcaataaaagtaaactgactggaatgaagaattacgatccgcgcttcatgaacttggcctttgatcaacacaatcgttactcagtcccatatttctggggaacgcttggtatcatttataacgacaagtacgttcagccgggcagtattcaacactggaatgatttgtggcaacgaaaataccataacaaaattatgctgattgatagcgcccgcgacgtaatggggttcgccctcgcatcaatgaatcagtccatgaacacgaccgatccagccactctattggctgcgcgaaacaagcttaaccggctatcaccaaacgtcaaggccgtcgtagcggatgaaattaaaatgtacatgatccaaaacgaagccgcaatcgcggtcgattggtccggtgaggctagtgaaatgttggctggcaattcacacttgcattacgttgtcccatccgaagggagtaacttgtggtttgataacttggtcattcctaaaacggccaaacactttaaggcgatttacgccttcttgaactttatgagtgaacccaagaacgccgcccaaaatgcggaatatatcggttacgcgacacctaatcggaaagccaaggcgctattacctaaggccattcgcaacgatcgccaattttacccagacaataacacaatcaagcatcttcaaatctatcaagatttatcaccagccaaagtcggcttgtataatgaccgttatttggaatttaagatgcatcactaatcggatcagcctacttgattcaaatgactggcatcattagacaaaaggacctgacttgaaacagagtgcttcaagtcaggtcctttaatgtctaggcgcttactgccatgtcaagccactaatgattaaaaatttaatattcgcgagcactactagcactagtaccaatcctaaactgagccgatttagccaataacgatccgcggtggttggaaagacgataaattgtaagtttaaaatgagtaacgcgcaaaacgcactgctagccaaccaccaaagtgcggtagaaaacaaggttatcagtaagctgcccgctaccactagggtaaaccacggttgaattggtgttcgtattgatttagtcgtcattttgaccgcccccttatcatgccttaattgtaaggggtgcccgtaaagtatcgttagtcccaacagctggttacttaattgcccgaatcagccaaccagctgagccattcgacggttaactagtccaaaatagccaccacagaaattcgatttctgtggtggctatttatcatactactggaattaatttaatgattaatgatataagtcaaaacgccctttactgaagaccgttcctaaatgcgcactttccaaaagtgagcggtcagtaataattttcttcaatgctgatgccgcgtagccatgaaccggtttgttactactgaagatttcaccaataccgtcacgatcgctcaatgaggccacggtcccactagattcatagtggaacgtcgccgttgcttggttatgacgcaaagcgccaatattcttggcagcttgttcgccagctgccagtgcaatttgagctgtggttggatatggccgattgctttcgggatccatcactgcagcgacatccccaacaatgaatacttcgggatgcccttccagtgataagtcgggcttaactacgacccggttacggcgctgatcaaaaccggaatcagcaatgacgtgtgaaccactgacaccaaccgtccaaataatagtgttagccgtaaattcatgttcgttcttgtccgcgtcactgtaaaccacagcacccggtttgatggcctcaataacggcacctaaccgcatttcgacattattcttttccataaacttcaaagcgtagtcccgcaattcctgcgtaaacatcggtaaaattgatggcatccgttccaaacaaactaacttagcagcaggtgtttgatacttcgcctgcaatcttggtaacgtctgggtcagttcacctaataattcgattccagtgaacccagcaccacagaccgcaatcttcaaatcatttttgtccttactggtacggtaggctttaaaccgttcttccaaatgttcataaacagcctgtgaagttgccaaatcatccattggcaaggcattttcatcggcgccagctaccccaaatgtttctgactggaagcccaatgctaatactaagtagtcataggtcatttcaggatgatcttcaaaggtcacttgtttttgttcaatatcaacgctcttgaccgttgcttgaacgaactggacccgcttaccgataatatctggaatctgataagtaattcgatcaggtgcgatcgtccccgctgcgacttcgtgtaaattagtcttctccgtatgcgtcggtgtctgatcaacaagaatgatttcatcctcagttggtagactcttctgtaaaaacttgacggctcgcatccctgcgtaacccccacctaacaccaaagttgttgccatgatttattaacccctttcattattcctgttgactaatgccgcctgtccagcaattgtgctaacctgcgttgatcacattaatccagttataacttgataactacatggtacactcttcacgcctaaaattcagctaaaacgccacgccattttaattgttcacaattaatctagtttagtgattaaacttactcaatatgctgggtgacattagccgtgactaacgacagactttcaaacaaaacttgttgttggcccggcgttaactgctcaccaaccaagtctgcacaccactgctcataagcatgcaattccgggtacaacgcttgcccagcgctcgttgggtacaaacaccggacctttttattctctggatgtgtctgcttaatcacgtaacctttttttattaagttctgaacggcgcgataattcgtggttcgatccatcttcatttggtcagccaattgactaaaaaataggccaggctgctcacaaattcgaattaaataaataaactgattgttattgaggccgtatttcgcaaaacgttgattaccctcgttcgtgacgattcgcgacaacgtgcccatcaatcttaatgttggtatcatagaagctcctttttattattgcatatgcaatcatttgatgataaacttagcactatgctaaggaggcatcaccatgtggtcgattaaaacattctcagaactaacaacaactgaattatacgctatttatgaattgcgcgtcaaaacgtttgttgttgaacaacagcgcatctatcaggaagtcgatgatactgatttaaaagcttatcatgtctttaaaaccgtcaatcaaaatattgttgcatacgcacgaatctttacagaagatgaccatctctccttcggccgggtcgtggtggacaaaaaccaacgcggacaacacttgggcgctgatttaatggcccatatcgaacaggtcgtacaggaacactatgctgatttgccaattcaaattgaagcccaagtgccagtacaaagattttaccagcatttcggcttcacttcgagcggtaccccttttctattcaaccacacgccccacatcaaaatgactaaacctgcgcgacaacgccaatagctgagcacatcacatcggcacatatgcggggacaagagctgacttagcgctatgctgattagaatccaaaactcaaaacgcgtgactcggaccacaatccgaatcacgcgtttttaattgactcatttattcagctttagataaccgttcaacgtcacgcacaatcatcaactcttcattagttgggacaaccatgaccgttaccggttcgtcatctttgctaataatttgttccttaccgtgcatatgattcttttcatcatccactgtcacgccaaagtatcctaaagctttagtgacgcgttcgcggatcatccatgagttttcacccacaccagccgtgaagacaagggcatcaattccgttcatttcagcaatatagctgccgacatacttcacaacccggttaacaaaaatatcaattgctagttttgaccgttcacgggtatcttgcgtcttatcaagatcacgcatatcaggtgacaaacctgaaataccaagtaaccctgacttatgattcaaaatatcaacaaagtcttccacatcagagatccctaaatggcgcatcaagaatggaataattgaggcatcaatatcaccggaacgggtactcatggtaatcccagctagcggcgtaaagcccattgaagtgtcgacggctttaccatgatcaaaagccgtgatcgaagcacccgaccctaaatgtaatgtcactaatttaagcgaatccaatggtttccccaatagttgggccgtccgattagcaacgtaacgatgacttgtgccatgtgccccatacttccgcgcgccaaatttctcataataatcgtaaggaatactatataggtaattaactttaggcatatccgcatacagcgaagtgtcaaacacggctacttgagtcgcttttggtaataaatcacggaatacttcaatataataagcctgcgttggattatgtagcggcgcatactcagataaatctttgatttttttcaaggtttgcgaggtaataacgacagagtctttgaaatcttcgccacccgcaacaacccgatgaccaaccccagtgatttcactaagatgagtcacaatattatcgctcttcagccgtgttaagaccattgcagcggcttcttttgcatcaatttgatccttagtttcagaatatttactaccatccgccttcttaattgtgaaaacggaatctggcaatcccagccgatcaaccattcccgatgcgattaccgtttcttcgggaacactgagaagcttccattttaaagttgaactgccggcgttaattgctaaaatttttgccatgactatttttcctccatccatcatcaagtgtgcctaatgccagtttaactaatagtggatacgctttcaaggatttgttcacaaactttcaattttcataacattgcaaacttaattgtcggcatattatttctttcataaggcgaaattagcctataatatagttaatagaaagtgaggcgatcatgatgaaaaaaacgtttacttggtccgtcagcaacggctttgctgtcctcctcctgaccgtgggaacaattcttgctatcatcactcttggtattagctttggttcaccaatcagtgtcgacgccatggtcacagcagcggctctgtggctagccggtgtcgtcttcttacatccagcccctgtgagaattctaattcccgtcatcacattagtcagtctcagccttggttacgccacctactttagcacgtccggttcatggttgcttgcgattttagcgaccattatcacagccggcatcatcagctacggttttagtctccgcaagagcattcgccaacaccacagccattggtacgattaacttcctagtctgattcattttcttctaaatcaaaatcgtcaatctaaacatcgcaacaggcatcggcgcccttatcgcgatgcttttttatttagctttcaatccagattgttaacccgtatcagtttttcaaaggcaaaagtgaccagctaagattcgctggaaaaaattcggaatagcatgcacccgtctggctagttcgtcctacattgactcccaggcattttcgccaattgctggaacacgacgagcccagattcaagccgccgaagcccgcgtcttaaatattggtctgccgcagcttaaccatcatttaaggccacatcacagagccccgcccggcatcatcaatcaacagcagacaaacacgaacagatgttttataataggaagcgactaaattcagaagggatgctccgatggcaactaggattggaattcgacaattggtagaattcgtcttgcgacaaggcgatttaaatgaagtaaagaatagccagaacactgcattgaacggtgctaagattcatcgtcagctccagagtagtcgtggtgaagactatgatagcgaagtttacctgaaaaaaattgtgacgatgaacgatactgattacattatcgcgggtcgggcagacgggattcagttaaatgatgatggggcgttgattgaagaaatcaaaacatccgatcaagtcttcgaggacttaagtaccaacacgttgacactttactgggggcagatcaaagtctacggttacctgttactgcaagaacatcccgatcttgagcaggtcacgttgcagctgacctactttcaagtcatcaatgaaaaaatcacgaagacccagcaaatccttcaccgggctgaactagacgcattcttccacgacttaattacagaatatgaatactggttgacattacgagccgatttacgacgacaacgaaacgcttctattgaagacttgccatttccgtttccagcttttcggccgggccaacatgaattggctggcgctgtttataagacaattcggttgcaaaaacgcctctttgtcgaagcaccaactgggacggggaaaacgatctcaacgctatttccggctatcaaagcaatgggcgaagacgtgattgagcgcctcttttacctgaccgctaagcaaagtacgcgccacgttgctgaagaagcggtcacgctaatgagtcatgacggactcaaactgaaaagcattacgctaactgccaaggatcagattcggtttcccgaggaacaagatgtacttccggaagataatccttatatgattggctactacgaccgacttaaaccagcactcaaggatctgttgacccatgaagaccagattacccgttccgtgattgaacagtatgctcgcaagcatactgtcgatccgtttgaattttcactcgacacgtcgctcttctgtgatgtgattatttgtgactacaactatctttttgacccattagtctatttacaacgattctttagcgaacgtgatgacgacaactttttccttatcgatgaagtccacaaccttgttagtcgctcccgtgatatgtactctgcagccgttagtgaccagccaatcagtgcgttgctaaaattagccaagcccgataaaagtcagccaagtgacgacttacaacgcgaactcaagaaagtccggcgtagttttacgcgcatcagtaaaaccttgattgatgaccaagtaacggaacaggtgctacctgatcccccggacaaattattacgcaccctcagaacatttaatgaatttgtgactgactggttggcgcaacaaaagccggggtcactgctcgacgccgtccgtgactatttcttcgcctgtctgacctttgttaaaattggcgacctatatgatggcagctaccagacgcgcttcgtccttgacggtcatcacttaacgatcaaggaactctgcctagatcccagtgactttcttaatcggtcattagagctcggcagtggtgctgtcctattttctgcgacgctgaccccgatggcttactaccagcgggtgcttggcggtgaagccaacagtttggcctaccagcttccatcaccatttccaccaaagcatcaggccattctcgtcacccagtacgtccagacaacgtatcacgaacgcgaacataacgtgccccggattattgccagcttgcacgccatgttgacggctaaacatggcaactacctcgtgttctttccgtcgtatggctatctgttgcagatcaaaactgcctttgaagccgcctaccctgatgtggcaactaccgcccaagcctcgacgatggatgcaactgcccggcagacctttttgaaccagtttcagtcagcaccctcgcaaaccttactcggtttctgcgtactgggtggtatcttctccgaaggcattgacttacgtggcgaccgtttgattggagtcgctatcgtcagtgtcggtctgccgggtatcaaccctgaaacgaacttgattcgtgactactacgaccatcaaaacggcttaggattcgcctacgcttaccaactgccaggcatgaacaacgtcttacaggctgctggacgcctgatccgcagtgccaaggacaccggaatcgttctcttgttagaccaacgcttcgctagtcggcgctacacagatttatttccagaacattggcagtactatcagacgatccaatcagtcccgcagctcgaagcaacgattgccaacttttggcaccaaatggaggtgactcattaatgaagactaaattaactaaacaacttgaaagtactctctatcagtactgtctagaacagggcgcctacgtggttgaagaagttgcgatgcccgctgataaagggatcgttgatacattaagctatcaacaactccccgatggtcagattgaatggcgttgctacgaattgaaagtcaccaaagcagattttcattcaaaggccaaactttcatttatcggtcattacaattactttgtcttgccgcaacaactttacctagaagttcaatcggaaattccagaccatattggtgtattgatctaccgtgcttttgatcagcgggccctagagctcgcaccccaaccgttgcgaacgtctggtttcctaactgtcgctaagaaagcccaacgccaagacttacaagtcgagcaaacgccccttatcagtcactttatcacatcgctctttcgtgaggtcgataaagccaagcgtgtgaagaaaggactacagctctactctgatgatcaactcttcaaagaattacgcaaacgggcccgcaccggctacgacgtttatgattctgaacaaaacttgtacgatcgcttcatcgatgacacccagaatgacgcggtgactgcgctacaaacagaattagatgcccgcaatgccgaatatcagacactcaaactaaaatatcaggcgctaacggcaccagatctgcgtgaccagttatgagcacttactacccctatctacgtggacggatgtatgatttgttagccttaagaacattgtgcgagcaacaccaacttggcccacacatcatcccagtaattgaaccagtccgtgactccaaagaattacaacaaacagtcacgacttttattgaagcccaacaaccatttagcattattgcgaatccccaagtgagtgtctatggtcttaataccgttaagctccatccacttccggatctgcgtccctacccattttaccggccgggcgcaattcttgcggctgattttagtcgcgactttctgacaaccactcctggtcaaacaagcttgctcatcgcgcctaactatccgttgcttaaggcctatcagcatacgaccactttacagcatgctggtcatgtcctaatccctgatgaagcgcgtttgcaccaactattaccacaacacgcggtcttattgactgatcccgtggcaaccccagcgcacgttgcggactatcaagaaataactgacgcctattttgcccccgctaactggcaccaaacaccggttggctttgatggttttggcgattactcactcatgggccgaccctattttgaccacggtatgccatcacgcgcaattgcattacatcttatttatgttacggttaacggtgacctgcgcatccatcattttgtttcggacagcaatgccaatatgcgtggtcaaaagcaaaagttttttgaagcattaacaaagctcaccgactgggcacccgcacacctgacgggactcaatcgcacccccgcgcttgccaccctattggcctacgctgagggtgataaattcccagggttaggaataattaagaaattagcaatcatgcaccactttcaattgatgcaccgactactagcactgaattgaggagaaatgatggcaaaacaagaatctgcttggaaacaaatgatccatttctatcgtcatgattacgaagagcaacatgctccgatgttatacggcgacgtttggctgaagaccaaatcacatgaccggcttctactggggttaagtgaccaaggacaacacaaactgggtgtcgttcatcaactcgatttaccaactaagggccagcacctcgtggcaggtgatccgctcgtcacgattacggacgatcaaggggcgcatctggtgtcaacaccctttagtggcaccgttcagaagcttaacaaagacctacaagcggcaccccaatcgctcattaacaataaacaaaccgacaactggctggtccaattaaaggccgactaatttcgagttaccaaaagtaagttggctgacattcaaacaaacgcttacatttccactaaaagaactcgtaaattggcttaactaagcttagtcacgacatcagcggttgccagtcccagtgatatcacgcttcgaactttaatcacaacatttggttatgttaaccaacagacaccgtcttcatttgtaaacagccttgattgacccgctcagaaacaattgcgccgcgcgttatattacaaaagattacaaaacacgccgtttattacaagaattagggtaattcgtaaaactcctgctatttccctgtcacaatcgccagttatactaggtaccattgagtgcttggaagattcgcggggccaagccaaattcggactaaaaaataggagtgtacattacaaatgaagattaagaatgctttattatcaactgctgccgctactgctagtctctttgccattggtgctaccgctcaagctgctacggtaactgttaaagccggtgacacggtttctgccattgctgctgatcataacacgacgattgatgcaatccaacaagctaaccacttaaaagacgttaacttgatcttagttggtcaacaacttgaagtaaatggtgatagcactaccacgacttcaacacagacgactcaacaaacgaccacgacacaatcatcagctcagactagtcaaactcaagctcaaccgagccaagctagccagacccaatcaagtcaaacacaaactagcaaacctgctgctcagacgactcaaacgtctagttcaacatcaaactatagcaacaatggttctgatagtgctgctaaggcttggattgctagtaaagaatctggtggttcatattctgctcgtaacggtcaatacttcggtaagtaccaattaagtgcttcatacttaaacggtgactactccgctgccaaccaagaacgtgttgctaacagttatgttgcttcacgttatggttcatggagcaacgccaagagtcactggcttgctaatggctggtactaaaaagccactttaaattaataaataaatgcaaagattgcggatcatttctgattcgcaatctttttttctactattaaatccgtgctgaagcacgtgtgtccccccaccaatacccattacaaagttactcagtcgctaagtgactttataatgggccttagagcatgctgacaacccgttatttagatatgcgatatgcttattctagcaaccactttaagacggacacgatccagacctgctagttgtctcccccaatcgacgacccactctcccaaccaaaataccacatgtttttatttaacaattcaccaaccttaacggagaaaatccaactaatttcctgactaagtacagtcccgaacccccgacagtttgacgactagtccacaacgacaaccacataccattcagctatggcgtaatactaacccagtaacgttttagtagcgatcgtcatgggctacttttggcataaacctactatagtaatacttaattaatcgacgccttcgttaaccaaccacaattgactacacgatgcgcaacttctatcaattatctgctttaccgaaaaataattagtcagtgccacgtctccaagcaataaaatgactagttaagtgtcactataatcagacttcccgacaaattaacccgtcaaaattcactagttaagtgcttaaaattatcgataatcctcgttgacttttcataaatcgaccaaaagtgatcacttttatcggataaagcggctaattttcatcattagtttccccgcttaatcattgtcgttattgattttctagctagttaatcgggattggtagcgctattttacatgaaatccggctcaaatattacaattcattacaaaaacggccttatattacaagcaccccctaaaaacgtaatgttctgattattgcactgcaacactcactagttatactagtcactgttgattggttgagacatcaactgctcgaccaatagaaaatatatgtaaataatcgaacacacgcaaattataggagagtgtattaattattatgaagatcaaaaaccttgtattatcatcaactgctgcattagctttattcgctatctcaacaacggttgccaacgctgatacttatactgttaaggccggcgatactgtttcagcaattgcccaagctcacaacacttcagtttcagccattgaaaaggcaaacaagttagctaatgttaacttaatcttcattggtgataagcttgaagtcaatggtactactactacaaccacgacttctgctgctacaagtgctgcaccacaatcagcaactagccaagctacttcttcagttgcttcaactgcaacgagtgccagtgctactagtgcttcttcacaatcagttgctagccaagctactagttctgctgctacttcttcagctgctagccaagctacttcaagcgttgcaacgagtgctgcttcttcagcaagctcaacgcaatcagctgctagccaagcttcaagttctgctgcaaccactagtcaagcttcatcaagtgctactagctcagctgcatcatcaacagcttcaacaacctcaacgacttcaagctacactggtagtaacttaaagagctacgtattaagccaaatgcaatcacggactggcgtttcagcttcaacttggaacacgatcatcacgcgtgaatcaaactggaactcaacggtcaagaacagtacttctggtgcctatggtttattccaaaacatgcacatcagcagtggctctgttgaagaccaagttaacgctgccgttagcttatacaacgcacaaggcatggctgcttgggctttataaaataactgattactaacgaacagcgtaatgacattaattgtcgttacgctgtttttttatgctcagattcatttaaaaggcgtatgcttagtagcgagaatacgaggaaggatctgaggagatgcgccacgaaaccaaattagtcatcacactatggggtggcatgttaggcagtatgttgttgattggcctgattttccagctaccacgcttaacccaactcccatcctcattaacaactggggtcgaagagctgttctttttagcaattgcactcatattaaatcgtgactggctacggcaaaccttaaaatttggggtatcggcaacttggcgtcggcaaatccggcccatcatgccaaccttaatcgtagccgcactaattggattatatacgttagcaaccgcccaacaactgacaaacaccctgaccctgttattcgttgccatattgatcagcctgttcgaagagaccttttttcgcggaatgttgtttcaggccagccagtcaacattgggtgtaggtagagctgcagtcttcactagtatcctcttcagtttgacccatctaatcaatcttggtcaccaaacacttagtttaaccctattgcaattgggctttacgttcgtactggggctactattatgtttaatcacggcacagacaacatcgctactatggccattgttgattcacaccgtcaatgacttctttagcatgatggaacctccaatcaatttgcccggtataacgacgactagttttcaaatcatcgaaatcgcggtcattatcctattaatactgccgattctacgccaaaatcaccagtggctgtcataatgaccaccggcaactaatcgatccgtaattaatataaccaacaccttcaatgtgacctatactaaagttagcattaacttctggaggggatttcgatgtcatcaaccaaacgcggctggggagccgctattagtattttcattttagtaccaattctttttaaattaattgcctggctaccagtaccaactttatacagtgggctggtccaagacttgcttgtattacttattttcctgctattaaatcatttttggtttaaaatatcgattcagtggtggcaatcgcaatcactcgtacgacaatgcttgcagctcatcccgggaattattattttattactaccaatgacgagcaacttcatcaaggtatgtcatcttgcttggaccccaacgttaattctctatattggctacgccctagttatcgggatcactgaggaatatatctatcggggcatgctcctgccactactacgacaatgcttccctcaccgactcatgctagccatttgtatcgacagtttactatttggtcttacccacctactcattaactgcagccagctgaccctcagctacgtcatcccacaagtcttttatgctgcagcgggtggcctgattttttgcggcctttatctacgaaccaataacttagtctggccgattttcttgcacgccttatcggacgtatccgtcgtcgttagtttggccacgcatacccacaccgcggccaagttgagtattccggttgcttacgcgattggcatctcggtgctctatctcgtcttgtttatcatcatcgcctttatcgttcgctggcaagttcgccctcaaaaacgattgttgtctcgttagcaattcacagtaatcaaaaaatgagtccccagaatcaaatcattctgagaactcatttttagtgacttatcttgacaaaaatgcgattgtacgcgtcaactcacgtctgattcaatcgtaagagcaccctaggtttccgccacaaatttgtgcttttctaatcggtaggagtggtcacaaacgtccgcaacatccggttcatgcgtgacaataatgacgcacttcttttgttcatgcgcaattttttgaaattggtcaatcacatatttcgtattttcttcatccaaattaccggttggttcatccgcaaccactagtttagcatcgcacaccatggtccatgcaatcgccacccgttgctgctgaccaccagataagcgttgaacattcttcttcatctgatcatctgtaatacctaaccgtcgtaacatcttcatcgcataatccttgtcaccacggtgttccgagttcgtaattgccatggcagtcatcagattattcaatggtgacatatacgtcaacaaattatatgattgaaaaacgattgccactttggacttccgatagttcgtcagaccaatcttattgattggttcaccattgagttcaatttgcccagcccgcggtttatctagacccgccagcagtgagaggaaggtcgtcttaccggaaccactttgaccaacaatggcatacgaagtccccgacttaaattcaaggtttacattctcaaatagactattttcttggcggtcataccagtaaccaagatcatttacttttaacattgccgcccctcctaatcaattaaaactttcttcggctgtagtcgtagtatgccaccagaagccagcataatcgacaggaacatgatggctaagccaaagccgccgagttcaactaaatccattaccgtgacattaatatctaagttcgtgtcggtcgtggcactggcattaccagtctgaccgccgccactaggcatattgccgcttggcttgctaccaccagtgttatcactaggggcgcccccaccgccaccaggctgaccctgctgactagttgaactcgtcgtagtcgttgcagtcgtcgtttgttgtgaaactaactggtcacccagcttattaccaacaaacttaccaccgaatccggctaagacaactgagacgatcaagaccatcaccatttcagcaaagaattgagcgacaatcttccaacggctctcacctaatgataacaagacaccaatttcatagcggcgttcacgaatcatcaagataacgattaaagctaagataatcgttccagcaatcgcaacgagccagacaatcttatccgcaaatgatttaacgttattcatcgaactcttaaccgtttggtaactgctatcatccgttgacaacgaatacttcgatgtattgatcaactgtttaccagacgttttgacgctgctaactttagcggggtctgagattgcaaaagtcacagaatcagctgtgttcttgtacttagaacccttgaccgtgttagcgaacgtgtatgacgtgtaaacactgttgctgacatcggtactaccacaggaccttgttgcgtacttgcactagacgacgctttatagatcccaacgatcttcatcgtgtaagtcttcttatcaccggtcgttgcttttaacttaatcgtatcaccgacgctcaggctatcttccttagccaattcactttcgatgacaacgttgttagtgccttcatcactagctgtaataccgcggcccttcgtaattttacttgagctactttcaaaggttgagacgctgctcgtattagtgaccccagtaatcgagatatcaccagtaccactgctacttgagccacccatacctttcatcccaccaccagtactactacctgatgttgaaatcgtatcaaagcccttcgcattagcggaagttgagacggtcgcattgtaacttgaaacgttgctaagcttggcgattttcttcgcatcactcagtttaacgggcgatgtcgtcaacttaggccgactacttttactcgtcgacgtggcgctgcgcatcttcttaaaagccgcctcccggttagcagataaagtgacggtcgccccgacacttttcttggcattactagttgccgtatcggcagcattcctaatcaataacccggccaatacaaacagcatgattgctgatgtaacaagtactaatagaattgaacggccttttttgccgttagattgagccatgcgcgtttaaaaaaattcacgcttaaaccctccttcagataaagtattggtatgacaattgctttgcactgcttttaacctacacgggaaatctgactaatttgtgaacttgctgggtttatttatgggtctgaaaccgaagatttttcaatttgctagctaagcccctgaaaggctggttgtgcttgctactactagcattgcaccgtatcggaggcccgtttaaatgcgttagtcagcactttcgctgaacgccaaatagtcgcgacaagaattagcaattaattcttgtcgcgactattgaacttattgattaaacgaattacttacacaatcgtaaactcactcttccggtacggtacttaagtgccacgtgatcgtaccctgataacttccaggaacagcggcgggcgttgttttgagcaccaaaccttgttgcgatgaccagtgggcggtcacgtcatagtcgatccccggggccgtcttttggcgcgcgatttccacggcatcctttcccaacattgtcagcttggcaccatcctgataatacaagtttcccgctagtgtgcggccctgattagtcacgagaggggtcgcggtcgcctctaagcgccaagcagctttcgagcccgtatcatcattgacaactacttcaagtccctcgggccgactgacttgagccgttcccgtcagcttgattggtgcaaacacactttcagtactgacttttttcagctgtaactccccaccaatgaccgtgaccgttactgtcactggttctgagtaggcgttatctttgctatgagcccgtaacgtaatctgattttcaccgatttgtagttcttcggcatccacttcaaattcgacataaccaaccggatcgtccatgctcaactgatagtcttctcccgcttcaccattgacccggtactcgatacgcatgccatcattgtcaaagtctaacccatcatttagcttaatttggcccttaatgatgacgggatcgcctttcttcacttgtgtcaacggttcaattgtcaggttaacggtcttattggtcgtaatggtgaagtgcggtgtggccgttgcggtcttcatctcgtgaccctcaaagtaactcatgtcatcatcaacaaaagtatcccgatcgaccttggcagcctcaccaatcagcgtaatataagcgtgcggatttttcattgatagtgtccgctgcaaatcgtgttgtaagcgggccaccgacgattcgttatcgtccgctggtaaattgatctcttcctcggtaccatccgcatagcggatcttcgcgtgactaaagtgaacttgttcgggtaatggtaggctggccttaacctgttgccattcattgtcaccattgagatagctcagaacgtactcatattccaactcatccccaccatgaacccagtctccttcatggacagttcgctcttgagtcagattggttacgtttaaatctgactcgatttcaatcggttgtggcaaccggtcaaagacgaccagtgttctggcattagcggttgtcgccgtactagttaatccccaagtaacattccggatatcctttccaaagactgttgtatcaattgtggtcattcgtgttggtccctgatccagggtataactcatgatttgtttactggcgacccacttcaatacaagatggtgccagttaccgtccgcgagtggtaatttatcagcgatactcccatggttctgttcaaaacgataagaggacgttaaaccaccccgttgcgtataagtatccggacttgcagggtagctcgcggccatatgcatttttttaggcttttcatcgaaagaattcccccggggatacaatccccaaaaaccaccgtcattcactttggtatccagctccaacgcccaacttttttgaatcgccgtcttagcaatcgtggccggcgccgttcgccgtgtataggtatccgtcccataaacacccaagttctcaccaataatgcttttctttccataccgactaatcgcactcattttgcggggatcattctgtaaaacaacggccagtccttcactcacggctttgtccccaaagttcacccacattgagacttggttatcgacccgcatgttaaagcgattaacaggggtcgaccacattgccccaacttgattatcgtcatttgttaattcgataacatgctgcgaatggccattctttaaaacagtctgcattgtggccgaattacggtcaaactttcccggttcaaataagccttccagattcagtccagcgggtgccgtatcaagtacgtcagccttactaactaacggtatcactgcccctaaacagacaaacagtcctaacaagagtccccaaaaccttacttctttcacctaacgtcgctcccatcacttgccttccgcagctattcttacgccgtatcttagcaaattaagcgacatcatgtcaattatttttattgttataataagcatttatttatacataaaatttaagcaatcacacttataccaaaacatattgattttaataaaaaccagcgcctgacagttgtcatcgcgctggttttaaattgacggctcacttactcaccgcgccgggaattaagcgcgttaggccggtaaattttctggagcaaatgggcagtccgccacatgatcattaatgagaccagtcgcttgaagataagaataaatggttgtcggcccgacaaacttgaagccgcggcgtttcatctctttagacacttgttgcgccaagtcgtttgttaccggaacctcatcgattgacggccacgcctggcgtataggctggttatcaacaaacgcccataaccaagtggcaaagtcttccccggccggccaatctcgaatcacacgagcattgttgatcgttgccattaacttctgacgatgccgaataattcgagcatcggttagtagtcgctcaacatcggcggtcgtcatagcggccacctggtcaacatcgtaatccgcaaaatcttcattaaaagccgcccgcttattcaggacggtctgccagctcagtcctgcttgataagtctccaagcacaacagttcaaaaagtcgttgctgattatgttgcggccgcccccattcgttgtcatgatacgcttgcattgctggtgatgaatccgcccatgcacatcgttgcattaaaaacatctccttatcgccactatccaatccggctatctcatactcgccgcatactcttagactaaaactaacactgtttttaaaatctaagtgcagcccctaaaaaaagcgccgtccaacttgaatcgttagacggcgccagttggttacacttattatcgcataactgacttattttattgccgatttcgtttcgtctgcttttcagcagtggtttcgtcttccatacgatccgtcaacggataagttaagcgaatcaaacttggaataatcgttgggatggcgaataccaggataatcaacccgataatcacaaccatcgccacttgaatcaacgtcaagacaccggatggcatcaaggcggcgaacgtcccactcaagatcaaggcagcggataagaccacggctccaatgacggcggaagctctgacaattcgagtacttggtgtcgcagccgaattatcaaattcacgatacttcatcatcaagaagatactgtagtcgaccccaagcgcaatcaacatgatgaacccgaagaacggtgtgttccaagttaacatgctttgacccaagaaccagttgctcaagatccgtgtaatactcaaggacataatgtaagccaataacaaagtccctaagatgtagaacggttgtaagacagaacgcgtgataaccatcaaggcaattaggattccgaccaacataattgcagcggtccgaacgaagtcactagaagcaattgcttgggtatcgttcgtttcagacgtttgaccaccaatcgcaatggtggcaccatctaacgcagttcccttcaagctattcgtcgcttgcttttgaattgccgttactttatccatcgctgacttcgaacttggattttcattcaagacgattgttaacttcgttgcgtggttgttaccagacatataagccttcaaagcagacttgtaagtcttacccttcaaagtgctctttggcacgtaatacgtcttcgcagccgcggaatcctttaagccagtcaagtaactgttagctgagccaacaccagtgttgattgtcttagttccgtcgctggcagtcttcaaaccatcttggagcgtctgcatctgacctactaagctttgaatactggtgtacatttgttcattaccagaggccacttgcgaggcaccactgttaagcttacttacaccacttaccaaggttggtacttgcgagttcaaacttgcagtcccactagctaattgtgaagcaccactatttaacgttgaagagttggcagctaattggttagtcccagaatcaagcgcactgatggcactcgttagcgttggaatttgcgcgcttaaactgctcattccattattaaccgtgtttgccccagaagcaagcttagtcacaccacctgtgtaagtatccagttttgacgcaagtgtattggtaccacttagcaactgaccgagctttgaagtgagttggtcagagcctgctgacaattgttcagtcgcagtttcaagcgtctgcatttctgtaaccgccgtttgtaatcccttaattgctgtgattgaattattatttgctgaaatacttgccgttgccaagtcaccaaggcctgacaagccactcaattgagaactcgctgtttgtaactggttgttgagatccgcaattgtcttgagttgcgcactcaaatcagacaatgcttccagcccggcttttgcacccgacgtggtcgtcgttgttgcctttgtcgccgaagtacttgcactagcgttcgaactgttttgcgcgttcacggccgaagttactgccgaactaatagcagccttctggtcatcagtcacacttgaacctgcagcagcaaccgctgcagaagcgaccgtatcagcattcacagttgccgttgaactggacgatgtaccggctgcattagcagcatcagttttagccgcactttccagcgcactttgaacagtcgtcatatcattagtcattttagtttgcgcagaattagcattcttagcactgtcttgtaacaatgcaattccagacttaactttgccagaactgttagcaactgtctccatctttgtattgagtgtattgagtccatcaatcaatgtctgcaattgtgacgcattaacgtccgtgcttccagctttcacttttgcttccagttcagctagcttggttgaaagttgactcgaaccactttgcaattgtgctacgctagaggttaagcttgcagttccttgagaaatagttgttttattattatttaacgtatcaagtccatttgacaagctctgtgtgccgcttaacaactgattaactccactagccaacgttccagtcttactgttcaactggttcaaaccattattgaccgtgtagacaccattagtataagtaactaatccactcgctaacgagctcgaaccacttgccaactgaccagccccacttgaaagggttccagtcttaccatttaaagtattgagtcctgatgaaacttcatccgccccatccgccaacttcttggccgacttcgcgctatccgacatattggcactcttcaacttactattggcgctatctaacccactaccaatcttagtcaaccccttgctagcagacttcatcccactagtgacggtgcctaattggttgccaacgtataattgatcgatttgtgagccaccgggttgggtgacagacgccacggttttaacacccttaactttttgtaactgcttcgttaagctgtcaatgacttttagatctttttcattgttgaaggcatgatccgtcttgatatataacgttgacggttcagccgtccccttggagaagtgatcctgaacaacttggaaccctttcttcgcaggaatcgtgtcgtttaattcagctaacgtatcgtagtttaattcattattgtacgttaggataaacggtaatgagacacccaaaacaacgactagggcgatgattgggtaacgaactgatgacgctgcaatgccgtgccacatcttgctcgtactaccaccagcaaacttcttcgttggccagaataaccgtggtcctaataacgccatgaagaatgggttcaacgttaacaagacgagcaataggatagcaaccgcaatggcaaccccaaccgctgacttgtaaattgagaagttcgctaacccgagggcactaaacccaatcaatagtgacgatccactgtataggatcgttcgtccggcaatctttaacgcgcgcccagtcgcggcgaccggactatcgccatgactgagttcttctttgaattgatcgaacagtagaatattgtagtcggtcccaatcccgaacaagaccacgaccataaagacttgggtaaagttcgacaatggaaagttaaatttattaacgagattcatcacaacgctcagcgagataatgaacgacaccccaactgacaacagtgaaactaacggcgtaatcggcgagcggaagactaacgttaacacgatgaaaatgaaaataacggtaataatttcagtcttctgaatcccagcttccgtttcctgagtgaagtcatcatttaagatgtcactccctgtcacgtacgtcttaaccccagccgttttggcaccagccgtaatattcttggtcatgttcgcgacggtctgattcttaccaaccattaattgtagtaattgggtggatttgtcttttgaaatcaattgctttttggcagcagcattatcactggcagccgtcattgatttcacgtgatattttgatttctgcactttgaagcgttgaatcgtcccatcgattgcttgcttctggtcactcgttaacggtgaatcaccattattgaagaccaccaccacttggcgcgtattattttgattacgcccccaatgattctgaatgacttgtgcgacttgactcttggcactacttggcaacttggtctggcccttatcacgtaccagactgctgatatttggcaggaagatgatggccgctaccatcacaactagccaaacaatcgcttggattgtaaaacgtctacggctccctttcacgttatatcccttccctaattcagattcttaaaacgacatcgtgacatttaatcaacaatgtgtttaaataataacaacatgttaaatgaaaaccggtgtaatttcaaccaacaattttcataaaatcgtcattaaataaacaaacaatagtatattgttcaaataatgaggtgaacttcagtggtaggtactaaaaacaaccgtcgttcgcaaatgaccgaacgcctaattcaagatagtctaatcaacttactccaacatcagtcgctagatgagattacggtcactgctgtctgcaaggccgcagatatcaaccggggcaccttttacgcccattatgaagacgtcaaagattgcatgcagaagatggaacaagatgccacggaagaactgctagctgttattgataaacatcttaatcccgactctttacaagccattctgacgggaatttttgaggtggttaagaaacgccacgccgttacttccttcatcttaacaaccgaccaggattttctgatgagctttatcgcaacaactaagcgtgagatcttagcacataaccaagctgagatcactggtattggcaatcgcgaaaaagagtacatgtttgagtattatctcaatggtatcgttggtgttgtccgttattggttaaaaacaggactacatgaatcaccggaagaactggccagttttatcaacgactggtggtaccgaggaaaaccagtcaaaaatttggctgaacactgaatttaaccccactattcgattgttagtttaattaatctagctattcccattaaattaattattatcaatatgtcttggaaattatcttgcatattaaaagtaacatgaaccctttaattgcaaaagcaatctaacttcttaattactttcttctatataagataccagtcatgtgcatggatggacttgattcgcgtcaagaaaaccccaaaatgcccgattattagcaattacctgctaataatcgggcattttttagacttcttttgggggcgtcttaggttcatacatccgttgcttgatatcgtccatttcctgatccagctccgtaattaactgcgccttcttagtcaatgacgctcgcaatgcgtcctgatgcggaacgttcttcttataatttaattcatgctccaacgacgcccaaaagttcatggcaatcgtccgtacttgtagttcgacctcaatgatgctcggcccatcaacagtgtagactggcaccccgaggattaaatgcaaactctgatagccattagctttaggatgatgaatataatccttcactcgtaatactttaatgtcagcctgagtcgccaataaattctcgactgtcttgacatcgcttaggaaacgaacaatcaaccggatacccgcaatatcatgcaaattattaaacaccgcatttaacgttaacggtaaatgcttacgttgcatcttaccaacaatgctctcaggcgacttgatccgggactgcttgctatcaattaatgcgtagccgtaacgaagctcatactctcgactaatataatctaacttatctaaaacgagcttcatcgcaacttcataacgtaacgaataagctttcaactgatcaacagcttgcaaaagttccgggggtgtgctggcaaaagctgatcattatctgcacttgcttgggaatttgttgtgctcaatcaatatcgctccaatataagactctattctctctcaatctaccttaacggatcgtgatggtccactcacgcgcaatttggtcatacgcaatttggtgcgcatcttcaccaacttggtaagctaagtgtccgtcaacatctgcaaaatcactaggaatcaggccgcggccctctaacacgttcaggtgaccaacgaccatgcgatcggccaagaaattctcaaatcgctgccagaaactttgaaaactggcgaagtcatgcacatcaaaaatctcgttgcggagtacttcggcatcaaattcaattcggattcgcgcactcttaggtatcacttggggcctccttcgcatcggttaatccacactgcacattcttagtgactcattaaccaacaactcatttttgggactatctcaataataagacacgatgaccaagttacgcaatatctgaccaacaactgctatcaaaacttaagcgctttgtaatcgttgggttaattgattttacgtttcgggttcaaaatattcatcgggtcaaagagtgctttgatctgatgttgcaacatatcaacatcttcgcctaattcggcattgttccattgatttttcaacattccgactgcgtgttcacccgaaatcgtcccaccaagtgccagcgtcttcttaaacatttcttgtagcgcaataataattttttcaggcacttcggttaccgacgttgaccacactaaggtcgggtgcacattgccatcgccagcatgtccagccgtatagatttcgacgtctaaccgcttggatagttcttgaatatagtccattaatggggctaattgcgataatggcacggccatatcttccataatatgattctgaccagcaaaaactgccggcagcatgtcgcgccgtaattgttctagcgctgcctgttccttaggctcggtcgtaatcttaacatcgttggcttgctgttcggccagtatcttcttaacgactgccatactatcctgaccaccattatcaagcttaaagatcaacatcgccgcactattcttagcatagtgcgtcttctcgtaacgatcgagtgccgcaaccgtattgccatccaatgcctctagcatcgttggataaacaccggagattcgaatcgccgtgactgctttagccaaggccgtcatattatcgaaaaaggcgacgcccatcacgggggtccctagcggaatcggcaacagtttaacgattacttcggtaatgattcctaacgtgccttccgaaccaatcatcaattgcgttaaatcataaccaaaggcctgctttagcgtccgaccgcctaacttaacttcgcgaccatcggctaaaacgaccttaacgcctaagacattgtccttagtagccccatacttgaccgtgctcatcccgccggcgtttgtcgccacattaccgccaattccagagatgggcttagaaccagggtccggcgcgtagaacataccctgcttgcgtgcttctttatccagatcaccgttaacgacgccgggttcaaccacggcgatggaatcagccttgctaatttcgatgattcgattcatcttggcggttgaaagaatcagactgtccgttaacctgtccgcaccgataacagtgctcgttgtttggtcttggggaatcactgcgatgtggtatttacgggccgttttcaacgttccttgaatgtccttggtcgtatgtgcttcgacataggctaaggcaaggccactatcgtcatcggtcaaccgcggactgaaagagtattttttcagcgtctcctcgtcagtgaagacctgcccgtcagtgacttgcgttgctaaataatctaaaacttcttggttagaaaatgcgcgaaagactgtcaaattaccaaacctcacttcatatatttaagttcactgtcagtataagccaagaatccgttttctgccgtaatactgtccgtaagtgaccgctcctaatttgctcagtttccaatctaattcttttaggtggtatctattttttaaattaagtacactcaaaataagtattttccgggatcgtactgaccgggtatgctagaaacagtgatttcaagacaaagacgttatccggggaaccatcttaacgcctttaattaagggaggatttgaacatgcggcattcagcatcttcaaaattacggccagtgttaattgcggtcggcatcattatcgttatcgcattcgtggcgattggcttaattattcgccaggcacaggcgcgctaccagtcgacgatctatacgggaaacagcagtactaaaattgatacgactaagccactcagcatcttactactaggtgttgacaccggggcagacggtcgtattgataagggaaattctgacaccattatggtcgttacgatcaatccgcagaccaagaaaacgctcattaccagcattccacgcgattcattagcagaaatggtcggtgatcaggacacaaatgttcaaaaactcaacgccgcttacaatattggtggctccaagatggccaaggctagtgttagcaagctattcaacgtgcctatcgattactatgcaactatcaatatgggcggtctcaaacaaatcgtggatgccgttggaggtgtgacgatcactagtccactcaacgtttcattcgaccacatcacagtaaccaagggcaaacaccatctcaatggtaaacaggcgctatcttatacacggatgcgttatcaggacccccggggcgactacggccgtcaattacggcaacaacaagtcatgcgggcggttctcgccaaactcgccgagactaagacctatagtcgctacaatcaattactcacttcactgaagggtaatttacaaactgaccttagctttaacgaccttgttgggttagcgacgcatgatcgtgccaatatgaaacacattcagtcgactcaagtcattggctcacccgcttggatcaatacgagttcctatcagattttaagtacaaagaccttgcaacaaacgtcggaccgccttcggacccaactggggctcagtactgagacccttaccaacatggaaaccaagctaaacgccaagaataccgtgtatgacggcaaaaccaatctcaattatgacacccaaggtttagataaaatcacttacagtgataataccaagtgatcttttaatgataatcaggcgtgccactgaagcattatagccttcagtggcgcgcctgatttagtcctagcctagttaaaattgattgctgccattagtattattggttgttgattgcctaaagtatcacagttactgcttgtctgtcaccgtcttagtgcacccagccagcaagttgcgtcaccagtcccccggtatcgtcgttaaactcatatttgatattcccccggtcagcaacggcctggtgcttgttcacctgtaaatcactcacccgaaccgttaattctaaaggcttaaagttttgaactgagcgaatccagacatagtcggccagtcgttgtacttgcacgaagaaataccgttccgttgtcgttgttaaatcaatctgttttaaaattcccgtttccattcgtgctgcaccccctcgttattttcaccacttaatatacgtgctgaaacgcgttccaggtcaaggcgcaacactcaattatttttaattgcaagtttgaatattacattttaataacagtaagcgaaaaagctagtcaatttagtcaaacggttgtactatgattgatgataaggttatttaagtcaacgataactcgttaaaaccatccaaaggagcaatctcatcatgagccagcccaacaccctgcatccgcaagcgtattgctactacatcgaactgactggttccgaacggcctgatttactcaccgcactaactactagtgaacaagaattgggcgattgggaaccggttcaagcagctaagttaccaacttggcgtttatggactgacgctaatgccgacacgattcgctacaccgttgcacacgtcattgcccgtagcgctttgccgcaaaacgcttattggctattgcagtacaagggtactgaccatggtcacccccgaatgttgcacccacaatttcatacccgttaataaaaggcgaacccggtgacaattccaagtcactcggttcgctttaatctgcacgcgcttctcaaaaatcgacattaaaataccaccatcaacagactttcagcaagtcgctaatggtggtatttatacaattactacattaatgatttaacttaagcttcgaccgtttcgccagcagcttctttagcagcaaaggtcttttcttccttaaccttatcacgatctaaggccttgaagaagaagtagtagatggcaccatcaagcacaatattaacaatttgtaataccgcacctgagatgtgcatcgttgctaagtaaccagagataattggcggcgtggtccaaggaaccatgaccccaacggtcttcgcaactaagcccgtcgacattgcaatgtaagtcgtcgtaacattaactaacggtgccaagataaacggaacggcaatccgatagttcataacgattggcaacccgaagacaattggttcattgatattgaacaatgcgggtccgataaccagcttacctaatgtcttgaattcggcactcttggcaacaaaggcaatcatgaaagccagtcccaaggtcgcaccggaaccacccatgtggacaaagttgtcgaagaattgttgtgtcacaacgtttggtaaagccttaccagccttaagcgcttccgcattttgagacatcgcagctaaccagattggttgcatgaccccagaaaccacgttggcaccgtgaatcccgaaaatccaaagaatacatacaacgaattcagcaaccaaggcccctggtaacgtgttactcaacaagcctaatggtttagctaagacgaatgaaatcacgttaggaatactctgcattggtgatgcttcaacagccaaccgcagtaaccacatcaagaataagatgacgaaaccgggtactaaggctgcaaacgagttgctaactgccggtggcacgctatcaggcatcttaatcgtccaattgcgatgcaccatgaaaacgtaaaaatcagtaataaacaacccaatcagtagcgccgtgaataaccccgccgaatcaagttgggttaatggtacccacagtgctcctgccttatcggtgtttaatggaatcgttaagaaccaagcgcctaacgaaacaattgaggcagagattggatcgactttataactctttgccaagttataagaaatcccaataaccgcaatcaagcccatgatatggaacgaggcgttagttggatattggacgatcgttgcccaattcgaaccaaaggtattggccataaaggtctgataacccttgatagggaattgcgcaatgatcatgaagaccgacccgataataatcattggcactgccaatgtcatcccatcacgtaaggcaattaagtgacgagaaccagcaatcttgccaaagaaagggacaagtcggtcattaacaaagctcgacttgttattgttttcgctcatgtcgtgaccccctaaaataatttgttgtgcatattcatttaacgaacattctcaaacaatcagaataatttaagtaagctaacggtcaattaatagttaaccgtttacataaaattgagttcgtccgttacaaagtagtcctgtcatctgacatttgtacccatgaatacgcttcctacaaaattcattatacctgtcattctcaaaatgtataccctttcactctaaaatgggtgttgttccatccatcggaatttgttccatttttagaacatgttccaaagattggtttgaattacctttacgttaatggctgaataatcatagctaattgttccagataataaacgatgggcaactgggacaaggtgctaccaccactgattgcttgaacttccggggtatcgtaagttaacaccacgtccgcaatcccagctaacgtcgaatgactgctagcggtaatagcgaccaccttcgcgccactctgccgataataaacgctttgttcaataatatcttcagactctccagatactgaaagtgcgaaaaagacggtatccgataaatcctgttgctgaaccggatggggctgactcgtatcactaatcatcaagctatataaaccaaagttagcgaataaatggctgccatacgcggccaggccagcactcgtccctgacccaatcagtacgaccattcgagcttgatgaaccagttctgcgacccgatgaagtttagccgtgatatcaggtaagttcatgcggtcaaaaaacgtccgcatcggtacaactgtctgagctaacggttgtgtggcatcttgccgtaactgttcttttaatgtgaacttaaattctgcgtagccatcatagcccatgtgctttagaaaacgcaaaatagtcgttgctgagacgtgactatggtcggccaattgtcgaatcgtcatagtacttacttcagcgggatgacccacaatatacttataaatttcaatttccaagcggtttaactgctggacctgatcgtacgaaaacattgactcaccccgtcactattgattaattggtctatcattaaattaatatgaccattagaatttatgggaacaaattccgcttattgatcgccccaccgaccatcgatctgcggtttgatctcaagatcctgcatttccaaatcacaagttgctactgcgtcagttaatttagccgtaaattcggccgttttatatggcgaatcaacggaccacgtcttaaagttgggcgttcgattaatacgtcctaacgccgcaatcgctggtacttccttcggatcaacggcgggagccgacttctttacattgatgttgtaaccataatgaccactatgatacagtgcctgcatggcgtcacgaaaaagtcccatgtcactcacttaccttccattttcatagtccaattttagcataagtccggtgacgctttcatttagttcacacaaatccataaaaataagtcaaaatatcggaaaagcgtcataattattcgctataattagacataaaccagggttattgggaggagcataacattgaaaaacacgattttaattgttgaggatgaaggcagtctatctggctacttgactaaagaactacaatttgaggatttcaacgttttggtagcggctaacggtttggcagctatggaaacctaccaagcgcatcaaaacgagttgctcctcatcctgctagactggatgttgccaaaacttgacggtatggaagttcttcgccgcattcgcaaacacgatcaagtaccagtcattattatgaccgctagagattatgtcggtgataaagtcgccgggttagataatggtgccgacgactatatcaccaaaccatttgaaatcgaagaattattggcccgaatccgggttatccaacgacgcattgaaaatcaagttgaacccaatcaagtctaccaactggatgatatccagctagataccaaagcccaccgcgttactaacgggcaggaagaagttaccttaactcaccgtgaatatgatttgctgcaattcttcctcgctcatcccgacgaagtctttacccgtgatgacttgcttgaccaagtctggggcgccgactttctcggtcagcaaaatgtcgttgacgtttatgtcggttatttacgtaataaaatcacgacaaacggcgcctccccactcattcaaacagtgcgcggcgtcgggtataaactaagggagccgatgtctgatgcccaaaaataacaccactccgacctatgaacagctgatcaataaggccatccgccgactaatgctgacaattacgttgttggttagcttgatcacccttctgatggtcggcactcagcaaacaatcaatacgactagggaagcccgtgacttgatgagcagtcttaaccaggcgaatatcaaagacgtccccagttttattcaatggaacaatacgacgacacgcaatacgaaacaaccggcatttatccgggtaaccaccaagaaagcaaccttgacgaccgccactaaaacgaagcggacgatcatcactaccccatcgtccaaatcgtttttcaccaagcaacagactaagctagtagggccgttagtctacgttcgcggatttggtttcttcttatcttatagtgaaaaagatgggcataacacttaccaactatgggtcagcttaaggcgattgttcaacagtctgcttattttgattctgctcatgctggctgtcacttgtgccgccctggcattggggacttggtgggcccatcgtttagcactacgactgagtgacccaaccattaaactgttacacgcaaccaagtacacatcgaacaatccagatagcgaccagcccaccttagacgtgcctgctagcccccgcgagatcaacgacctcggtcgggcctttaatgaactattggtcacgcaaaatcaacgattgcagcatgagcgtcaatttatttctgatgcttcacacgaactgcgaaccccgattgctgcgattcgcggtaatctcagtctaatcaagcggcggggtgacgcccaccccgaagtgattccagaatcattacagtttattgatgaagaatcactaagaatgcaacatctgattgagaacctacttcacctttcacgagctgatcgcgctaagctagtcttaactgaccaagacctatcactattaatgttgtcactggctgaacattaccagccatcaattgatcaaccattgacgctcgcaattgatccgaacatccacgttcaaggtaatgcggaaatgttacaacaaatcgttgtggccttactcgataatgcccataaatactcgccacatgatcaaccgattaccttgagtttgcaccagactgatcaagcagtcgaactagctgtagccgaccatggtgagggaattccagacgaccaaaaacaggctgtctttcagcgtttttaccgcgttgatcaatctcggtcacaagcaatcgaaggcagtggcctaggcttagcaatcgttcaacagttagtcacattgaatcaggccaacattaaaattaccgacaaccagccatccgggagtatctttacggtcagctggcaactatagtaacaagtactattattttctaataattactctcataaaaaagcgagtcactagaaaaatctaggactcgcttttggtcttgtgccacccaatcacaaagatacctccaagactattctgaattgatatgcagaaactaattattactaacccatctgcgtggttttatgagatttcatactcaaaatatcaccatccaaatgctctatttttgcttttaaatattgtttttctattttaattcgtgcctcttgtgcttctagatctccgtttaaacgtaacagaaatttttttagtgcaactgtacgttctagtgttacttcttcaggacggaaactgtattgctgaatctctttaattgacgcgcctaattgccggagatgtacaattcggttaaccatctcttgatcactagccgaaaattgtcggataccattttgatcacgcttaatcggaccaattaggccaacactttcatagtaacgtagtgcattattcgacacaccatatttctgagcggtcgccgtaattgtaaacatactcgtatcctcctaaattttgcttgcgttagtgtaacacgaacttgttatactttcaaatgttcaaaaaataggaggttgaatttttatcatgaaaacaacaactcgttcttggttagcaatgattgtcatcggtatttttacaattatggctaatctcgatgcatcaatcattaatatcgcactacctatcatgtcaaaatcacttgcggttccaattagtcagatcacatataccgtgatgggttatatggtcattctatcaggcttactggtaacattcggtaaacttggtgatatttggggtaaaggtagaatctttactttaggtatgtatagctttactatcggctcactaatggccagtgtcaacttcggctttgagtttctactattggctcgttttgtgcaagcagttggcgctgccgcaacgctttcaaacagctatggtttaatttcggaactgtttgataatcacacccggggaactgccatgggtatcaatacaatgtttatttccgctggttttgttgccggacctgccttaggtggctttttactacagcagtttgcttggaatgctatttttatgattaacattccacttggaatcattgccattattttaggccacctatttcttcccaaaaatcatggccggcaacaagccactaaacttgatggttggggcgcagggattctattcattatcatcacactattctttgttgtattagaagcagggcagactattggtttcaggcagccgctaattatcattggcttcattatcacattagcacttacactatactttatttatttggaaaagcatcgaaaaaatgcgctattaccactatccatttttaagaatcgtaccttcagcttagcattgctagtcggaatgctgataccacttattaatgcactgttcagctttatattcccactctatctccaagattatttgaactggtcagttggtactactggaatattaatgctgatttttccacttattatggctattgctgccccacttggtggctggttgagtgatcttttctctcaacagcttgttctactaaccggcctagtcctaattataattacgcaaattggcttcttattcctagattcacatacttcattaaccctcattatttctttgttaatttccaacggtatcggcactggatttttcattgcaccaaataacacattactaatgtcagtcgtcccacaaaatcagctaggagtagcgggttctctacagtctttgggaaataatattggcaatattttaggcgtcgcacttggttctcttgcactatttacaacaatgagcatcgatgctggatatcgagttagtacttacttgccagcacatcctgcttggtttgcccatggtttaacctggtcctttagtgtttctcttatttgtgctttattaggctttgccattagtattattaaccgccctgcacactaagctaattcatttacaaacaaactcttaacaaccgttttaaggacattaacagtcttgaaacggttgttaatttaactagtacttgatcctgccaaagtattacctgctcagattcaattttcatggtattttttatattctaagtctgaatctaagaatttcttagataaagtttatggaaagtcgatagttcccacggcgatatgccggtaaactatagtcattcaattaaacaaaccaactttaaaaattaactcataaaaacagaatgactcacaacaactaaggagctatgtagatatgttattagatactgatccaaaaattaaaaatatcaccgctgttcaattggttaaggtgacctacccactggtgattgcgaaaactgaagagggcgaattcgttaaagtcaaacttagtgatgaacaactacaagatccattattctgggacacgttaaaaaacatccgccgttcgcaattatgggtcccacttggtcgtcacttccatcaactactctctaacgactggttaatgccagctgcccaataatcattcactgaccgccaccgataataacaactaaaaggagttcgattattatgaaaaacacattcaaaaaactaaccctaactttaatggccgccggaacccactttgccacttccgtttccgcctctgctgatacgacgacaactaagcctgagacaacgtccaccacactcgtcaataaagtcactcgtgatactaaactcgcaacaggtgccacgactagccaaccgaaacatgatttaacaccgcagccaactaagcttgttgttaaatccacccaaaatcaagtgttagcaaccattgacgctagtagccagagtatcactaagatgaagtatctcactaacgcaaagtagtactgccacccttaatttccgccccgtcacttaaacccttaaaggaggccccgcgatgagtcagctgactaaggccattacccgccaattacaacgtcaatatgccgaaccagttctgaaagatctaaatggcaactggtataccggggccgatgttttagaagacctcgcactgtgtgaaactagtctgcaacaacagaacgtgcatgccggacaagccattctactgagccccgcacaagtcgtaacgattccgggattgttgcttgccagctggcaattgggactgacggtcaccctgacaccgcctagtcgccaattacccgagctggcgcctcaaatctacgccgccatggtttattcccctagtcaaacgaaccagttagcaaccaaattagatccccatgaaatcagcgttttaacgctaattctcaatacggcgcctaattttgcttacctggttcacgaccacgctcaaccgttgacacgccgcagccaaccggacctgattctaccagccagtcaactccagttcacccagcctcaactacttaagatggctgagcacggtcaaactagcgcacacgttcacgatttatataaccttgagaccggattgctcccctgcctcacggacctcatcactgcgaccccgtttaccatcataccaactaagcaagactggccatccaaagtcggttaatcgccaattactggtacgtattagcacttggcgctttgaatcggtatcttgcattgcagctgttcccaaaacacaaaatgagctttccaggaattctttgcaatccctggaaagctcattttaatgtttgattatttaaccagaccgatagtctgtaaaataaggtaaatgtttaagatgattagaatcaccgtcacgatccaagccgtccacttaacccagacacggttggtgaagttccccatcagcgcccgattactcgtgaacatgactagcggaatcatggcaaatggtaacgcgatactcaggaagacttgcgacatcgtcagcagatcttcaattttcgcttcattgccatgataataaatcgcaaaagccaacactggtgtaaccgagattaaccgagttagtaaccgttgtgcccagagtggcatcttcaaacggataaacccttccatgataatctgaccagataacgtccccgtaatcgtagaactttgaccagaggacaacagcgcaatggcaaagagcatactgagtaacggactcgcaatcgagccaacgaccttactatcgccaagtgcattgtacaagtcaacgaaccggccaagatcccccttagttccaaagaacagtgcggcgccaagaattaatagcaaactattaacaacgaacgcgactgacaattgaatattggagtcgattgtcgtgaacttaacagccttggcaacttctttttcgtcactccggtcaacttgacgtgtttgtgagattgatgatcccaagtacaagttatgcggcataacggttgccccaacaattccgagtgctagaaatagcatagaacggttgctgacaatccgactagttgggacatacccttttaacatttctggaatattaggttgtgaaataataacttcatacaggaagacgaagagaatcacggcaaccagcgttgccacaattgcttcgattttccggaaaccaagtttcattaataataacagaatcaagacatcggcagtggtaatcaaaataccgacaattaatggaaatccgaataataacttcaaagcaatcccagaaccaatgatttcagcaacatcggtcgccataatcgctagttcagtaataatccagagaaaaatccccattccttttgacgttcgttcccgcgtcaattgtgctaaatctttacccgtcacaattcccagacgagcggccatggcttgtagcaacatggcaattaaacttgataacaggatcacagaaagtaatgcatatttgtactgtgatccacctgcgattgatgtgatccagttcccaggatccatgtacccaactgcaactagtgcacccggtccagtgtaggcaattaaagttcgccagaagctggcatccttagggacccggacactcccattgacttcgtccaagctcttactatcggcacccgttgaatgaatcgccttttcttcggcagctttcatcttagcgtgatccttcgtttttgctgatttcattatgaaaccctctcttctattggtttagaattcaggttgtggactactacgtgatcctcaacagtgcgtccccttaattgagcactcactttaattccaattggtagtatagcaccattaacctattagtcaactattattaattattactttggcatccctaaagcttgttatgacgcggtattatcatcttgtaaggggattctccgtgggctcaaaccattaactaaaaaatcactgagatagtgaatcaattgctcatcactcaaatcatccagttgtgggtagagaacctgttcgactaaatatcccccaatggttgaaaacaccaattgtaaaatcatgcgattcggccaatcaactaattctcgagcggctttcaagcgatccatcgcttcattcgcctgcgccaaaatgctaggtaagaccatccctaagacggccgctcgatcctgagcattattgaaaaattgggacaaaatgacggctaaggaggctcggttacgtgtgacaaatgcgacccgatcgcgcacaagggcgacaacaaatgcttgcaaagtctggttaggactatctaaaactgcctggtccaaagtgttcaacatcgttggcaaaatattctgcacaatcggctgcataatggcgtccagaataccgttcttattaacaaaattatgaaataaagttccttcagcgacaccggcccgctctgcaatctcccgagtgccaacttcttcgtaacctttttctgcaaataagtcgagcgcggcggctaaaatttgccgttgggtccgggtaatacgaccatcctttcccaatgaagccgcataataggcctggatggtttcaatttcactcatgatgataagctccttttttgcagtaactgctcaattttggcatttacatcataactgattcggtcccccaaaacaaccctctttataaaagttacatcatcagcttaactaaactcgttaattgcttttataagtggatttatttataatcatagtaaccaattaagttacaggaagtgattatatgcgtgtttcaacccgctttagcgactcgatccatttactagcctacattaaaatttacgcagatactaaattaacaagtgacgccattgcccgcagcattgaaactagtccagtcgttgttcgccgattgatgagcaagcttcgacaagccggactaatcacaacaacgcccggtactgctcaaccggcactcgccaaacctttaagtcaaatttcactgctcagcgtcttctacgcaattgagggcgataagccgctactcgccgtcgatcctaagaccaatccggattgtattgttggtggcaatattcaaaccgttctgaaacaatactatcaagacgcgcaaacggcggccgaagcacggttagctaagactagcttacaagacgtggtcgataatattttagtggaacaagcaaagaaagatgcccacaaataagctgccagattagctgacggtgtacgattgcggaagccagcgcgcatgtcgatactaaagttataattcaccctgcaagccactccgtttaaatacaaacatgctagtatgtttatgcctaacttagacaaaaaattgcacttcagaatcaacatctgaagcgcaatttttttgttgaattatttcatctagggtccgtcttaaaactacttaagtaagatgcaaattgaggcaatgtagaccgtagccagataaacatgagcgagcttatcataacgcgttgcaatcctacgaaagtt

SEQ ID NO: 15 - DNA, 86441 bp, synthetic construct
  source 1..86441: mol_type = other DNA; note = Lactobacillus plantarum PDA6 - Contig 15
acgatggcgagaaggatacacctgttcccatgtcgaacacagaagttaagcttcttagcgccgagagtagttgggggatcgctccctgcgagggtaggacgttgccatgcagcctaaggaatcgttaattcgatttcttttttttacgttgaatgtcaaccagtacagtttgaatttagacatgcttttggtatactggatagggtcaattaacgccgttttagctcagcaggtagagcacttccatggtaaggaagaggtcggcagttcaaatctgctaaacggcttgctgttagaagatgattggcgtggaatgcttgtttaactgttttttctgcaactaatcatcacattagggtccatgtttaagattaagacttgaacgaaccaaacttaatacgaaaagaggtccacacgctcgcattagattagctaagcgagcgtgtggacctcttttgctatcaagaactgggagggcgagcttcaaccagtatataccccctgtgattgagcgtaacacttcattttgcagttttagaccgaacggcttaactatggtagctgctagggcgtggcagtatgcttgagattggctggccacgcggcttcaaattgcttgaataggggcattaatgattgtcgattgctaacaagataattgacatagattggcatgtgagcacgagtatcgctaatcgggatagcgactcgattgtcatcatcggcttggctatctagctggtgaggcgccaatgcggtaaagttagtactgaagtacgggaaatcggagtatttagtgatttctgtaaaggccgtgcgttggggttggtataagaatttagcatctgggatggcctgctgaataatatctttccaaataccgattgcgcttagaactacgaagctaattcccttaagttcggcgaatgtgatactaggttggttcgcacggtacatgaatcgctgtaaatggaccacgagattttcagtaccgatgaagcgagattcaatgccggccgtcagaatttcctgattagagaaaatgaaacttgcctggcggttaatgagatgctcagtgatttggtcgtcggcaatcaatggttgcctaactcgcaatgtattaggtaataccgttttgagatgggtgagtaaggcaagtggaccaggtagggtggtttcgacggtacgtgtgactaagctttgctcgtagttttgtattttggttacaaaagtccgttgttgtgtcaataattgttcagcttcctgagcggctaactggccagtgggcgtcagtgtaattcgattgggttgacgatcaaataagcgaacagcgagcatcgtttccaatttctgcatgccgcgagtgatagttggttgcgtcacgtttaatgcggccgcggtcttagccagcgtgtgctcgtgggcgaatgtgatcagctcttctaataaataattttcaatcatcaggaacctccgttactagtatgcgctatatgtatactagtatgaataagtagtaattttcaagtattaggtttgcgggtatgcttgttattgtaatcaaatagtgaaaggttgatgcgtgatggttccaacaacgaaattaaacaatggtgtggttatgccccaattgggattcggcgtgttccaagtccctgacctgaatgaatgtgaagcagcggtgaccgcggccttaaaggctggttaccgtttaattgatacggcaacggcataccaaaatgaaaccgcagtggggcgggcaattcaaaagagtggtcttagacgtgatgaactctttgtcacttccaagctgtgggtctcagaattcacctatgaacgtgcaaagcaaggtattgatgcgtcattacaacgtttaggcgtagactacttggacttgtatcttttgcaccaaccttatggcgatgtgatgggtgcttggcgtgctttagaagaggcttaccatgctggtaagattcgcgcaattggtgtttccaatttttatgcggatcagctaaagaacttggaactgaccatgtccgtgcaaccagctgtcaatcaaatcgaggtcaatccatggtaccagcaagcagacgaggtccgctttaatcaaggtgaacacgtacgggttgaagcttgggcaccgtttgcagaaggtaagcatgcgattttcagtaatccaagtattcaaactatcgcacaggcccatggtaagacgaccggacaagtcatcttacgttggctgttgcaacgcgggattacggtgattccaaaatcagtgcatcctgaacgtatggctgagaatatcgctgtttttgattttgaattaacagctgcagaaatgtcagcaatggccgaacttgatcagggcgtcagtcagttctttgatcatcgtgatcctgtgacaattgaacagatttttggcgctagtttacgacaattacatgaataagttaaggagtgattattaatgacaaaaacaccaactattacgctaaatgatggccgcgcgattccagcaattgggtttggcactttccagattccagacgacggttccacttatcaagcagtcaaagaagcattggcgattggttatcgacacattgacacagccgtggcctattttaacgaagacgaagttggtcaagctattaaggatagtgggattccacgggaccaaatctgggtgacgagtaaactttggctccaagactacggctttgatgcagccagttgcgccatcgatcgttcgttaactaagttgcgactagactatattgacttgtacttaattcatcaaccttatggcgatgttccgggtgcatggcaagcaatggaagcagcccaaaaggccgggaaattaaagtcgatcggtgtttccaatatgacaccaacgttgtggcaaaaatttgtgccacaatttgaaacgatccctgcagtcaatcaggttgaatttaacccgtactttcagcaacaacccttgcgccaattactcgcggcacaagatgttaaattagaagcttgggcgcccttgggtcagggcaatcaagcattattcaaagaaccaatcattcaacaattggctattaagtatcataaggatgctggtcaaatcattcttagatttgaacatcaagaaggcgtgatcgtctttcctaaatcagtgcacagtgcacggatcaagagtaatcgggatatcttcgactttgaattaacttcgactgagatggcccaattacgagctttagataccggtaaaggtcaccacgacccagatgcgccaggggtttcagaacagttgttgcatgcctttgacgtgcatgcagatgactagcggcagagccggccaagtcgcggacgaacgtaccgtagtgtaagctgctttgattgtaactgaaaattaacgacgccatggacgctagaatcactagcatccatggcgccgttttttgattaaggcctttaaaagccgtaacttgaaatggcgacgaataaaaatcagcttactaaaatggggcacgttacgactaatgccgaatgatgaagctgaggatggctggttattaatcgctggcgggaacctcattattgataatttgctcgttaaagtcagtgaagatgcctagcagggtcttcacccgttgcgggcccaattgagtcgtccactggtgaaccgttttgtgcatggtggccattagttgctgatctaggtgacggccggtagccgttaaggaaagtcctttttggcggcgatcagtggcattagcctgttgctcaatgtatcgatgtttgaggaggactccgatttggcgtgagattgcgctgcgtgagacatggtgctgatgtgcgatctccattaataatagtggctgggggctttgacctatttcatgcatgattaaaaaagcgtcaaaggtaagatgttgcgtggccagtagtgaatttaagcgagtattcaggtaacgagagatattggcataatcggtcaaaaacatgtcgagagcgtcgacggtagccataataagaacctccttgaagagcgactgcttggtaaatttggattgactatattcactaagaatcataccgctaaacgtgtaaaaagtgtaagattgtgagccgcaaattagtgactgaaatgttacgtgaacacgcatgcctactagcaacggttggtaataccaaaaccatcgctgacagttttttgcgctgtcagcggtggcgaatagattatcgatcaacgttacaaaaaagtcagtgagtccgcaggcgtagagcgacgatgcgggcgtaaagatcggtgacgcactaagcggttttagtgcgatgacgacgagcaatcatcggcaaaatcatccctaaggcaacaaagataattggcgttagaatatttaaagtcagttggaagagccaactgctaggattgctagcgtaggaagtctttggaaccattccgaggatgcaagcaaatgctgtaaacaggaagcaccaagcaccgaccaaacggccagcgactgggtttttcaggaacttgtaatcactcttgaattcctttaagtgcttgttgagtagcatgtaagctagaaagacccacaggtagcgcatcggcattacgaccgaatttaagttcaataaccaattaaagagttcattcatgtttccaatccctaatgcaggaatgataatgagaatgctgaccaaaaccccagttaagatgtaaccgttgacgggcacatccttcttgttcattttacttaattttttgggaataaattcagggtcggcatcaccaagcaaaatcttcaatggcgcatcgattgagaacgctaaggcggagatttgggcaagcacattggcaattgcgtagaggatcaagaacagattgcccacgtggtagaaggcacctagtcgttgaaacgcgtagtaagcaccgttggccatcaaatcagcgggaatgtgcttggagttaaacagaatccccatggcaaatgaacccagcagggcacagattgcgaccatacctgcgagcactaacatgcctaacggaaactcacgtcccggatttttggttttattaacgtacggcgaaatcttttcagatcccccgaccgcgaagactaacattgaaacggtcgtaaagtaggtaaagtcaaacttaggtaagtaggacttgagtgaaaacatgttcggtgtctgaacagtcgccttggtcataaacggtgctgatacggccaagatgatgaataaaatcgacatgatgaacatccccgtaccagcaacgctcccgatgcgtttcagtgtcgttagtcccaatgaagcaatccagaggaagaataagaatagtactaaacaaatggcttgaacgactaacgcaggtgtcgtgttgacgaagttcccattaccgcggaacagccagctgaatgcaattagaatcccttggggtttttgtgctaagtacggaatgtgcacgatccaataagtccaggcagcatagtaagctaggcgcttggtactcgttgctcgaatccaagatgagacgcccccctcagcatccttaaaggtcgaacccagttgacccacaatcaaggtgtagggaataaaataaataatcatgatcaaaatccaagaagtgacgactgaaagcccttgtaacgcaaaattattgacaacgttacctaggccccagaccgccacgaatgcaattaaagcaatgttggaccatcgaagttgtttttcgttttccatgttgaactcctttgtgagctaaagtatgcttaattgtaaggccaaactgaaagcgatgccagtattaacaagttaatattaaaagcgctttaaattttaagtcaaaaaatgaattttgagtgtcaaaacagcgaaaatttgctattgttaagagtagataaaatttaacggcaacggacgcgcattgttcgaatgaaaatgaaagcaggaatggtcttgaaagaagttacagttggggagttaacgttagcgacagggatgcctaagattggtgttgttttagcgggggccacacgggaggacctcttgcgtaaagcggggcagattttaacttcggtggcacaaattgttgtttggcggttagatccttatcaggaattggataaccgtgcggagttagtcaatacagcggcccaattgcaacaagttttggggacgattccattaattgccatgtttgggctggcaaacgatccagctgaagtgaccgaatattatcaaacttatcaaacattagtgaataatcgaagcgtggctggcgtggatattgacttagccatggtcaatcagccagattttatgacgttgaccaaacagatgcgtgacaacgaaattcggttaattgcgagccagaccgtcacgacagcaacaactgacgatttattggcgacttatcacgaattagcagcaactggtgctgatgtcgtgcgggtgacagtggctggacatgatgcacagacggtgttggcattaatggcggcaactgagcaagcacggcagcaattagttgtgccaatcgtggcaacggcgacgggcaagtttggtcgttataacagtgtctgtagtcagttgacggggtcggcagttgcctttggacacgtcggccgggtcggtgatcaaagtcaattagcagtgagtcaggtcaaacaggcgttacaaatgttggcaccacttgaaggggcgtgaaatcaatgcaatggcgatcgttttggcggcatacccggacgatttttgaaacgttagtcatctatttcttactgattcaagggccgtatgatttgtggatcggcaaggtgggctatcgacttagttcgtatttaattgatattgtgggtatcacggtgctgtttgtcatcgttgagctagtttataatgcgattcgacaaatcgttgtgaaacgacgatccaaatgactcggggccgagtgacaattatcgtatctactagctcatgattacgcggggggagtctttcgattcaaattagggaaatacgctattagaatgggtaaaccaggtcttgagcagtaatattgctcaaggcttttttgatggccggggattactggaagacactggtcagtcgccatggtgacagctgaccggtgcatgatgcaactgtcagtatggtgaacgaatagtggtggtcgaatactaaaacgaccagaattaatgaatcaccacgatgaaaacgattgcagaaatagggagttgataattatatttttgcgataaacaagcggattaatcataatgataacaggttaattagaattgtgataatcagttgagcattatgagggtaccatggtatatttaaaaaccgtaaatgatgtactagttaaacacgataatcaaatatagtaagaacactttatttaatgagattaatcgttaggtcagttaggttgtttttgaagaaatggggaattactatcaattaccgtgaatcagaagtgaaatgttataaaatgtataaaagtggcaagatgtggttgtttgcgagcgcttcactattattgttgaatactcaactgttaaccgcacatgcggatgaaccaacatctgcatcgactagcgaaacgagtgtcgtagcgactaacggtgtgtcaattcaaaatcaaggtagcagcaatcaaacactggcaagttcggtttctaaaacggataacgttgtcgtggctaatgatgagaacgcttcgattactaatcagacggtaatcgatgcacagccagctactaatgacgagccgcaatccgctgcatcaacggctgcgttgaacgggacatctggcgcgcccaatagtgaggtagccgctgattcgatggcagcagtgaacggactaaacacggtagcgcccgcgacgaacagttatgaagcatcacggactgacgatctgttcagtaatgccgcagaatcgactgttagtgaacaacagcctgaagcgagtgaacagttattactcgatactgctgacgcgtcagaacgtaaacccgccgctgacttgcaacatgttgagcagcatcagctggtagatgaccttaaggtggagtcacagcacgttgatactcgtgctgtgactagggcggatgaggatgaaatgtctggtaactttggcgttgattggcactttgatgccagtacaggcacgctaacgctgaacgggggaacgttaaataacagttatggggataatccttggcgtcgcaagtcttgggcgccgatgatcaagtgtatcgtgattgctgacaaaattgttgccggtactaacatgaatagtctgtttgcgaatcttgacagcgtgacgcgttacgaagggttagaaaagattgataccagtgctgtgaccaacatgcagtctctgttcaaagaaaatacctcgctagagcgactggacttgagtgcttggcaagtcggcaatgtgaccacaatggtgaacatgtttatggggaacttcatgggtactgaacttaaataccttaatctcagtggctgggatactcataatgtcgccaacatgcaaaatatgttccagttcaacggccaacttcgaactattgacggtttgactgactgggatacgcgcagtgtgacgacgatggctaacatgtttgcgcgcacaggcgtccgtcacttgaatctgacgagctttgattcagccagcctggttgaaatcgatggtgcctttgcgcagatgtccgatttggagcgtatcgaattcggtacgcagtttaccgtcgctaaagtcactcaaatcaatagtttgtttaatgatgatgccaaactaaaggtgctcgacttgtcccatttcaatatgcagagtgttgaacaaaactggcaaatgctagctggtttgacaagtttgcaaacgttgacacttggtccgggacttgattttagtcaacacggcacgcaacccttagttgatttaccggaagtgcctaagaatagcaaatataccggcaaatgggtcaacgtagctgatagctcgcaaacgtttacgagtgctgaactcctggcgcaatattcgggaaaccacgctgacacggcggcgtttgtctgggaaaccgtctctgcggccgcgattaccggtaaagacagcacgctcttcttgaatcaaaaatgggactggacacaaaatattgcgcaactagttgatcaaaatggccagttagttgatccaggagtcttgttcagtacagacccccaagcggtgacagttagcggtgagcctgttgacaccagccggccagggtcgtatcacgtgatactaacttatgcgggtcggcaaacaaacgtggttgtcacggttgtggctaatcaaagtcaactaaatttgcatgcgcaagaagttgcggttgaaattgatcccgcaacgggaagcgctgtctggcgcccacgggataattttgcgagtgcaacggatgcagatggccgttcagtggaatggcagaacgtgacggtgcttggagaaccagacttaacacggccggggacatatgaggtcgtttatcagttcactgacttgaccggacagttagtcacggcgacaacgaccgtcacggtgactgaacaagaggctgacgttgaagacctgacagaactggttgttcaagatacaacggtgacagttggcgaccactggcaggcggcagacaacttcgtaagtgccagtgatgcgacgggacggccattaacactagcggacttagttgtgattggtgacgttgacacgacgcaacccggtacttatgaaatcacgtatcaatacacgaacgccaatggcctgcagtggactcaaacagccaccattacggtagtcgaaggtgctggcaatggtgaaacgccgttaccgggagaaccagctgaaccggagttaccggaagaaccaggaacacccgaacagcctgaaacccctgaaacccctgaaacccccgaaacaccaggggaaccgtcagcgccagggacacctgatcaaccagaactgccggaagttcctgaacaatcagaacaaccgggaactactgaacaccctgatactagtgatcctaacagtggtttaacgggcgcaaacgctggttccagcagtcaaagggagcaagcagacacgatagtgcgaccagaatttaacggtggtttagagaagcaagtgaccacggtgtttcgtgataacttgaaactgaatacggctgaacgcaatgaggacggaattgatgctaaacgttatgctaaggctgatacagctaaaccggaagtgactatggccccagtcagccatccagcgtcagtagctggtgagctaccgcaaactagcgaacaagttaatcgcttcgggttgctgggactcatgatgttaatggtgactggtttagccagcatcgtcggcattaaacgtcggcaaggttaattaataaaggagtgagaaattaatggaacaagtgaagaaacggtacaagatgtacaagagtggtaaggtgtggttgttcgctggaatcacgctcgttacgttgaacatgaatgtggtgacgggacgagcagatgaatcaacacacgtagaagcattgactgaaccggcagtggcaactttgtctgaaggtaacgctgagcagcaatccccagtaacggacgccatggatgaatccgcaatgagtgaactggtaactgaagctcaaccaattaaagtgcaggccgctgaagaacagtatactgatgagattgtcaatcaatctgatgatgagcatgcgaattctgatcaggtcagtgtaccggtcacggatcaagttgacagtgagacccccgttccgtcagacgaacatactgcaacacttgatacgcatccgaaccaatcgacaactgatgattctgaacagccagttagtgccgacgagcagtcgcaagatattgacacggatagtactgcaaaagtcttgtcgtcgcagcataaaacggaaaccatcaatgagcggggaagcggtgatttggctggcgtgattcgaaatccagaacgcccacatctcacggatggttatcgcaacgatgatatggaagacgatgactcgatggccggcatctggggtgctggttacaacgccgatggcattaaatggcattttgacgcggattctggtgtgttagtgttggacggtggcgatatttacgattgctatggggatagtccgtggcaatcaaaatcgtgggtgttacaaatagttaaagttgtgatttcaaagccaattcgcattataggtgatagtgggggcttctttgaaaatttgacgaatgttgaacactatgaagggcttgaaaaaattgatgttagttctgcgacggatttaagatatttcttttcagaaaatacgcatgttaaggagctagatttgagcagctggcaggtgggaaatgtgactgatatgtcttacctgtttttcaattctccagggactagccaactaacgacaatcaatatttcagggtgggacactcgtcgagtaagtgaagcggactacatgtttggtcccaatgaaaagttaactcgtattattggtatcgagaatttgaactttgaaagcctaaaagaagcaggcggtttgtttatcaaaacggggttgtcggagctagacttatccaaatggaagactgatagccttgacaatatggctgcttggtttatggacatgcacaacttaaccagtgttaaattcgggtctcagttcaaaacagatcaggttacttggattcatttgctattttcaggatgttccaatttaactgaggtggatctatctggttttaatttgcatcgcgttgaacaaaatctcgacatgtttgcgggatgtgagcgtctacaaaaaattacacttggtccggatactgatttgacgccagccaaaatcgagtcggttgggctaatggacattgaagctaatgaccaatataccggttactggataaatgtagccaatccccagcaacggttaactagtgctgaactgatgaatctgtattcaggaaaaaatacgccgattggaacctacatctgggaagcaaaccaagcagttatcgatgccaacgacattaccctggaagttggcgatgattggaactggacggacagtatcgagagtttaaccgaccaatttggtcaaaaagtcgatgttcaggccctctatgtggctaatccccaggctgtgaaactatcgggtgaccgagtaaatacaagtcagccgggtacttaccaggtcactttcaagtatgcaggtaagacggtcactgctttggtgatcgtgaaagctgaccagacaagtttgactgtccatgatacagagttacacgctggtggcacttggcatgcgcaggacggttttgacggggcgacggataaagacggtcacgccatcgactttaacgatgtgacgataacaggtgaagtgaacaccatggttccgggtgattaccagattacttacacgtatggtagtcagacgcagacgattactgtaactgttaaggaaaaccaagccagtttgaacttatatcaaaaccacgcaacggtgcatacggatgggcagggaaccagtacttggcagccccaaagcaattttcagaatgccactgatagtgatggtcaaacgttagactggtcggccattgaggtcgttggaacgccagattggactacagccggggactatcggttgacgtatcaatttactgacaagactggtcagttggtgacggcaacgatgacggtaacggtggttatcgaggaggccgacgaacaggcggaatcccaaagcgatttacagattcatgattcaactattactgtcggtgagtcgtggcaaccaagcgataatttagtcttggctacggatgttaatggcggtgaattgtcgcttgctgacctagtcgtaactggcacggtcgatactaatcaagccggtgtttaccaggtgacttatcagtatacggatgcgagtggtcaagttttcactcgcgtggcaacagtcacggtcgttgcggcgagcgatggcgatacgaatactgaacagccaggcgctaccaataccaatgacgatgtgaacggcggctcgactggaagtatcgatggtgatgatcaagcagaaatacctacggatgatgctgaccagatggagggtgatgcggctgacgttgatgcaaatgcagttattgatgacgcaacacccgcggttggcacgaatcatggaaagggtgcggatcgtaattctggcatgcaaacgacggctaatggggctaaatcagtagtcacttcatggccgcatcggagccaaacgtccaacacagttagttcacaacacgcgcaaactatcgttgccggtcatcatcaagaatcacggccgactgaatcagcttcggtagctgttcagcccgcaacggccaaactcggcacatcggctttaccgcaaactggtgaagcgccaagtcgtgcaaatgtgatgggaacagtgctattggggttgaccatgttcggtagttggctcggatttcggcgtgtgaaacgccattaaacaacgtgctcgaaatcgtaaggactgaataaaagtgattacggtgattgtgattttcggtatcagcgtcaggatgatgtgtcgataacagttaataaaagaaacgcttcaagaattagtcatgaattcttgaagcgtttctttgttattcactcaatcaaactagtcaggttactgaactttagcaacgagttgttcagtaaatgcatccagggcttttacatcatcagcttctggtgcaaggttaacgaacacgtccttggcaccctgagtagctccagccttctttaacgcgttactgaaatcggtgacggcacggcaataatcatcatcatagaaagtatcgccagagccggcacagccgtaaatcttaccggttaaatccaaatcctgtaagtcctcgtagaagtcgagtccctcttcagggagggcgccctcatcgtaggtgtaagggacgacaacacaaatatcaacatcgttgaattcagttgcgtcggcttgcgagatttcttctttggcaacatcgaccccaagtttttcgaatttttcagtaataatatcggcaacgtcttcgttgttaccggtaatggtagcaaaaataactttcgcagtagccatatgaactcctcgctttcaaatatcttgataagccgattatagcagagttttaaccttaatttaaggtattgggcagttattcacaaatccgcttgaccagtggtttctcagtagccaattccatgctataatttaactattaatggttattttaccgaaattgataaaaatttttggtcggcgcttaaccaggaatctaatgtaaattataaattggcgaggagcgttggttttgtctagaaaaaataaaaaagaaggattgggtagacggctctggaattcgattactgagccaattcccgacgatgatagtactgaacaagataatgaacagatccccttggcctatgatctgaaagactcggccgcatcaaaggcggacgaagccgaagcaaaatcaacggtcaatattccccgctcgacggcgaataacagtgccgaaaagcaacctgttgacgcagtaattgaaccagaaaaggtggctaaaaaagcgcgccattccggagacgatcgccaggctgcaaaacaatcgacggcacccgtcaagcatggggcgactagtgcggttaagcaaaaaggctcggctggttctcagtcgtcggcaaaggcggaatccgcgcaaataactaaaaagtccgccgcaactaaaccggcctcaacagcaagtcaggcggcgccaaagacggccagcgcggtctcatcacaggcagtaagtgaccagcgtttcaagcacgcagcttcgacgacagctagtgcggctcaatcggcaccagcgcgggccgctaaggaagcgtcacaagcaaccagcaccgcagtgtctgatcagaagcgtgtggctaaaacaacagcaagtaccaaggttcatcagtcggcggcaacgtcggaagttccaatgacgcggatggcccggcgtgctagtcaggaagctgccagtcaggccaagacgcacagtcaacagtctagtgcttcgacatcgagtgccgcggccgccgcatctgcggtagcacaatccacggccccgaagtccacagtccccaagtcagcgacatcaaaggctgctgtatctcaggccacggccacaaccgctaaggatccgcaagcgactgctgctaaacagccgaaggtcgaaaggcgcatcccagctgatcatattccaccggttgctcgtaaacagcaaccgcggattgcggtcaaggggacggaacaagcggatgatgacacgcagcctgagttaccattatcacgtgaagagttgtatggtgatcagcagcccaacggtggcaagcagcccaataagccaaccatgtcacgggtcgctcggcacgaagaacagcgggtaccacatgatgatcagccggatgacgaccgtgacttttctgagttagaaacggatgaaaagaatccacatcttaagaagccagctcggcgctataactggaagttgatgttggctggtgttgcgattctggttgttgctgctggtggagctttcttcatgtggaaccatgggcaagccactcaagctgcggcacgaaccaatgcggaaaagatcgtggaccaagtttatacatcatcagcccaacgggacttgcgggcgagtgcctcaagctcgactttgaccaagttgcaaaataatattgataatatgaaggattcaagtgaaaagacccgtttgcagaaacagcatgatacggctgctaagatgttgacggtccggactagttaccaagatttacgcaacgctaaggggttacttaagaccgacgtgaccatggacaccattactaagggtcagcagcggttgacgactgctggcttaacgagtagtaagccgtactttgctaagaagtatgacaagttgtttacgacaacgggaaaaacggttaagaaagtggtcagctatgatgctgattttcaaaaattatataacaagaaaaataaactcaaggcttcgaccccgtcaacgacagtcgataaagtacttgcaaacctgaaagcttatcgcaaaaagtcgcagttagcggccgatgattaccagaagttgattacggatcgcaagaagttggcgaaagcgaataacgcatcgtcttcaacctcaagttcgagcacgtatagctatagtgaaccagaatcatcgtcgagttcatcatattcgacttatagtgaaagtagtgacaacagtagttcggcttcaacgcatagttatagcaacgatacggacacgagctcggcaacgtcaagctcaagtacgcctagctacagttatagtgcaaacaccgatagtagctcaacgacgaattatggagatacgtcttcaacaacgaccggtggcactgcttcttctacagatggttatagtacggcaacgggcaataattaatttttgggggtaacagaccagtaaacttgatgatcgactgaaaatttaaaaaccggccagcttaattaattcataattaagttggtcggtttttggtcgttagtgactgatcgactcgtgtcaataacctgggaagcgtgcaggcaggtgaatatccgagctgattagccattagttccactaattgtcgtcattcaaggagcgactactagctagggcgattgacgaccggtttgcggtaactgtcagacataaaagtgatgtaaatgggacatcaatgttagaatgtaaatataaaattaattataaagcgaaagaggcgtgttttgatatggaaatcacaatttttggtaagggcaacatggggcaagcaattggtcataattttgaaatcgctgggcacgaggtcacttattatggttccaaggaccaagccacaacgctcggtgaaatcgtgatcatggcggtaccttatcccgctttagctgcgctggctaaacagtacgcgactcagttgaagggcaaaatcgtcgttgatatcacgaaccccttgaattttgacacgtgggatgacttggttgttccagctgatagttcggctgcccaagaattacagcagcaactaccagatagtcaggtgctcaaggctttcaatacgacttttgcggcgacgcttcagagtgggcaggtcaatggtaaggaaccaacaaccgtgttagttgctggtaatgacgatagcgccaagcaacgcttcacccgcgccttggctgacagtccgttagaagtgaaggatgcaggtaagttaaagcgggcccgtgagcttgaagcgatggggtttatgcaaatgacattagcagccagtgaacaaatcggctggaccggtggctttgcggttgttaaataattggtcaacgattaaacccaattaggttagttaccgattggcgatgctcgggagtgcgactttcgaacatcgcttttttgttggtattttgtgagccgtttgtcagcagtagcgtcaaacattgtgatttaaaccaaactgtgggctaaaaaagggtcagcctaacttattggccaatcttagctaatatccggttgtggatcattacggttcaagtgaatgatagtggtatgataaaagtattgatcaagaaattagaaatggggtaataagttatgccaatggtattgatggctcaagcaaccaaacctgaacagctgcaacagttacaaaccacttatccggactggacgttcaaggatgcggcggcggtcacggcggctgattacgaccaaattgaagtcatgtatggtaatcatccgttattaaagacgatcctagcgcggccaaccaatcagttaaagtttgtacaggtcatttcagctggcgtcgattatttgccattaaaggcattgcaagcggccggggtggtggttgcgaacacgagtggtattcacgccgatgcgattagtgaatcggtcttagccgcgatgttaagcgtagtccgggggtaccatgcggcctggctgaatcagcgcggggcacggcaatgggccttgccaatgacgacatctaccttgaccgggcaacagttgttgatatatggcacgggccaaattgggcaatcgttagcggctaaggctagtgcgttaggcatgcacgtgattggggtcaatacgaccggtcaccccgctgatcattttcatgaaacagtggcatttaccgcgacggccgacgcgttagcaacggctaactttattgtcaacgctttgccattaacgccaacaacgcatcatttgtttagtactgaattatttcagcagaccaaacagcaaccgatgctgattaatattgggcgtggtccggcggttgatactacagcgttaatgaccgccctggatcatcatcaactcagtatggcagcgttggacgttactgaaccagagccattaccgacggaccacccgttgtggcaacgagatgacgtgctgattacgccacatatttcaggtcaaattgcccactttcgggcgaccgtttttccaatctttgcggcgaactttgcacagtttgtcaaagatggcacgctggtacgtaaccaagtggatctgaatcgtggttattaattgaatatatgtaacggtagcggcaatgtaaaagccggttgtgactaggacttagtcacaaccggcttttactggtttcataattatgagtcatcgtttatggttgcttgaaattctctgccgtgcgatcattgggaccctgcccaatagccaaaataaagacggtactaataatcaggacactgcccagaatgtcgagccaaccgaagctgacaccgagtagaaccaccgcaatgatggttgcggataaaggttcaaaagcgtctagtagactgacaacggttggccggatatattgcaaactttgcaagaagaataggaaagctaacaatgttccaaacagcacaacaaaggtcaacttgctgatattaagcatagtcagtggaatatggattgaccagactggctgaacgatgttaaacaagataccccctaacaacattgaccaggtgttgacggtcattgggtcgtacttagtaagtagtttggttggtagcaaggtattcgtagcggacgagacccccgataagagtccccagatcaacgcccagacggagatgactagggtctgagggttgccgtgagtcacgagcaagaatgagcccagtagtgcacaaataattgcaaggccttctgcacgggtcggcaattgccgatgagcgactagcatccacagagcaatgaacacgggtcccatgaattgtagaattgttccggtcgccgcgttactagcttcaactgctaaaaagtaggtgaactgaaccggcattagacccaatagtgtgtaggccacgatctgtaggagatcgcggggttgacgccaaatcgaccacaaatcaacatgggtaagcaaactgaccagtaatagtgcgattccggcacccagcatgcgaattcccgttaaccaaatagaattaatatcggtcgtatcaaaaagtgtttgtgcgacggctccggaaatcccccagaaggtcgcactgatactagcaagaaagatacctttgaattcccgactgacttgcacagcaaaccgcctcctcagtaaaatcaacttaatctccattgtacatgattttgctgagaaaaggggaatcggttacgcacttgcttgttgactagcctgttcggtcgcgttctgagcattttgttcagtagtgtgttcagttgtggcactggtttggcgggtggtttcggctaagtgaaccagatgggtcagaaacgcgtgcgtttttgcttggtaatggtacttttggccgagcttgacgaggtagccattgatatagtcgacttcagttggccgattatgagacatatcttgatacatcgatgggtagtggaggggattagccactttgctgacgtagttgacagaggcgagctcttccgcgcgggtattcaacatggtgacaccatcacgctcacagacatcataggcttcatcgatcaattgacgactcagctcatcagcccctggataggccgcgaattcgcccatcgtaatttcaaagagggtacagagggtgttgaccactgagttgaagacgactttagccagcaaggtgccgcggaagttcgttgttaaattagggtggaattggcatttatctaattctgtcacgattcggtgggtcatttcgtcagggtgttccgtataattggcgagattcatggtgccggcgccgcgagctccaatgaagtcgacatcaccagggccgtttaagaccgtagcgactagtgcggtcccagctaataatttttcgggtttgaagtagtgtaataattttgcaacgtgacccatcccattcatgcaagtgagcacgtactggcgaccattaaaagcgtgggccgtccgagtcaaaaaatcagcaagttgcatctgtttagtaaatacgacccacacgtcgggatcgtcgttataatcttcgggagttgagactttgacgggaactaagtgtcgattctggtgatcgcgcgacacgtagacgccaccttgacgatgaatttgatcaacatttgcttgccaagtatccacaaaatcaacttgattgcctgcttcttgtaataacacaccgtaacgtaatcccatggcgcctgcgccgagtactgtaaaatgcatatgtatgaccatcctttaaaatgatttattaataaatgaaaataaaaacgtccgacagacgaagtcgtctgccggacgcgagcgcgggttaccaccggtattcatcagcaatttacattactgaccttaagcacatcatgaaagatgtactacacgttagtgggtgttaaccagtacgggttacttgatttcacccatacaactcacagtcgatattcgtgataccggattaggtctgctcacaccatctcagactcgctaaggctaacgaccggcaactactgaactgttcaatgctttttatcatcatttattaattgttctctaatttagcggctagactagtgaatgtcaagtagtgagattgaattctttggtatataaagctgatgagggcaaataatgctctaaatagcttctaaacttaagattgtttagccttacgtggtgaaaatgcggtggctagttcggttttgaaagcgatttccattataggagggaatagcgtacaattgggagtgtaaataagccttgtgctaattatgattgctaaaaaaggcggcggtgcgtcatctttttaatttaagcccattcaagtccggccaaccggcttactcatcagtgcggatacgccaatttgcgtatttactgacgatggcaggatggtaccgactgattggcaaaccaagcaaaagcagtcaagctgaatgtcacagatgatcagttagctagcacaacatataggtaaatacgtaggaggagttcaactatgccaaaatatttagtctttatggacattgacggaacattattaacggatcaccaatatgtctcggagcgaactcgagcgacgattgaacggtttcagaagcaggacgtgttattttacatcgctacggggcgcatgtacgagctggcgaagatcgttcgagacaaagtaaacgctgacgttcgtttggtgacatctaatggggcggtgttcgatggtgcccagggccgtgagctaaccaaactcgggggtgctgcggttgagcttgcctatctgattgcgcgtcgtgataacttaccaatgatgttgttcacgccagacatggcctactatacggaacaaattccgcggttcgttgctcgtaatgcggccaactttgatgcggatgaagtctcgattggctatgaagaagtgaagagctttacgcaattagccacgattgaggaccagattacgaacggcgtcattctcagtcgtgaagacatgtcacggctggattctgcccgcgaaaagctcactaatagtaaattgttgcgactttcatcatcgaacccgaataatattgagatgattcctctgaatacggataaggggacggcggtcaaacaaattcaacgtgagcaacatgtcgatgccgcccacacgtttgtctttggggatggcttgaatgacgttgggatgatggcagaagctgacttatcggtggcaatgggcaacgccttgccacaagttaagaaagttgcgaactatgtaactgatatgaattataatgatggtttggcactattcttagaaaaatacttcgcggcccacccattatcaacgactaagtaaggtcagcttacaagcgtatcggtgtatcgacgaggacaataaggccattaaaaaagcgattctcacgtgtgtgggaatcgcttttgtggtattattaaaattttgctatgacttaagtggtggtaattgacttttacgtcaaatttggcacacttagtattgaagtgtttttaggaagtgataactgttgaaaattgaaattttaccgacgactaccacggaaattccattagcaattttgtcgatgagcaatcttgataaccgtgagttgaatccagcaattgaaaaacaattagctgcacaagggcttgccgttgctcagccgcagaatgctttggcagacttgcttcaagtgattcacgcgcgccatccagtgcagatcaatgcgtgggatatgaatacgcttggcactgagcaggttcagcttcatttaacggcacagggggccagtctttcagcggatgctaccaccccaatcaggcctaatttggatagtaaaagcagtcgcattttaattgtagttggcgatccagatgcaagtgaagcttcagtgcatgcaactggtcaagaattacaacgcaaaatcaaagccttttttggtattcaggcgcgcttgcaatttccgagttgtaccacgcaacctgttagcatcgagacaactaggcccgcttcttaggggtgatattaatgtcgatcaacttgaattgccgatttttgtagtccacgcgactaacacttgtatttttcaggagtcgggtgggaagctcacgggggctgatttggtataggaatgcactgagaaccagcccgtgagaaacgataagaatattcttgtcatgctgactatcctgagattcatacaaacagattcgtcgtagcgcgctactgattcgatccgtgacaccgaccaaagtctcggcgccacgagtctggtcgagggagttaaagacccatagtagggtggcgaagcgttcacgactcaacatcaacttaacaaacgttccaatacccaattgtttttggacttgcttgacgatccacatgtttctggtaccttcaagcccaccgaagttaaattcgcgtaagccgacgtcaatcgtcggcttttttatttcaggatggagtgcggtgataatgcgactcgtttgttgtgctcggcccaagtcactgacgtaagcagcgtcgaaatgaacatctgctagcatgcgggctaaccgttgagcggagcgcacaccggtatgtgtgagttccgaatcatagatgccttgtaaacggccggccgcgttgagcttggtttgtccatgacggactaagtataagtgaatcgtagccatcgctaaccctcccatcaaattaattaatatagtccaattgtaaagcgttactcgtcattcaacaagtctttaattgttaattgccactttattttgtcgctgatatcaaaaagagcttgagcagctagcttgtttcgcgccacggtcggtttaatcggcggcgaaagcgcatttgaggctgcgagtggatggctactagcctcgaataattgcgcatcttctggtcatcgtagccgattatgctaggtatcaaaaaatcccctaaagggtgatagctatttcagctaccgacctttagaggcgatggcaacgtaacgttgctactgattattccaatcttcgttcaaaacttgcttgttttcctgcttgagaatcttcatcatcttacgacgagcggtgaagaatggaattccaatgtgagcaaggttgcttcgaaaacgccaacggtaatggtaagtccggtccggtacgtattcggaggactgtacgtagttagcgtaacgaaaggcaaacaactggtcttcaagaaaatcaatatcttcgttgaacttgaggtgatgcgtggtaataatactgcgaatgaatgctttattccacgaaaaaccgccaaccgtgccaaagttgatgttggcaatcaagtctttttggttgtatgttttggcaggactcggaacggctaagtaaccgtagtgaccgcatacaacgagctgggtatcgggtgctgaccggtaggcggctaggaaggttgccagaaagtctggttcgacccaatcgtcgccatcgacaaagcaaaggtacttacccttagcagcagccataccggagttacgagctgcggagacgccccggttatgggcgtgagtgatcacgtggaaccggtcgtcacctttgattaacgcggcaatctgttcaccagtgtcatcagtcgaacaatcatcaaccacgaagacttcaaagtctgtcaaggtttggcgttgtagactagtcaagcagctatctataaatttgtgctggttgtaagctggtacaaccactgaaaaaaggggtgctgacacgctaattcctccatcgtaaatttggatactgttactagtatacccataaattgtgatgaaattatagtgaatcgtctttttttagccataaattaattatttgcaagatttgtcgtatgaaaatacaatgcaaggtcgggataaacaaagatggtgtgagaaaaatctagtaagccattattcttataatagttacaagaatccaaggccaagtgagttgcgccctgtgccaaattcattagttcggcctcttccttgttaagattggtgagtgaaagataatcatcactgttagcaatcccgatgccgtaagcttcgttgatgaagtcccaaattgacgtattgacagcttcggtcgatagataggggacgacagagcgtaagtagtaggccttttccaaacaatacagttggtcgtgccaatagcggaggcgaatgatacgatacagttcttcgtcgacgggaatgttgagtttgcggctcagggcactatcgccgtggatcgtatcaaaagtcagaatcttggaagttaaagtccgtgggtggacatgactattgaagagtgagcgtgctgacagattcactaccgttttatgttgaagctgaatattagtaatataatagccactgccttgaacccgacgcaggagcccctgctggtacaccaagtcaatcgctttgcgaatggtgttgcggctagcttggtaacgttccattaattgggcttccgtggggagtttgacggtaaaaatgccgtcttgaatggcggcaacgagtttggttgcaatgtcacgatacatggtgttcacttctttcgaatattaagttgttatttaataatttgtgggtacaaatcaaataaattgcagatatctgattaataaggcttgtcaaatttgtacccatgacttataattctaattgtaatgaaagcggtttattaaagcaaccgctgtaacatataaatttaaaacaatctaggagcgtgtttattatggctgaaagaacaattatgttggtatgtgccgctgggatgtcaacgtcattattagtctcaaagatgcaaaaggctgcggaagcagaaggcattgatgcagatatttttgcaaccgctgccagtgacgctgatgcgaagttagctgaaaagaatcctgacattttaatgcttggaccacaagttcgttatatgttaagtgatttccaaaagcgcgttgatattccagttgaagttatcaacatgcaagactacggcatgatgaacggcgaaaaagttttaaaggaagccgaagcatcaattgcaaaagcaaactaatcattaaattgtaagtgctaccagcccacggtagatcaatcgcggccggtggcattttgattgtgatgcacacgaataaatgctaaaaggatgagggtaaatggcagaagaacaaacaaaagaagttgaagcaagtctcgaaaccattatgggtttgatcgttaatggtggtaatgcaaagagttccgctttcgaagcaattaaagctgctaaggaaggcgactttgaaaccgctgatgccaagttaaaggaagcagataactttctaaccgaagcacacaattcacaaacctcaatgttaacggcggaagcacaaggggaacatacccacgtgtcattgttattagtacattcacaagatcacatcatgaatgccatcaccttccgcgacttagctggtgaagttgtagacgtttatcggcgtttagctgccgatgaggcgaagtagttaattaatttgagcctaggcaaatacctgctggtgttggtctgggcttgttttttcattcatgccgtggtcgcttataatggcagacagcttaacaacggtgacgtggcggttacacgcttttcgttagttaaggtaacaaagactgtaactcagggatagcctgagcagcattaatggagggaattagttcatgacaaaaggatacaaaatgcccaaagattttctgtggggtggcgcggtcgcggcccatcaattagaaggcgcttgggatgttgatggcaagggcgttagcattgccgatgtaatgacagccggacgtaacggggttccccgtaaagtcacggatggcgtcaaagatggtgaaatctatcctaatcactggggcaatgatttttatcatcgctatccagaagatgatcgattatttgaagaaatgggctttaagtgtttccggacgtcaatcgcgtggacccggattttcccgaatggtgatgagagcgagcctaacgaagctggtttgaagttttacgatgacttattcgatgatttattatcgcatggcatccaacccgttgtgaccctgtcacactttgaaattccataccacttagtgaaggtttatggtggtttcagcaaccgtaagatgatcgacttctttgttcattttgcgaagaccgtcttcaagcgctatcaggataaggtcaagtattggatgaccttcaacgaaatcaataaccaaacagcttggagtgatccgcacccattgttacaaaattccggcctgcaacttagcaaggatgacaattgggaacaggcgatgtatcaagcagctcattatgaattagtagcgagtgccctagctgtgcaagcgggccacgcaatcaatcctgattttcaaatcggctgtatggtcgcgatgtgtccaatctatccactaacagctaaaccagcggatgtgatgatggcggaacgggccatgcaaaaacggtattggttcggggatgtccactgtctcggtgaatatccaaagtggttaccgaagtactttgaacgcaagggcttcgatatggatattaccgctgctgacttggcaactttaaaggctggtacggtggattacgttggtttcagttattacatgtcatttgttacaaagggtcgtgacggtgacagtgattacgatttcaaggaacccgatgactttgttgagaacccctacgttgagaagtctgattggggctggcaaattgatccaactgggttgcgctatgcgatgaactggatgcaagatcggtggcacttaccacaattcattgttgaaaatggctttggtgcttacgataagaaggaagccgacgggagtgtacatgacgactaccggatcagttacttccgtgatcacatcttggcgatggaacaagcggtcgtattagatggtgttgatctgattggctatacaccgtggggctgtattgatttggtctcagcaagtactggtgaaatggcgaaacggtatggattcatttatgttgacgccgatgataatggtcaaggcagttttgaccgttctaagaaagactcctttaactggttccaacaagttattgcgagtgatggtaaagatttatagtgaaaggatgataatgcatggcaacaacgagtggtttacgatctgatttcttatggggtggggcggtcgcagcccatcaactagaaggcggctggcaagctggtggcaaaggggtcagtgtggctgatgtcatgactgccggtgccaacggtgttcctcgtgaaatcacggatggtgtgattgcgggtaagaattacccgaaccatgaaggcatcgacttttatggtcactataaggaagatatcaagctatttgctgagatgggcttcaagtgttttcggacatcgatcgcctggacgcggatttttccaaatggtgatgaagaagaacccaatgaagtgggtttgaagttctatgatgatatgttcgatacttgccggcaatatggtatcgaaccagtgatcacgctggcccactttgaaatgccgtaccacttagttaaggaatatggtggctggcgttcgcggaaagttattgacttttttgtgcactatgctgaaacggtcttcaagcgctataagaacaaggttaagtactggatgaccttcaatgaaattaataatcagacgacttatacgaaccaattcctgatggcgacggattctggtttagtgttgaagcccgatgatcctgacgctgaagcgttgatgtatcaagctgctcattatgaagtcgttgccagtgcgctagccgttaagattggccatgccattaatcccgacttccagattggcaatatgatcaacatgacaccgatttatcctgcaactgctaagccacaagatatcatgcaagctgaaaaggctatgcagcggcgttattggtttgcagacgtacagtcatggggctattatccaaataatatggaagcttacttcaaacagactggtttccgccctgatatcacggccgaagaccgccaagtcttgaaggaaggcaccgttgattatattggctttagttactataattccaacacggtcgccgctcaggatgataacccaagttaccactttgtcgggaccgaagccgttgataatccatatttgaagacgagcgaatgggactggccaatcgatccagaaggtttgcggtattctttgaattggttacaagaccgctatcacaagccaatgatgattgttgagaatgggttgggtgcccgcgacaaagtcgaagccgatggtagtattcatgatccttaccggattgactatttacgcgctcatatcagtgaaatgatcaaggccgttaccgaagatggggtcgacttgattggctatacgccgtgggggtgtatcgatttggtctcagctggaactggtcagatgtcgaaacgttacggttttatctacgtcgacaaggacgatgaaggtaacgggacactagagcgctcgaagaaggattcgttctactggtatcaaaaagtgattcggacgaatggggccgatttgaagtaggaaactcgttgtgctagaagactactgaatgattatgcagttcgaacgacgattattagtcaattaataaccactaattgaagacgacgttcaaagtgagtgaactttgaacgtcgtttttcgattgccttattagcttgtttgattggctaatcaacaattattgttaatcagtgcctaaagattgtttctaagtatcaaatatggttaaatgatggacgaaggtgatgtcatattatctaacatgagttgtgattaaaaatcgttagattcagagaaaagccactaacttaggttcggttgaaagggtcgggttgggggaggcttgttggctcagtgcgtgttatatcgacttatcggcatttgtgctgatcgtggtgacgtttcagtatgttacctagtctcggaaggtcggaataggctgaacgcatgcagacggccatcgaaaactgataattttaactcacgatacgtaatatgatgcaattaaatgaaaaggacctgaaagtatggatacaacggtaatgattgaagaacacccacagattaaggaattgatggcaaaacgaccaattgtttggcagaacccagattatgggaagcgggcggacctgccgttaacgcgggccgatatttttgacgcggtcgcacgttgggaacgtttcgcaccatttttggccgttgcttttccagaaacggcagctatgaatgggattattgagtcaccattgttaccacttgagcagatgaaaccagcatgggaggctctcaaccaccagtcattggcggggcagctttatttaaaagctgatagtcagttgccgatttcgggttcgatcaagtcacgtggtgggatttacgaagtgctcaagtttgctgaacaggtagccatggcccatacggatttaacgtatatggatgattacagtgtcttggcaacggctaagtatcacgagttatttgcacaatacggcgtcatcgttgcatcgacgggaaacttggcactcagtgtgggcatcatggccgcaacgtttggatttaagacgaccgtttatatgtctcacgatgctcgtcagtggaagaaggacaaactgcgggcaaatggcgtcaccgttgaggaactaaataccgacttttcaagtgtgattccggtggcccgtgccgccgcggccaaggatgaccatacgcactttgttgatgatgaaggttcacgtgacttattcctcgggtacgctgttgctggggtacggttacaacatcaattaaaagtacaaggcatcaagatggatgctgcgcacccggttgtcgtttatttaccggccggggtcggtggcagtcctagtggcgtcgcttttggcctcaagatgattatgggagccaatatttaccccgtcttttgtgaaccgacccacgtgccgtccgtgaccttagggatgatgaccaagctgaatgaaaaaattgctgttcaagacattggtttagatggcctgactgccgctgatgggttagccgttagccggccatcacggttggcaggcaaggtgatgcaaacgctattactcggaacagcaacatttgaagatgatgatttatatcgttatttgacgaagctcgtcgataccgaagatgtaatggtcgaaccatccgctgcagccggctttaccgcgatcgcccccatcatggcccaatttcccacgcttgctggcaaagacgtcacccacattgtctgggcaactggcggcgacatgatgccggaatcggagcgtcagttggattatgagctaggacaaaaattgctgaccaagattaacaatcgttaaaacattgctaacgcttatatcagtgctgatatttaattaaaatgcgacatcccaacaacggggtggcgcatttttgtttgcagtgcggtgacaaatgggctggaaataaagtaagtgagtgacaactcatttttgctgttgacaaaccgagatgtactgattatactaaagccattaagtgagtgagtatacactcacttcgagaaagagggttattaaaatggcaacggattatgtcatcgccaagcaggtcagcaagcactttggtcatcagcaagtgcttaatcagattgatttgacactgccggctggaatgatttatggcttgattgggccatcgggagctgggaagaccaccttgatcaagagtattttagggatggaagctgtggatagtggcactgttaaagttatggatacggtgatgcccaatagggcggtaatggcacaagtagggtatatggcccaaagtgacgccttgtatgagacactaacggcccgtgaaaacctgaccttttttgggcaattaatgagtgttccaaaaataaagttagcacagatgattgattatgcagccggattagttgacttgacgtcccaattagacaagcgggtcagtggctattcgggtgggatgaaacggcgcttgtcgttggcaatcgccctgattcaggatccccaattattgattttagatgaaccgaccgttgggattgatccagaattacggcaacaaatttggaccgaactaaataagctcaaggataccggtaagtcgatgctcgtgacaacgcatgtcatggacgaagcagaacggtgtgattatctcatgttgattcggcacgggattgcgcttgctgaggggacacccgcagcactgaaacaacagtatgcagtagatacgatcgaacaggtctttttgaaagcggggcggatgcaagatgcgaacgatggcaatcgttagacgagtttttaagcaaatgttacgtgataagcgtaccttggcgctgatgtttttggcaccactcttaattatggcgttgatgtattttttgtttcaaaataacacgactcaagtggcgactttaggtgttcacaatgttgatcatcaggtggtcaaagccattaatacgaagcatgtcgatattcaccattacagtagtaaccaggcaaaagcgatgattaagcagcatgatttggatggatatttgacgcaaaaagatggcaacttaacgatcacgtattctaatagtaatccgaccaatacgtcattgatcaaagcttctttgcaaagcggactggtcaaattaaaaattcaaacgttggtcacggctactaaagcacaaaaaaaggtgttgcaaacgcaacaggtggcactacaaaagttgaccgcggcgcaaaaacaggcaacggttagcaagctaaagacggccttggtccaagcacaggcaagtgggaatactgctgcggcggctaaaattcaaaagcaattgaggcaggctacagcgagtgctgcggcgccaacaaatagtcaatcacaaacgacgacctataccactagcagtcattatatttatggtagtagtgattcaacgttctttgaaaactttttgccaatctttctcggtttctttgtcttcttctttgtgttcttgatttctggcgtttcacttttgaatgagcgcactactggaaccctaagccggctacttgcaactccaattcgacggagtgaaattattatgggctatctaattggttatgggggctttgccatcattcagactgtcctgaccgttgtttttgcaattacggtcttcaagattcacttagttggtagtatttggctggtctttctgactaacttattattagcgttagtggctttgaccttgggtatctttatttccacctttgctaactcagaatttcaaatgattcagtttattccactgattgttgtaccacaaatcttttttgctgggttgattccagtcgatggcatggcgagttggttgcaagcaattgcccacatcatgccgttatactatggtgctaatgcgttgacggctgttgtgacaaagggtgctgggcttggcgatattggtgtcaatttgttaatattagtagggtttatggtcgtactaacaatgttgaatattgttggaatgaaacgttatcggaaggtgtgaggatatggaacgaccacggatacgggattattttcaacatgatctaagtcagaatgaaacgattacacctaagcaacgggccatcctccaggcaagtctcgatttgtttgctgaaaagggttttgaccagactagtactagtgatattgcacaacgggccggcgttgcggaggggacggtctatcggcggtataagactaaggctgccttacgggatgccatcttagcaccaattgccgcacacattgtgccaattttagcgagtgatttttcagaggatgaattacggcagcgttatcccagtctacaggcattcgtcacagcaatttttacggaccgagttgcatttgctaaagctaacgtgaaagagttaaaggtcatttttgaaatggcagcttttgacgccgaacgacgcgaacagattcttagccagattgcgcctaagatggtcaagcagatgggaagtgtcataaatcaactaaaagcagatcatttgattgtggattggccgaatgatttgatactgcaaagtttgttatcgcagctattcggttacctagcgcggttaatgctggaattgccgggaactgaaattgagcgcgaacaagcgtatttgattacggtgatgaccaaaatattgaccccgggtgaacatgatcaaattactggtcagtgagctaactgttacttgttataaactaaagccacttctgtattaagcggtcatttgaacgctgatcagaagtggctttagtcgttgctacgcgtgttcgtttgttaatctgctagtatcgtcattttattcaacaaactagtttgtaactggctgagtgtggttgtcatgtagaccgggtaaagatctgggttgacgagccgctgggttgttcgtgggagctcggcaagtttagcctgggtcgttgcctgaatggttgtaaccggaattgacgtggtgttggacaaatctaccggcgcgagtaagggccgggcttcaaaatgggtgagtcgctgttggcggtcgacactgagtgggtcactgttgacgacggttaggctggtcgcatcgacgatcgtctcggtagctagtgcaatcaagtcagcaaaggcccgctgagttcctggttcgtacagacgatagacttgcttatcaccaggaatcgttagtttttcgcgactggcactgaccttgatcttgggggtgctctgaccattgctctcagttgccgcaagcttgtagacgccacttagaaccggtgcggacgcgctagtgatgagcttttcaccgataccaaaattatcgatcggtgcgccttcgtgcaacagcgaagtaatgatgtgttcatccaatgcgttagaaatagtgattttggcattgggaaagccagccgcgtccaattgtgtccgggcagcttgtgataaagtcgtgacgtcccccgaatcgattcgaataccgacgggttcatgcccagctgctcgtagctccttaaagaccgtcaccgcgttagggatcccagagttaagcacatcataagtatcgactagtagcgcactattgtcaggatattgttcggcccacttgcgaaacgccgttagttcatccgggaaggcttcaatccaactgtgggccatggtaccagcaacgggaatatcaaacagtttcgcagcgagaacgtttgaagtactattggcgccaccaataatggctgcccgggtgccgtaaagtgcgctgtccgggccttgcgcacggcgcgcaccgaattccataattggacgtcctgccgcagcataactcagtcgacgagctttagtggcaatcagtgattggtgattgacgatatttaagacgagtgtttcaagtaattgcgcttgctcaagtggtccagtaattgtcaatagtggttcacgaggaaagaccggggttccttctggtagtgccttaatttggcaagttaacttaaaatttgccagcatggctaagaaggattcatcccataggttaagttgacggaagtagtcgaggtcactgttggtaaaatgaaaatcttgtaaagcttcgacaacttgctggaggccggccgcaatgacaaagctaccattgtcaggaacccggcgataaaaaaggtcgaaggtggcgttggtctgaggtaagtcgtgatgaaatccatttgccattgagagttcgtataagtcggttaataaagataaattgcgcattgctaatcaatcccgttattaagatttaggtgtcttgacacctatgataaatgaacttagtttatcataatttagtatttgatgaaagctattctactggttttctggtagaatgattctattgaaagagtaagaagggtgagtcatgacaggatcagaacggcgtgaacaaattcgatcaaaattatcgcaaacgcaggtccccgtaagtgcaacaacgctagcgaagcagtttaacgttagtcgtcagaccattgttggggatatttcattattgagggctcacggaacggccattgttgctactcttcaagggtatgaattagaaaaagcggatcagccaactgctgtcctagtttgccgtcattttccaaacgaagcgatgcaggaaatggccttgatcattcacgcagggggcataatcaaggatgttgaagtcgaacacccattgtatggccggctccggggtgaattagagattcgctcagttggtgatgttaatctgtttatgggccggctcaagaaattacaaggccatttattatcagaattaacagatggcgtccatagccatacggttgcttatcagaccccggaacaattaacagccatcaaggcagctttacgggatgcgggttatttgtatgaaaattaatgtcaagacatggttaatattacattggtaatcaattaatattcgttagttttatttacgcacgatgctggtgattaaccaggataatgccagtaaaaagatgtttggagatctagtcggatcttcaaacatcttttttgaatagaataactatttgccgttgcaaaagcgctagttgttcataacgattggtcgtgatgttgatcgtaacattggctggtataattcctaggtattatgtcggtcgttaatcaataatttgtttattggcggttttatgagggctcgaagtgatagaagcacggtggtgagcccgttgaaagtcgaaagcaacgttttccatcgcaatcgggattgttaattgcctgatgatacgtgactcatggctgttcactatgaatggcctgatttaatggccgcaacagcagtaacgtatacccaagtagtagaattccgttgatgattagtacgagaccgccatgagtggtactttgaaagattaaagtgaacataagtgttccgattggcatgattgagctattgactgttgttaatgttgcaacgactcggcctagtaatttagttggcacggtttgctgcaagtagacctgaaaagttatattaagaataacaagcgcgaaagccaatattcccatgataaagctaccaagcagggcatatccagttggtgattgggacgtcatgaacagaacacctaatagcaatatttggctatcaagaataagtaccggaataattaattttaaaaagagacgtttctgaccggttggcggtagcaaagttaaaagtagactgccaagtagcataccaattgcgctcccggtttcaagcacgccaataggaccattacctgtgtgaagctgatcttttaagatgtacggaattccaatcgtaacagcagtatataagaagttcagaataacactcaacagaattgtaattttaatcattgttcgcgaccgcatgtaatttagaccagaatgaaattttgcaaactgactgtgcgaagttactggggcgtgttgtgaattagcgaattgattagttgcgtgataatgaaatttcattgtgagcataatgccaaatgaggcgagtgtggcaacaatctctaatataacgaagccagaaaagccgactaaactgtataatccaacgcctaacgctggtgatagaatcgaggaaagagaaattgcactttgggttgtcgaaattgcatcgataattagaaaaagaacgattggaatgagttttgctgttgccgtaaataagttgatactagcagcgaataaaattagtgcaagcgtgcgggcagtcaggctaccagtgagaacggttttgtgcggataagtatcaatcagattgccaattgggacaaggcaaagcaagccaacaattggactgataatcatgttgataccaaagctaatggcagagtgtgtttcatcgagtaacatgagtccaaggccaaaagtgaacattttaccgcttagtgaactaatgaaattacttgcggcagctttgaagatttgcaagctagattgatgattactaatgttgatggttaaatcaggttgtttgatggccatggcgagttcctttcggtagtatgaattgattagaaatgaaaaacggataatctaatataattttaatgtttttaattgaattgtcaattttcgctagacagcacctagtcatgatgaaacaggtagccggtaagtatttgtatagttggtgaagattctgaatatatctggaagattaagcatgattgctcaaatgaaagagacagatctttttggaaaaatagtggttgctgtcatatttaagcagtcgcccattcgaatttaatcacatcggattcgaattatggttgatagtttgtaagtcgatattcaaatccagtgccattcaacagtgtgcttttaaactagttgctggtttaatttgatgggcgacaaggataatcatgaaggctcgtcggttcaaggtaaatgacagttgttttttagagattgcagtgtgttcagcaaattcggtttaggtcacgtggtaatagggcataatttgtttaatgtattagtgggaaatgtcgttggcgttgcagtgatagcgacagcatgatcatgattaacgtgatttattcgaataatgacctcactttctaatagcaattgaagcctactgcgttggaatattcctgtcgagtaaataaccaacgtatttgctaaggtagcttaaacatggagactaatgaggtccgtgatttgagggcaattcattattattaagttgatttgctcacggctccagcttaatcgactggtgctagtatctgttgccatctgattcgtaaatgacttaatctatgcaaatctcaataccagtcagcgtctgaacaaaaagtgggccgccagaatgattattctggcggcccactttgagtcagtcatgctgcttatctaaattaagcacttagaagtagtcaataagtgctggtcgttctttaactagactagtgtcaagtcggttgattgcattcacatcaccggtgattaatccgtgttggtacgcccgggctaagctctgggtgccaaagcaagcagtggttaattgctgaatcgttaactgaatgtcagccggtccagttaattggtcgctaacccgattgagcgttacttgcccgttgtgccgcatcaatgaccagattccttgattagcagggagggtagcgtcactgactgctaggcgaattggttggatgtccgtgagaaacggatagcgcttgataaagtcatataaatcaacaatgcgggccatcatgtacggctggacagtcacttttaaacggtatgggtcggctagtaggtccaagccgttggtcgcacttgggctatcataactaaacgtttcaaaggtggtgccatgcttagtgataaagttagccaatcgttcgaaagcggtcggcgtgctagtcacccattcttgaatcgcaaagttagtggcctgccgttcatagatcaaatagccctcgatattggcagccgcattgcggtaaattgcgaccgaccaatgatgtttgagagtcaggtaatgttgccaccaggctggtcgaatcagaccaccacgctgattttgcggttgtcgtgcataaaaatcgttgatttgggccagcccgtcattgccatagcgggtgatcgtaccagaccagtccgtcggtttgacacgtggtaggtctggagcggccatgacttggtgcgcgtggtcgaagacgtgttcatagccaaaacgacgatagtaaccgtacgcgaagggggcaaggtaggacagcgtcacgtggttggctgccatttctgtcagcgccgtcgttagcaactgtcccgcgccaccctgaccggcatattcaggcgcactcatcacatcgccaataccattcatccggtaggtgacgccatgaaagttgactgctagtggcagactgtatagcccactaaccagttgaccatgatcgtgacggccgtagatccagccatgttggtagcgatccatgaaaaatcgccgccgcgcgggggtatcgtgattattgaacgcgtattggtaaagttggtagaaagcttcgcggtcagcatcgctagttaaacggtaatcagttgtcattaatgcgacccctccattcgttgagtactatttggcagcgacaaatttaaagtcggcccatggttgtagcaagttaaggcaaggtaagtcactcttagtaatatgaccaaccacattgattcggccagtattttcaagattttggcgtgcaatctgcaattcacctttgtattgcccaaactcatcgttatcgatcaagacatcaccggtatgaatggcatctaggtgatgagcaggaaaggcttcgtctttgtagatgactcgggtctgagaagaacgaatgacgtaatctgaaaaatcaccgcgataagtctgtggttgcgcaaagagtactttttcttcaattgccgatagatcagcaacggtttcgacgtgtagcagtgggtaaggactaaagaacacttcagcagccgcttttagttcggcttcactcgcgtaggcgttaccaattaaaacgtcgtcgatcagccccgtcattttcaaatgttgaacttgtgccgcaatcggtaacccccgatgatcttcaagggtacataacccgtcttgcatgggccaaggcccataagtcgcatcatttgatgaaacaaacgcggcggtgttgatgccatactgacggtattgttcagaagtctgaacaaaataatcataaccaagaccagtgtattgttgtgggtagaagttatgtgagcctagtaagttatctttttcaggtgaataatccataatcgtgtcaacatagtgagtccctttggacatgttgacttcaatcttaatgccgaattcgttgtgcgtcatccgggcttcttcttgaccagtgaatcctaggtcgaggcggacaccccaggcaccgaggtcgtggaagaatgacaagtcgtcataggacacgccaagttgtttgaagaggtcaggattgacgtcgaccattacttgcaagtctaattggttcgcgtaagtgatcacttttttaaagttggcaaccactgcggcttggtcccctttgatttcaagcagtgaagtgaatacccgttgatagccatattttgcggctaaatcgaggtatgccgcatccttttcaaaggttgatcgttcgggataaacggaaacaccgagtttactcatttaaaattcctccaaataataattagtttctgtattcgcttacattatcgcacaaataattggtccgtaccagtaaaatagacaatttgttggtaccaatttttgcctgtcactccacgcgggattatgatacgatttgggtattaataattggaggtatcatgatgacatttgaagctattttacctgaattaaaagctggtaagcgcgctgttcggactggttgggaagggaccgaattgttcgtcgaattacagacggcaaccactttcaacggcgacccgctgaacccgtactttttaatcaaaacggccgatgaagcctatagtatgtggtcaccaacagattgtgatattttagcgacggactggcagttggttgactaatgcaatttgatgaatatcgtggacagactgtcttggttactggagctgcctccgggattggcttagcccaggtccagagtttcctagcccagggggctgacgtgattgccattgatcggcaaccacagccatcagcgctagtaacgacgtcagccctgcgctatgaaattgctgatgtgaccgacactaatgcgctcgtcgcggcgattaaatcaggagttaacgtactcggcaagccaaccgtcgtgtgcaatacggccggtaagttagacggctatcaaccaactttagcaacggatctgaaaacgtggcaagatattttggcgacggatctgacaagccagtttatcgtgactaatgcggtgctacctgcaatgttagccgcacaacacggcgttttcgtgaatatggcatcgatcgctggactggtgggtggcggaggcggcgcagcgtataccgcagccaaacacgccatcattggttatacgaaacaacttgacttggactatgcggctcagggaattcgcgccaactgcattgcgccgggggctatcgataccccgatgaatgccgctgattttgctggcgatggtaagatggcgaaatgggttgccagtgagacgcccgcaaaacggtgggcccaaccgcaggaagttgcagatctgacgctattcttagcgagtcagcacgctgattatattcatgggacggtggttccaattgatggtggttggttagcaaaataggaaggggactttggtatggcttgtattttttgtcagccgttgccgtatattttggagaatgacctagcagcggccttcttcgataaaaagccggtgagtccggggcatttgttgattattccgaaagcacattatgccacgtattttgatgtgcccacggcgaccaggaatgcgatgctcgccttactgacccaagcaaaagcgtacctagatgcgcacaatcatccggatggctataatattggcattaacgttgatccggctgcgggccaaaccgtaatgcattgtcatctccatctgataccgcgatatcaaggtgacgtgccagaccccgcgggtggcattcgtaagatgctgccggatggtgtaccggatttgagatagattaaggagtagtgaatgtgtatggcagatttatttgagaaagttggccggcgcggtaaggtcctatcaacgacaccggtgtatcatgggccgatttttgatttggtcaaacaaacgattcaaacacctgatggattagaagtaaaacgcgatttgattcagcatgggaacgccgtcacgattttagccatcaccgcggatgaccaagtcgtgctaggttcagagtaccgggtcggtcgcaatgccgagacgattagtttacctgctggcctcattaatgcgggggaagatccgttaacggccgcggcccgtgaattacaagaggagacgggctacattgcccatgaatcacaaattatgacgcaaattagctcgtcggaaggttttacggacgaaacggtcagcttgattttgactcacattgatccgcaagaacatggcgaacgacattttgacgcggacgaatacgtgaatacgcaacttgtcccgctcagtaaagtgattgacctattaaagaatggccagattcgttcagcacaaggaatctgcgcaataacatggtacttgaattttattcgatagaagtggggtgcggaatgaatttagatgagaagtttgcgtatatggcgactggtcagccgtatcgagatacggatgcagaactaacggcgttgcgtgaccaagcgacgttgacaacgaacgcggtcaatgcgactgctgatccagagactaaagaaactttattgcgacaattggttggttcagctggtcgcaagccatttgtaaatcctaattttcgcgttgaatttggacggaacattcatctaggtgataacttttatgccaactatgattgtgtaatgttagatggggcgccaattacgatcggcagtcaggtcttgttggggccaaaagtcggcctttacacgagcaaccacttgtttgatgcaaccgaacgaattaggggcggctgcatcgcccgaccaatcacaattggtgatggttgttggctagccgctaacgtcaccgtattaccaggagtgaccattggtgctaacacgattattggtggtgggagcgtggtaacccacgatattccagctaacgtgattgcggctggcaacccttgccaagttattcgaccaatcacggcggccgaccgcactggttacaccggggcgcaattcgaattgtcatgatgaacgacaaaataccaccttcgcaggttgttacctgacggaggtggtatttttgtgttcagcgcgtgaaaagtattctgacagatacgtgcagtgttattagaagatttaccagccagcagcttaatcgtccttggcattgtgagttggtcactcatacggtgactgttccaccggtatcagggtttaactttgatgccgtttaaagcagcagccaaataagcagcctgatcaatattgacgatcataccgcgtgctgcggcagtatcaagttcgagacgctcgaattgacaggtacttaggtcaatatttttgagggcggtatcgttgaaagcgacttggtcaaggttggtttcgttaaacttgacggtcgttagtcgattgttcataaagctggccccattcagccgacagtgatcaaaggtcacggttttgaaccgcatgtcgcacagcatggctaagtcgagctgacagtggtcaaaggcgacgttattgagggcagcctcgttcaagtcgacaccgacgagcttacaatctttgaattgaacgcgtagccagctggctttttcaaactggcaattagaaaagtcacaattgataaagacagcatcggtcaagtcaagccgttcaaattgactggccgtaaaccggacattttcgaagtgcacgtgatccagcatggggtgatcgatgtgctggtgactcatgtcttcttcactaacctgaatataacttaagctgtggtcctcatctgctaaaatatcgaaaaaagcgccagtcgttaattctgctgggataatgcggggatcttgcatgggacacctcgttagtttgattttgagtggttgtgctaaaaaagaagcccgttacaggcttcagtttgggatcagttgaagtaattttctaggaaaacggcgaccccgtcctcgtcattactcagggtggcatgggtggttgcggccttgaccgcaggaatcgcattcgccatcgctacgccaactttggcggcggttagcattcctaggtcgttttcttcgtccccaaaggccatcaagttgtcatagtcttcattaaagtgaccgaggagttgtttcaaaccactggccttatcagtatgcggtggtaagaattccaacaaagtccgccgggatgggaccacgtggaagaaatcggtaatttgacttggtaatttggcctggactgttttagcatcttgaccagcactaacgactttaccgaatagatcatcagcaggcaggtcggcaaaacgaacattcttaaatggcattaagccttgcaagaattcttcgtacggtgacttgcctagatccgtaatggagtagacttgcttcaaatcaatcacgtctaagtagaaatgatcgcgctgggcttgctcaaataagggttgtaaatcttgtttggtcacactagtacgagcaaggacgtcaccagtcgtgttttgctgaacgagcccaccattaaaggtaatcgcgtagtcagttggttggttgagttcaagttgttgtaagtatggttgaatcgccttaattggtcgcccagtacacagtacgatccgtttgccggccgaatgcagctgtttgagaactgcttcagttcgcggagaaatcgtcttctcagaagttagtaacgtattatctaggtctaacgcaatggtcgtaatcatcttggtcacactttctagttaagatttaaaattgttttaatggtcgttcccatatcatcaacatccgcaacccgcttatggcgcacgggcgcagtacggagggctgtgaccgttgctggaatgggcgtttgaatcaactcatgtaactgatcaactgcggctaggccatctaccgcactaagctcaccagtaattgccgttaggacggcctgtgggaatttatacggactagcggttgaaacaaccaccatgggccgctgatctctggttgcggcttgatactgtttggcaaccgccgaggccacggccgtatgtggatcgattgtgtagtgatgggcatggttcaggtgatgaatttcagcttgatcttggctttcagtaacgaagccggcccaaaaatcagctaagttggcacgcattgccggtgtaatcgtataacggccggtcgtttgcaaatcagtcattagtttagcagtcgccgtggcgtctgatcctgtcaagtagaagaggagccgttccaggttacttgagactaagatgtccatggacggtgaactcgtcaagaagaattcacggtttttatcataagtcccggtattaaagaaatcggtgagaacgttattgcgattggaagcacagatcagtttatgaatgggcgtgcccagttgtttggcatagtagccagctaaaatatccccaaagttcccagttggaacactaaagttaatctcatcaccgttcttgatttgcccctgcttgataagttgagcgtaggtgtagacataataggccacttgtgggaataaacgaccaatattgatggaattagcgcttgagaattggaactggtgggtggctaattccgcgtgtaattggtggtcgtttaacagttttttaaccgttgtttgggcctcatcgaagttaccgttgatcgcaacaacactagtattggctccggtttgggtcaccatctgctgtttttggattgcgctgacaccatcttttgggtagaagacgatgatgcgagtctgatcaacattggcaaacccggccatggcagctttaccagtatcgcccgaggtggccgctaaaataacgacttcggcttgtaaatggttctttttaactgccgttgtcatcaaatgcggtaggatttgaagggccaagtctttgaatgcaatggtcggtccatgaaaaagttcaaggtaatactgctgaccatgcttggtgaccggcgcaatttgggggtcatcaaactgatcaccataagccgcgtcaatgcaggcgtgtaattcatcagcggtataatccgtgaagaagagtttaaggacctcgtaagcaacttcttggtagctcatcgtggcgagctggtcgaagtcaaaattagcggtcggtagcgttacgggcacaaagagaccaccatccggcgtcaggccttgaagtacggcttgtgatgacgtcatggtgtgacttgcagtttcgcgggtactgcgataaagtgttttcatggataacgtcctttcaactgattttgactaaatgatacactaaaatcgaggcgaacggggacgttttcaccaaaatcatgaggataattgacgtaaatggtctagttaataatgtaatcgtttacacaaaaggagatcttacaatgcaactagctggaattaggcaccgccctgaaagtgaagatacagccgtcttagccgcacatcaactacaggtacgactacaaactgcgcgtgacgatgttgcccaagtggagattttgtttgccgattcttacttatggcaagaaggaacaacagcgctagagcggcggataatgcagcccggattagcgacgcagggcaaccagtactggcagacgacgctgaccgtaccgactaaccgggtggtctatgcctttctgatcacggatacgaccggtgcgacggttggctatggtgagggtggcttctttgacgacgttgccactaactggcaaacagtgggcaactattttcacatgccatatatgcacgtcagtgatgcggagctgccaccggcatgggttaaggagacggtctggtaccagatctttcctgaacggtttgcaaatggtgtgcggcaaaatgacccggctaatgttcaaccgtggggtgctgggcgtgttcaccgtgattcattttatggtggggatttgcccggaattacagcgcatttagatgatttggctgcactgggggtcaatggcctgtacctgtgtcccattttcacgtcaccatctaatcataagtatgatacgatcgatcattttgaaatcgatccccactttggtacgaaagccgattttcaggcgctagtcgatggcgcccatgcgcgcggtatgcgcgtgatgttagacgccgtctttaatcattttggcgagcagtcaccacagtggcaagatgtgattaaaaatggcgagcagtcacggtttgctgattggtttcatattcatggctggccggtgggacgtgatccgaagacgaagcggcttaattatgaaacctttgcgacgggagcagcgatgccgaaagttaacacccagaaccccgcggtacaagcttacttgattgatgtgaccaaatattggatcgaacaattcgggattgacgcttggcgttttgatgttgctgatgaggtcgaccatggtttctggcgagcgttatgtggtgccttgcgggcaatcaaacctgatgtgtacctattaggtgagtcttggcatagtagtcaatcgttagtcggtaacggccagtttaacgcggttatgaattatccactgacacaaccaattctggcgttgtttaatggtcaactcaaccttgaagattacgttggtaaaaccaatctggaattaatgatgtatcgtcaacctaatcaacaggcgatgttcaacgcgttggatacgcatgatacgccacggctactgaccacgttgcatggtcagttaactaaatttaaatctgcactcacgctactgatgctattgccggggagcccgtgtatttattatggaacggaagtggccatggccggtggtgccgaccctgacaatcgtcggtgcatgaactggcaaccagacgagcaagaacaacaagttcgacaatttgtcacgcgtttgatcaagtttcgccggcaacaggccgactttttagcaactagccaattgacatggacgattgatggtcactgcttaatcttaacgcggacggatgttgaacagacgattcaaggccgctttaatttaggtgcacagacagtctcaacagtaagtggcgtatcgccaatcttaacagcgggtattaccgcaaatgagatggcaccgggaggctttgaattaaccgtggcttagttgtgaagtagtgtcacaagtcgactggtggagcgttctgtgtgtttcccagttgaaatcttcaagaccgatagccgccattaggacagtcgcttataaaaaaacgattctcaatgtctttgagaatcgttttttttttattaatcatgatgaagcatgcagcatgacaaatcaaatgttatcaccgtaacaaacactgaagagcaagattgttgccgcatttgacaataaaaaacgcctagcaacttgcttggcgtttaaaataatcattatttagctgtctcaggcttgatgccccggccttgaatgaattcgatgacaatcaagacaacgtagcagattaggacgatgcctaagaggttggttgtcttaacggtgctggataaccagtagtactgccagtcttgattgttgaagacccaccatactaagaggccggccaaggcacctaatgtattcataattgcaataaagaaaatgttgccgttttgtttttggctggcccaatatgcggaaaggatggccatccaaacaccccaaacaatcaagccaacaacgacgacccaataaattagtgacgcgatcatgtgtactccttctttctacaagttaataactttattttaccatgaattcgattacattggcaccgtttcagtgattattttcacaatctgcttctgaatgattgtgttgaatttgctggattacttgttatttaaggttggattatttacaattagaacataataatgtaattgagaaagggttggcaatcaatgacttctgcatggaattggattgggatcattgcgtggatcattgttttggcgttagtcgtgtgggtatttcatcatattcgcgtacgacgcatcaagatgatcgtggaacgtaagcatacgtttgagtggggaaatcttatcattaccaccgttgaattaatcgttagtctcggattactagttggcatgggatacgtgactttcaatcaccaggtcgacctgtcagatgctaaggacgttaaggtaacgtatcaagttgaaccactggttttgcgagttgggactaatggttcctactatgtcgcggtggatcggggcacgacccaaaaacccgtgcatatttataattactgggttaatggtgcgaaatatactgtttcaagtaacaaggcgaccgtggtgactaatctttcgcaagttaaagtggcggatgcgggtattccgtgggcacaaaagcagctggttaaagaagaccggcagcacgaaaaagcctacgcagtgaagctgacagccacttatcagccgtcattctggaatggcttaggtgtccatgtggggcatcaagccatgacgcggtggttaattcgtgtgccagcccagtcatttattaatacgaccgatgtgcaatctaactaaataacaaaaaaagtaatcgaaccttgtgcgttttagtagccaagattcggtttttttcatagaattattaaaagttgttaaatattcatattcgcatgctttttttaggaaccttatcataattctaaggtaaaatgtaactgttatatttttataggctaattaatttatctatttaatcgtatgactgagagaaggaaaagattgatgattaacgaaccagcaattagtccactatttgtttgtggtatcattggtgattcgacggccatggtccttaataaatccttaaccgggccgttcaagaaccgttatgatttagtaaccgcaccagtgacgacacgggccacgttgagtgaggccgttagtcagattgcacaacttcaaacaggactacaaactgttatttcaaagcaacttgggaccgtccagcttacgattccagccttaacaacattagaattgccagcaacgttaattaatatttattatttactggaaccggtggggggccatttgttgctcaaacgaccgcattacaccgaatcaatgtcggcgggggccgctcgagtgccacttgatcaattaaattggtcgaatagttcgccgcgggtcatgcaggccaagcgtttcttacagaccggggcgtttcctaccgctgaccaacgaatcgatggctaccaggttttagagcaagcgcaattttaaagacgttgttgactttttaatcttcacgttgtaacttagaagcaacgtgaagattaaatgttgatgagaagagtaacaataagttgatgcctagcgagtcaaagtagtggtgtaatttgaccatcagcttattgtgaagatgaactcggagttggctaatggttgatgctattagcccggattgaccaccgataattgggttgaacgtaacgagtacgttgcgtgagcgacagcaagactgtaataataggtggtaccgcggagtataaacttcgtccttagtaagttaaggacgaagtttttttgttgagaaagaaggcctttaagatggaacaagcagcatttattaagaagtacgcaacaacgcgccagcatacggattcattgaagtgggacgcactacaagctcggtatggcaatcctgatttgttggcaatgtgggtcgctgacatggaattcaaagtgccagaacaagttacgcaagcactacaagaacgagtggcgcatggcatttatggttattccattacgcctgatcgttattatcaagcctttatcgattgggaacaggcacgccatggtctgacattgaaacacgattggattcgatttggtagtggcgtggtcaattcgttgtacgcgctcgttaatattttaacgcaaccaggtgatggcgttttgattctgacgcccgtgtactatccatttttcaacgcggtgcgggataatcatcgtcagctggtcacatctgagttacgcaatgatcgtggtcactatacgattgactttgaagatgtggaacagcaaattaaggcgaacgaggtgcgattgttcattcaatgttcgccacataatcctgtggggcgaatctggtctgaagatgaagagacacggctgttagcattatgtgaacagtatcatgtgcttgttatttcagatgaaattcaccaggatttagaaattgatcggaccaaccatccgttcaaatcggcgttaacggtagccaatgggcggtttagtaaccgggtgattgtcgtcaatgcaccgtctaagacgtttaatctggcggcgcttttgaactcacatctagtaattcctaatccaaaattacgacaacgctatgatgcacaaatcgggcgcttcagccagactgagatcagcgtcttaggccaggttgccggccaaacggcttatgaatcgggcgcggcctggttagaccagattttggcaatcgtccgtgataattatcattatttatgcaccacctttgccgcccacgcgcctaagttggttttagccgatttgcaggggacgtatttgacgtggctagatttacgcgcgtacgttcagccagctgcaacgaaagcgtttattcaagatcaatgtcagctcgcagttgactttggtgagtgttttagtcctgatgatcaggggtttgttcgcttgaacttagcgactaatccgcaaaatgtgcgtgaggcggctcagcggatcgtcacttgtttatcacaaatgcaaaaataaccaaaaaattccgacaccggcgtgttggaatttttttaacgacttttattggtaaccgtgcgtcgcttgagcaaacgtcgtcgagtaatctctcggcgaatgaaggagtaagcaatcaagctcagtgccagtataccaatgatgacggcggttttaacgtaaccgaatatccagaaaaaaactgcaatagcgaacgtacagtaaacaattaagaacatggaagccctccttcagtcaagtggttgtatgagttgataaaaccattgtaccgagaaaaagtagctaactcgtgattgaaatttgaattttctgttaaggattgcgaaatagttttgaatctcctggtaaatatgctgatgttgtaaaagttaatcgcggtatcggcgattcagccggcgttcattagcgtgtgcaagttggtcggcagttagctgataggtggtggcaacttgaagtttcttcaaaccagtttgaatggcccctagctgagtttggtcacgggcttgtccctggagtttagcagtgatttgcgtgagcatgttcagttcgggttggagcgtttcgtgtacttgttggttatattggtgttgactcagactgtgcgtctgccagcgcgtgacgcggcttagtagggccattaactggttggttagtaggttcataagatagtcagtttcttgatttgtaaatgtcatcaaaatgggacctccaatcaataaagttggttaactcaaatattagcatgagtaaggataatttaattactattttaataaaaaatggtaaaaacgactgattatgggttttaaacacaactatgcttgtgaagcgtgatacattatcaataactaagtgaagggagtgaatcgtcatgattgggcatattacggtaatgcaaccagattacgaccaaggcatcctgactgattttcatggccggcattttaaatttcggctaaccgcagtttggccgtcaagtgcgttgcatattggcgcggagttttattttagaccacagctaaccgcggccggtttagttgcggtagagttacggtatcagcaccatgatgggacttgtttgtcagttcgaccgccgactgaggtcagtcaacaagtcatgatacgaattggagagttagctttaaatacggatgacattcaatactatgcattgacgacggatcaggccgaagttcgcaatggttatgcttcatcagcacgtcatttggtgattaagatgcgctgtggtcgccaatatattttttataattgggatggggtcaatattgatgatgtggtcacaaagttagcgacgttacatacggtgcaacgccagtttgggtgaaaaatatggttgctaaaatagtagctaagttaagtatcagaaaaaagatgggtcggtaattattatgaataaaataagcgtcgcaggaattttcggacattcctacgacgcttgttttgatgtttaagttggttcgctttaatgaccacgatccttgaaaataaatagtttactgaagaaccaattgagtaataccacaataatttgatcaattaatttgacgataaggtcgtttccgtgcagaaccgaaataccgacaatcataatcccctggtcaataaagtaactgagtaggcggaatccgaagaatgatgtcatttcaattaaaacagcacggaaagtaggtgtttgtgagtcaaatacccaaattttattcgtgatataggcgaatagcactgagatgagccaggcaatcgtattggctatccagtagggccagaattggttgaaaattccaaaaacaataatattaattagggtggttaagcccccaaagattaaataggaaaggacgctttgatagcgttgccagagttgtttgataagttgtcccacagatgaataccctcactttagctgattattactaggtaccatcctatcataattaaatggctgcgtgttggatatttttagtgcgattcaagttggtggcgctgatgattaaaggcttgctgggccgtggcaaagttatggtaatgtgcgtgggacacggtcaagcggcccagtgtagtggttgcacggatgtctagccgatagacatcgggtccgagacgcaatttgcttaaccggatttgatatgaaagggcatcgttgattacaattgtatggctggcgattaggcctggtcgaatacctaaagaaagcatactattcacccccaagtggattaactccaattgtaaggggtaactgtaaatatcagatgtcgttgttgtaaatattatgtaaacccgacactgctagccggcgagctgctgtgcataactggtagttagtttatataaatgataacgcaaccaacgctgataaatggtaaaatagaattaacagatggaaagggcgtgacgtcaatggtacaagaatattcgaatattttagttcccctcgatggctcacaacaagctgagattgcgcttgataaagcagttgcagtcgctaaacgtaatgaggcacatatcgacgtgttagcagtcattgatcccggtcagtttgggtataatttagctggtttggcggatggtgatattacgtatcaattggttcaggattctgaagcttatttaaaagaaacggttgatcaagtcaaaaaggatggctttacggacattgccttccacattcgaatgggaagtccgaaaccaattatttcacaggacttcgtcaaggatcatcataatgacttgatcatgatgggggcaaccgggttaaatgccgttgaacgcgtgctggaaggctcggttacaacgtatgtgcagcgtaatgcgttgactgatgtaatcgtggttaagacggatttgcaaaatacgcaggttgaaaagtagcgttagtgggaaaaccacttctcgaatggtgtgacgtttgtattaaccattaaaaaatgaagcaggtcgtgaagtcaataacttcacgacctgcttcattttttagattatcagcttaatttctgattcttaacttacggttgaacagataggcgagaccaccaatgataccgcaacctaccagcattgtgatgaatggcatggttgggttaaagtaaccagttgtcgcttcaccgtggctgggataaccaataataaatttcaagaagttttcaagccccgtgtaattatagttcgattgattgcgagtcataatgatgaccattatccaaataataagcatgccaatgatgggagtgccaatgattaaaatcgttttggcccatttaccaaataacgcgagtaaggtcccacaagcgatgccggtaaggccaacgccaatgtagaaaatccagttaaagcataagctagctaaaatgtttagccagacctgatttcccagcgcatggctatacagcgaatagcccgttctcatcaacgcggtgttggtgctccagtgtaaatacggagcatgaataccgtagtaataaatggcattgatgatgacaagcaaaccactaagcatgagtaatgcgaatactcgagcttgaaagtaggtttgtcgggaaatcccattttggattaagagcttaaagttgtcgtaagtgagtgaccccacaataaagataagcatgaagaagagtggcccgaggcttaggctagcaaaattaccaagtggagaatactgccgaatattacccgtaataactgcaaatagtagtggtagtattccgaatacgacgaataaagcgagtaccgaccaccccgtcattttcaattgttccgttaataaataacgggtggtgttgcgaaccttaattgacatgagcggcggcctcctccttggtattagtcaggttaacaaatagtttttgtaggtccagatgctcgaccgtgaccgtatcaggaattggtcggtcgttatctaatggcccgtaaacgtagtgggccgtaattccgccaagatgatccttgccgataatatttaaaccatccgtataagtgctgacatcagtttgtggaccagttaccgcgtaagattgccctaggatgtcggtgacatcaccatcaacaataatatgatgatggtccagcacaaagacatgttcaatcaagttcgtaatttcttcaatgagatgagtcgaaatcacgaatgtgcggggatggtcactataggtttcaatcagttcttgatagaaaatttcgcggtgattagcatccagaccgaggactggttcatctaaaaagatgtattcagccggtacacataacgcaataatcagtttaaaaattgttcggtaacccgtcgataatttgccaaatcgcgcgtttaaatcgaggccaaaggtttgtgctagttttttagcataagtgtcattaaaatcaccatagagtagtgcggtggttttaaacagttgtttgacccgggaacgctcagaatagaggttaacttcactcatcaagtaaacctttcctaacgtgcggtcgttatcacacatggattcgttgtccatggtgaccgttccgctgtcagcaaagatacgattgctgataatgttcagcaaggtacttttaccagcaccattgcggcctagcaaaccgtaaatcgtgtttggtttgatcgttaggttaagattatccaggacggtttgaccgcgaaaggcctgctggacagcctgaacttgaatactcatgattcggaaaacccccgttcaattaatttagctaattcatcttgcgtaatgtggagcttttgtgcttcagcaactagttttttaacgtagtcggtgtagaactgatcccggcgcttttcaacgattcgttgttgtgcaccggcgatgacaaacatcccgaccccacgccgtttttcaatcagttgggcatcaactagaatattcatgcccttaagcacggtcgcaggattaatatgaaattctttagaaatctcggttgtcgaaggaatttgttcaccttcagcgaaggtttccgtaaagatagcttcttcaatttggtcggcaacctgcaagtagattggttccgtgctattaaagttgaactgcattttattcacctcattgcagtgattgccctatttcgttgtggccttttgttgcggctggtgcagttgtcgttcggtacgatcgatccgggcagcaatccaactagagagtaggaggagggtgcccagtacggccagtagaatgtcttgatgttcaaagataatctgggtggctaaaccgaagttaacgctcagccacagaagcggcatgagcgcccctaaccagaattgacgacgacttgcgagcacgtaacggtgtaatggtgtaataacgattaataaagcgactaatccaaagtataccatgatttttccctcctccgaaaggttattgtaaaacgattcgccgatagatggtgatcgtaatgagatagtaaagtaggtagagaccggcaaaaatcaagaatggtaaccaaattccggtatatggtgaggtaaccattatgattttgaacatttgtaacccaaacaagacgtgtacaataccaacgattccaggaagaataaagagcacagcaatttctttgttaatggcaccgttgagctggcgtctagtggttccaactttatcgagcatcttgtaacggtgttgatcagcatcggcaccagacagaatcttgaacatcaggcaactagctagcattgcaagaaaggcgattccgaggaacatacccataaattccagcccggagtacatgccgttaaccattagatacatcgcatagcgacctccaaattgttcagggctggtagtgtgaaagtgatgtttggccagtttgttcaatgcaacgcgatgttcgataacgttgttggtagtaaacacagttagtcgctgttcaggctgggcaagtttcgcgtacgccgtttttgataaaaatacgggtgttgcggttgccatgacaccactctgaagctgcatcagttgataattatcttctgatttttgtaatttagccgcattattatgaacggtattaaaagtcagttgattcttattgcgagtatgaatagtcgtgaatggttgccgattgaattcagcagcttggaaataaacgactttcttggttgctttgaaatgataggtcgccgttgtcttgggcttcatcgctgcaatttgtgctttttcagcggtactagcgttgaccagtcccatatcataagcgttattaatattagccattgatggaatttgactgtgaaagcccattccaactgtaattgcgccgagagctagtgcgaatagcattgcgacaattgacagcatcttagtgtaattacgaattctaaagcttagctgtgataaggtgaagccattcaaaccacgttgggcaaatgagaatcgtttgagtgcgaccattaaccagacaaaaatagcgttaaacagcagataagttccaagaacaattgtgacgagcgcaattccaattcccatcagttgcaaaattttcaggttagccattgaccagtaaccaattgcaattgaaatgacaccgacgacaatttcgatgagttgacgggctggttttagttgtggccggttaggttgatcattactgtgtagtaatttcaaggctggtgtcttggtcagggatagcaggttgaataaaccggcaattaagaacaatccaacgtagagtaacagtgtcgcaatggcagctggcgtgtaccaggctgtaaaatggtgaagcgtcaggcctagactgttaatcagaatctggcttacgccgacagttaaggctgttcccacaagaatgccgacaatggttgcagtgataccgacaagtagtgtttccagccaaattaattgaccaatcttacttttgcgtgcaccaacgagcatgaagagcccgtagtctcgcttacgcatacttaataagaatgagttagcatagccaatgtagactaatgtgatgattgtgagtagtacggaaccaaattggaagatgaggccgaccatactaatactcgtattttgttttaagaaatcttggttagtggccagtgcttcaaacatatagaagattgcgctagacatgatcagtcctgaaaagagaacgaggtagtcgcgccaacggtgttttaagccggtcatggcaagtttagttaacatagtttaaaggactccttttactgtttcggcttactgttcaaacgtccctaggttgtcgaggacttgttgataaaaatcactgcggcttaaatccccacgtttaagttcttgcccaatccggccatctttgatgaataagattcgttgacagaagctagctgaaaatggatcatgggtcaccagcaagatagagacagcccgttcttggttgattttggtgaacaggtcgagtaattcacgcgctgacttagaatcaagggcaccagttggttcatcaccaaatagaatagcggggtcattgattaaggctcgtgcggctgccacacgttgcttttgaccaccagataattcattaggatagtttgataggaattcttcaattcccaattggtgtgcgactttttcgacagctggcttgatctttttgactggcgtattttgcagcgacaatggtagggcgatattctcgtaagcagtcatagtttctaataagttgaaatcttggaagataaacccaatctctttggcccggaaatcagcaagttgattgcctttcagatgtgtaatcggttgttgatgaatagtcacttcaccgctagttggttggtccagtgtggccagcatattgagcaaggtggttttccctgaaccagatgcgcccatgattccgacaaattcccctggttgcacattgaaattaatgccttttaacgcttcgtattgtttgctgcccgccttaccatacgttttgtgcaggtcgctgacggtcatgattggtgtggttgtcattttaaatacctctcttaagttatttggttaattacttatgtaactaactataaaggcaactaacgcgagtgtcaatcattattttctcgcttgatagtcattgggacgtcaaacgctgatttatcaacgtctagcgagtagtcaatcggttagccctgagactgaaattgagtaataaggtgcactgaggttagtgacttcgtcctgaaggggtaactaaccgacgaaccgattaacgaactagttgataagtgaactaattgagtgactagcactatgtaggctaataaaacgtactgatctggttgctaggttttgtaaattgtttgaatggttgatagtttttttagttgatatcacttgtatgagaatctaaggaagttgtcatgaagaaccagtgagggtggattgcaattaggcgatggcaagcctaaaataattttactgttagatgtgcgtaggcacgtgaaaagatgaggaggagtattcttgaagaagattttggtattacacactggtggcaccattgcgatgtcggctgatgaatccggcaatgtgacccccggagatgaaaatcctttagacaattatcagagttcatttggcacggatattgagttagagactgaggacgtctttaacgtgccgtcgccgcacatcaccccggcacggatgttgcagttaaagcaacggatcgataaggccgcacacgaaggggtcgatggggtggttgtgactcacggtacggatacgctagaagaaacggcgtattttctagatcttactttaccgaatgagctccccgttgtgattaccggcgcaatgcggtccgccaatgagattgggtcggatggtctgcataatctcgaaacggcgattcaaacggctagtacaccggatgcggccgaaaaaggtgttttagtggttatgaatgatgaaatccactcggcccgctacgtcactaagacgcatacgaccaacgtggccacttttagaacaccgacttttggcccgattgggttagtcgctaataaaggcattgtcttttttgaatcattactacggtcaacggtttgcccgattcaaacggtcacagataatgtttttctgatcaaagcatatgccgggatgggaccagaactatttgacgccattgcgcaacccacgactcatggcgtagtcattgaagcgttgggagcggggaatttgccgccggcgacgttaccagctgtgcaaaaattattagacatgcagattccggttgtactggtttcccggtgcttcaacggtatcgctcaggatgtctatgcttatgaaggtggcggtgttcaattaaaacaaatgggtgtgattttttgtcagggattgaatggacaaaaagcccggattaagttactggtgggtgtcagtgccggtatgtcgaccgatgagctagctcgatttgtagcgactgccaattcataatcgacgtggcgcccctttgagccctgcgcaacccgtgtatgggctactcgtgacacaaaattgttggatagtttgatcgccagtagtcatagcggacgatcaatcataaaaaaactgagccatcacttcatcattatgaagggtggctcagttttttatcagctaaagctaaagatactattgattgatcagattttgacgaatgagccgggcaacatatgcttcgtgaagcaggtcaccgtgactaattgatttttggttaacagtcatggcggtatagcgggtaacattgttcataaataagttgccaccagcgttcacactgctgagcggtacgatatcgtcgttaccctcgccagtgtcaccggcaatgttgatgaccgcatgcaatttcttgaattggttcttgtgatcaagaagtggtgtatagagcgttttatcaggatgtgcagcatcagtacccaagaatggggtgccaatcaacatcaaatcgtggactgctaatggtttggacgagctcaaacctgctagatagcgactccagatcaggccaccatttgaataaccgagtgcgttggccgtggtgagatgttggtgacgttgcaaataacgaatagctttggctaagccgttcgtttgggtcataatgttctctgttgagtccgtgctatcttcgaaaaagatcacgatgagggcatcgttaaggttggtgttctcgacgcgtttttctttaaacgccaatttttggttcgccttaacagtcagggtgatgagcggatggtgctgttgctcattaagtgaacggacgatgtcatcaaagtcagtccgcgtgctgctactacctccaatcatgatcaatggccgtttttgcgcagtaatcacgtgactgactttatcttgatggatttgtgttgtcagtccgagaccgacgatcaataaaagaaataggccacttgcaatcaagccccagattactttcttaggcatcagctcaccccattaaaattatttagaaacgttcggcaatgattggccgatcgtttaacggttgaatcttgcggttattagcggcaaataattgctgataagcagctaattgttgttcaccaatcatgacagtatcggcacagacataccattcaacggtttcacttagtggcggcgtcgtcaatgagcccaagtagtgatagaccgtcccggtatctgggaggagctcagttaagttgaccggtgttgtcagttcatggctcgtttgggctgtgaactggtcaagtaagccttgtaaactagaattaggcttgccaatccgtccaaaaacggcgacgacggcgagctggccggtagcactttgatgaacgagatgccattcgattggtgcggcttgcccatcgattaagtgttctgccggcgtatgaaagtgaatctgttgaaaggcaaagtcgcggtcgttcaaataagcggcaccaattccactagccttcaaagttgtcgcttcgcccgtaatcgttttggcttggtacaagcctcgccagctgatggcggatagctgtgaagactgaacgtgttgtgtttgaatatcgattggtgactgatgttgaccactagtcatgggccaatcagtttggtgtgcataatcaaatgtcatcgaaagatcctccgttatattattcagtgaatattttttatttagtgccagtatggaaatttatggctaatcggtccaaggttgtgatgctgtttgtcagcaaacgtgttctggattcgacgggccgtcgctggctatgtaacttacattatagcacgcgttgatgtcggttggtgtcgatggtgctaacgaattatcttggaaataaagcgactgattcggtgattggggcaccgttaaactgaccgataatgttagaatagaaaatgaaaagttaacagataggtggtttcaaaaatgacaaatcaacgtgtattaactgtaccaggtggcattaatttccgtgaactcggtggttactcgactaaagacggtcgaaaaatcaagtggcataaggtcattcggactggtggacttgatcaattaacgccagccggccaagctttgctggatgattatggcgtccgctacgatattgactttcgttcaccacaagaagtcttagatgcgccagatcgaattcctgccaatgctaagtacgtgtacgcaccagtgttcaatgtggacgaaacgcggaattctgacggtactgacaagatgacggctaacttggagaagcatccagatagtggattcaagcacatgctaaaggtctatcagatggtggccgacgagcaacatgccaaggacgagtatcgccggttctttgataatctacttgcaaatgatcaacccgattcgacgttactatttcactgcactgcgggaaaagatcggaccggaatgggggcggtatacctgttaaccgcactcggagtcgattttgaaacgatcaagcaggattatctcttaactaatcaggcttcgattggccggatcaatggtgcgatggccgaagcacgtgctcagggcgcatcagatgcaacggtcgaaagtattcgggccctctggtcagttgatgcggcttatttggacgccgctatgaccgaaattaaacgacaatcgggtaatttaaaccactatttacacactgagcttaaattaactaacaatgaaatcaatgatttgcaacggatttatttagaataggaagtgtgacgatgcgctatcttgcaagctccagccatgatattcgcacgaatcttgccattgagacttacttgatggaacatgccgatttgacggaaccgattctatacttttacattaacgccccctgcatcattgttggccgttaccaaaatgtcaaggcagagattaaccaggactatgttgacgcacaccacattacattgacgcggcgaacttctggtggtggagcggtttatgatgaccttggaaatgtcagttttagttttattactaaggacgacggggacggttttggtaactttaagcggttcacagcaccagttctaaaggctttacacgcgatgggggccactggtgcgacgatgagtggccgcaatgatttattgattgatggcaagaagttctcaggaaatgccatgcacgttgagaatggccggatgttctcccatggaacgctgatgtatgatgtcgaccagacgcaaattgcgaaagctcttacggtgccgaccgataagttggcctctaagggtatcaagtcggtccgaagtcgagtcacgaacttgaaaccgtacatggcgccggcttatcagcacttgacgattgaggaatttcgcgatacgttggcccgtgaaatcctgggcgtggctgatttgagtcaagctaagacgtatcagttagatgaaacggcactggcaggggtagcagcactgaaccaacaatattttaccaactgggattggatttacggtcagtcaccagcgtttacagttaagcagcgccggcattttgatgctgggaccgtcgagtttcagttaaacgtggtggcagggcgcatcgaagcagttacgatttatggcgatttcttcggtgcagaaccgattgctcccgtcgttgcacggttgactggtgtgaaatatgaacggcaggcgattatgacggcgctagcaccgttggacttaacccattactttggtcgaattgccccggcggatttgattgatttgatcgtagcgtcgtagctttgtgaaaaaatttgttaagcagatataattgcggcaacgttgcgcggatactgaatttacttgattgcacggataagcctaatatcagtgagttcagttgtttgcatagtaaaactgaaagcgcttaaaattgttttgctttctttagtgaaatctactacaatatagttattgactaagaaattatataatatttgactatttgatcatagaaggagttgttctcaatgcacaaatttatcgcgatggttggaactaattcagatgagtcgaccaaccgtaagttgttgcaatatatgcagtcccactatgcggatcaagcagagattgaattaatggaaatcaagggtctaccaatcttcaataagcccgaaaatcatgaaattccggcacaggcgcaagcaatggcggataagatcgaacaagctgatggtgtgattattagtacaccagagtatgatcattcggctcccgcggcattactgaatgccctcgaatggttatcattccatatccagcccttcgtggacaaacccgtcatgattattggagcctcatacggggcactcggcacatcacgggctcaagcacatctgcggcaagttttggattcaccagaattacgggcgcggatcatgccaagttcagaatttatgcttggtcattcattgcaagcctttgatgaccaggggaatttaacggaccaacagaaagcgacgaagctcgatgggttgttcaaggatttccaagtctttgtcgaaatcacgaaaaaattaaagaatgccaacgcgacgacgtatgaagaagttcgtgaaatggattgggaaaaattatagagagggcgacgacgatgaaattagttggaattgcgggttcaattgaagataagtcttataatcggttactgttaaagtttattgctaatcattttagtgacatggttgatattgaaattttggatattcaagatgtaccaatgtttaatcagagtgatgatcaaacagaaggtgaagctgttcaatatttgaaacgaaagatcatgcaggcggacggggtcattattgcgacacctgaacataatcatacaattactgctgcacttaaaagcgtgatcgaatggttgtcgtttaaaattcacccgatgtcagggaaacccgtattgatcgttggcgcttcttactatgatcaaggttcgtcgcgggcacagttgaatctacgccagattttagagtcaccgggtgttgatgctgtggtcatgcctggtaatgaatttttgctcggcgaagttaagcaggctttcgatgaccaaaacaatctgaaggatgctcggactgtctcgttcttacaagaaacgttaggcaagtttctgaagtttgtaaagatggtcaacgcgatggatgcggaagcacacgctgatgattggaagaatgaagaccttgaggctaagggcgaagttgaaacgacaatcaagggcgtcaacatgcatgcggctgattgggtcgaacaagcggctgccaagacccatgcggctgagggtgacgactacgttaagctcgatcggggtgtgctgaccgtcaaccaattaaattggttcctcaactcgatgccaatggaattgacgtatgccgatgccaacaaccaatttttatactataaccatcaaatggatggcgacaagatgttagcttcacggacacctgctcaagccggtaatccactagctgactgtcatccaaagcgggccgtacctggtgttaagcgagcggtacacatgctacgaaccggtgagactgatctcttcaagttaccggtacctggtatccctaataagtatgtgatgcactattatcaagctttgcatgacgataagggtgagtacaaaggtatcaacgagtttgtgctcgacctcttaccaatcgtgaagtattacctgaagcagacgggccagatgttagcacctgatccagatgctaagacggacgccgtttcaggagcttcatcgaaggcgaaggaaacgaagcctgatgctgccccagcggtggatgatgtctctggcgcttcagccgatacggaagccgcaccagaagcaccaaccaagcctgaagcacctgatgtcgatagtgtttccggcgcttcagcaaaataattagtaccttaaaaagtctcgaggaatcgcttccttgagactttttttgcgttattttggtcacttcaatccgatcctttaggaaagcgttcgcaaattaagttgttgattgtttttaagttcagcggcagtcagtttatccccgctataaatagtctgagttagcataaacatgcttagttgctcgtcctacgccgattcccagtcattgctgttaattgttggtgcgcaccgacaaaagttaatggcccgtttcaacggatagttgttgataatggtagcagtaagtttgttatggtggaatttagatgatgacggattgttcggaaatttcaatattaataatattatcaaaatagtcgcttgaaatcagttgataactttttccagacaccggaaacctgcaaacagtgaggtaattcgtacatgttgaggtagcattaatctaattatcaatttcattaacacgaacattaaaacgttaattaatagataaagttaagaaattcgttgacagtgtcccgcctgattgctaaactaatggtgaaaacagggaaagagggatcatgatggcgaaagttggtttgattatggggtcaatttctgattggccaaccatgcaattagcggcagaacagttaacggcactgggagtctcttatgagcgtcacgttatttcggcccaccgaatgccccagacattacaatcctatggtgaagaagcagcgtcacggggaattcaagttattattgcgggtgcggggggcgctgcccatttacccgggatgctagctgccaatacactactcccggtaattggggtgcccattaagacccatacgttgaacggagttgattcgttattgtcaatcgtacagatgccagctggcgtacccgtggcgacgatggcgattggtgatgcgggggctaagaatggtgcgctaatggccgcccaaattatcggtttacgggaaccacaagtacaacatgcaattggagaatttcgtgctcgtcaacgtcaggaggctgaacaaagtgaacgccaattttaaggaagcactcttaccacccgcaacgatcggaatcgttggtggcggtcaactcggtcagatgatgacgcttagcgcgaaggcgatgggctatcgggtaggtgtccttgacccgacacccaaagcaccggcagcccaggtcgcagattttcagattgttgcggcttatgatgatcaggcggctttacttgatctagcgcgccgtagtgatgtcttgacctacgagtttgaaaacgttgatgagaatgctttgattgctgcgcaagcctatgcaaagttaccgcagggcactgcactcctgcatattactggagatcgtcttaatgagaagcaatttcttcatgatcatggcatcccagtcacatctttcgcaccggtgacggatttacagtcattaaattacgccctcaaccgtgttggtacgccggcaattctcaaaacggcggcaggtggctacgatggtcacggacaaacggatctagacacagcagtggtgacaaaatccgctagtgccttattgacacagccgtgcattctagaggcgcggcagaaatttcgaacagaagtttccatgatggtgacgcgtagtgctgctggtgttgttacgacttttccgttagttgaaaatcagcatcaacatcatatcttacacacaacgattgccccagctaatgttcagcccagtgttcatagtgcggcccgcaaaattgcggtttcgattgctgaatccctggaactacgcggcgtgctaggaatcgaattctttgttttaccggatgatactttattagtcaatgaactggcaccacgcccacataattctggtcactatacgattgaggcctgcaacatctcgcagtttgaggcccatattcgaagtatctgtggcttaccgattccggccattacgcagaccagtccggcagtgatgcgtaatctgctaggtgatgacttaacagtggcacgtcaacagttggttgaacacccagaatggcattttcacgactacggtaaggcggccattaagccccagcgcaagatgggtcatgtcaccgtattaaatcacgatattgacgcagcattagcgtcggtggcaaatttgaaaggggaacaataataatgacggcagcgattgagaaacaagctttgctttacacgggtaaagcgaaagcgatgtatgccactaatgatcctgaaattctatgggtcgaatacttagatcaagcaacagcgctaaatggtaagcggaaggttcccattgaccagaaaggccgattgaataatcgcatcgcgagtttgattttcaaagacttagccaatcacggcattgccaaccattttattgagcaaccttcagactacgtgcaacttgtccgtcgcgtgaccatgattcccttggagacagttgttcggaatgtggcttcgggtagttttgagcgtaaatttgccgtgccacacttaaccaaatttgcagaaccagtactggaatttttctataagagtgatcagctggatgatccatttatcaatgattcacaaatccacgcgctaaatgttgcaacaccggcaatcgtggcggaaattaaacggcaggccttacaggttaaccagcgtttgacggcaatttttgcggcgatgggggtacagctcgttgattttaaaatcgaatttgggttgacgaccaccggtaaagtcttgctggctgatgaaatctcaccagatagttgtcggttagtcgacctaaagaccggtgcatcgcttgataaggatgtcttccgcaaggatctaggcgacttgactagtgtttatcaggaagtattgacgcggctagcaaccgttgaggaggcctaacatgtacttagttaaaatctatgtgacttataagcaatcaattctagaccccaagggtgaggcgattcatgatgccttacaccgacttggatatacgaatgtcgatgccgttgaattaggtaagtattttgaggtgaaaattcacgcggatgatcggccagttgccgctgaaatcgacgagatgtgtgatcgcttgttagccaacgttaatatggaaacttatcgttacgaaattactgagatggaggctttgtaatgatgaaatttgccgtaccagtctttcctggttctaattgtgatcatgacatggtgaatgccttgcgcgatattttacacgttacggctgatttgattccggcgacagcgacctcattagcaggttatgacgcggtggtgttacctggtggcttttcgtacggtgattatttacggagtggtgcgattgcccgctttgcgcccatcatgccggccgttattgcatttgctaacgctggtaaaccagtcatcggaatctgcaatggctttcaagtcttgaccgaagccggattattacctggtgcattgcaggccaatcgctcagcgaagtttatttgtcaggacagcccattacgaattgccaatcatgagacgatttttaccaccgcatacggatcgacagatcaaattagtttaccgattgcccacggcgaaggcaattattattgtgatgaggccaccttggcgcaattacgtgctaatcatcaaatcatcttcgaatacgtcgagaatccaaatggcagcacggctaatattgctggcattacaaatgaagcgggaaatgtgcttgggatgatgccccatccggaacgggccgtggagatgatcttaggttccacggacggtctcagaatttttcaatcggtcattgcgagtcaagaggaggtcacccatgcttaaaaagcaaccattatcacctacagatgttcgcgattctaaggtctatcgggattggggcttaaccgatgctgagtatcaattattaacggataaggtccttcaacgcttacctaacgagactgaaaccgggttgttttccggcatgtggagcgaacattgctcctacaagaattcaaaaccagtcttgaaaaaattttggacgcagggtgaacaggtacttgaagggcctggtgaaggcgccggtattatcgacatcggtgatggtcaggccgtggtctttaaagctgaaagtcataatcatccgtctgcagttgaaccttatgagggtgcggcaacgggtgtgggtggtatcatacgggacatcttttcgatgggggcccggccgattgcgctgctggacagtcttcgctttggggaaccgactgatgctcatacgaaatacttgatttcgcaagtagtcgccggcattggcggttatggcaactgtattggaattccgacaatcggtggtgatacggtatttgatgcgagttatcagaagaacccgttggtgaacgccatgtgtgttggaatcttggatcaagctgatattcagaagggccaagcaacaggaattggcaacgccgttatttatgtcggcgcaaaaacggggcgtgacggcattaacggtgcgtccttcgcctctgctgaatttaatgacgccaatgaaacccagcgttccgcggttcaagttggtgatccctttatggaaaaattattgatggaggcgtgtctcgaggttattcatgatcatcgtgatgttttaatcgggattcaagatatgggcgcggcgggcctagtttcctcctcagccgaaatggcgtccaaagcaggcagtgggttgtcactgaatcttgacttggtaccacaacgtgaaactggcatgacgccgtttgaactgatgctctctgaatcacaggagcggatgttactatgtgtcaaagctggtgccgaagcagaaatttatcaagtctttgaaaagtacggtcttgatgctgtcacaattggtaaagtgacagccggccaccagtatcaattattccatcatggtaagttagttgcagatgttcccgtcgatgcacttgcgaccaaagcgccggtctatgaacgcgaaaagaaacgaccaacgcgcttgaaccatcagagccatcatcaatttatgccacgactagttgatgcaactggcacattgaagaagatgctccaacagccaacgattgcttccaaagcgtcgttatatggaacgtatgactcgcaggtccaaacgaatacggtcgtcaagccgggttccgatgcgggggtcatacggattcgacatacggataaggcgttggcggtcaccaccgatgttaacgggcgatacttatacttaaacccccgtgtcggtggagaaatcgccgttgcggaagctgctcgaaacattgtcgcttccggtggtcaacctttaggcatcactgattgcttgaactatggtaatccagagaaacctgaacaattttacgatttggacgaatcggcgatgggcatcgctcgtgcctgccaattattcaatacgcccgtgatttctggcaatgtctcgttgaacaatgaatcgaacggggaagccatctatcccaccccaatgattgggatggtcgggttaattaagcatcagaaagatattacgactagcgattttaaacacgctggcgatgcagtctacgtgttaggtaccacagaagccgatttcaatggtagtgagctgcaaaagatgttgacgggaacaatcagtggcgagctgtttgattttgaccttgtgactgaaaatcgtaatcagcgtctattgttaactgcgattcaaaaaggactagttgctagtgcccacgacgtttctgaaggtggcttgattacgacgattgccgaatcatgttttccacaaaatatcggggtggaactggccagtgacttgcccgctgccaacttctttgcggaaacgcagtcacgatttgttatctcggtgacaccagcacagcaagccgcgtttgaaagtttaatggaaccatatgtgacctatttaggacgaacaactgcaacggatcggctacacgttcaaactgctgatcaggcgtttgatattaaggttagtttcgccaaacagttgtgggaaggggccttaccatgcctactgaagtaagaagtctgaatgaagaatgtggcgtctttggggtttggggctcgccggacgccgcccaattaacgtactttgggctccatgcgttacaacaccgggggcaagaaggagccggtatcacggcgaatgatcacggcaaactgcagacggaacgcggactagggttgttggctgatgtctttcgggacccacggcggttggcacgtttgacgggtcaagctgcagtcggccatgtacgttatgccacggctggtaatcatggattggaaaacattcaacccttgggttttaattttagcgactcacagtttgcactcgcacataacggcaatttgacgaacgcggtgacactgcggcgacggttggaacagcatggtgccatttttcatgctagttctgatagtgagattttaatgcatctgattcgacgcagccccgcagcaacgttaacggaacaggttaaggatgctttacgtcaagtccacggaggctttgcttacttactactaacgaatgattgtttgattgccgctttggatcctaacgggttacgaccattagtcgtcggtcagttacccacgggcgggtacgtcgtttgtagtgaaacttgcgcgcttgatacgattggtgcgacgtttgttcaagatgttcagccgggagaattgttaacgatcgatgatcatggtttgacgatcgaccattatacgactgatacacagttggcgatttgttcaatggagtttatctactttgcacgtccagattctgatattcacggcgtcaacgtccattctgcacgtaaacgaatgggtgctcagctcgctgttgaacagcccgtggacgccgacattgttgtcggggtacccaattcatctttatcagcggcgaccggctatgcggaagcgagtggcctgccttacgagatgggattaattaaaaatcaatattcgtcacggacctttattcagccgacccaagcattgcgagaacagggggttcggatgaagctttcagcggtcaaaggtgttgtcgctggtaaacgagtcgtcttaatcgatgattcgattgtacgtggtaccaccagtcggcggatcgtcaaattattgaaagatgcgggtgcaaagtcagttcatttacgaattgcatcgccaccattacgctatccatgtttttacggtatcgatattcaatcgactaatgaattgattgcggctcagcaaacgattcgggagatgtgtcagacgtttggtgcggactcacttggttttctcagtgaacagggcgtcgttgatgcagttggcttgtcgaccaccgaaccgtatggtggactatgcatggcctattttaatggggattatccaacggccctgtatgattaccaagccgagtatgatgcggaaattgcgcaattacaagccaatcatgaaggggtgatcaagtgagcgatgcgtataagcgggctggcgttgatatcaacgctggttacgacgtcttaaagacggtcaaacaaatgagtggcaatcagcaattaggcgcgtttgggggggcgtttccacttagtccggatgcaactgccaacgatcccgtgttagtagcggggacggatggtgtggggactaagctcttagtcgcaatcgctgctgatcaacataccacgattggaattgacttggtcgcaatgtgtgtgaatgatattttggcacaaggcgcgaccccccagttctttttagattacttaggtcttggacatacggatcagaagcgggtcaaagccattttgactggcgttgtcacgggctgtcagcaggcccatacagcgttgattggtggcgagactgcggagatgcccgatatgtatggtcaggaccattacgacctcgctggttttgcggtcggaattgcgaaccgcgcggacctgttatcaccagcaaatgttcgggctggggacgtcttgattgggttgccgtctaatggcctccactcgaatgggtttagtctagttcgtgatattttattcaaacaacacgactaccaattgaccacggtttttgacgaacttggtcatgatttacaaacggaacttttacgaccaacgaccatttacgttgatgcagttcaaccattattacagcagaaattagtgacgagtatcgcccacattaccgggggcggcttgattgagaacgtcgccagagcgttaccggcgggcttgagtgcgcaccttgaattgggtcaatggccggcaccgccgattatgacgttattggccgaactcggtgggctgactgctacggatcttcggtcgacctttaacttgggcttgggaatggttctgatcgttcactccgaccaagtggcagctgtgacggctaatttgacggccaacgctcagtcctattatcgagttggaacagtccaaactggtacgacacccgttgtttttgaggaggctgagcatgcctaataaaattgcagtatttgcttcgggtaatggcaccaactttgttgcactccaccaagcgattattgaacgacaattaccggtagtgattgggttacttgtgtgtgatcaaccgacagcgccggtaattgacaaggcccgggcagctaacgtaccgatattaattgttgattttcatgattatgcgaataaagcggccgcggaagcaatcattttgacggccttgcaagcacggcaaattgaactggtattattggccgggtacatgcgcattattggtccgaccctcttgaatgcgtatgctcataaaatcatcaatattcacccagcattgttaccaaagtttcctggtcgtcacggcatcgaggatgcttttgccgctggtgtgactgagacgggcgttaccattcactatatcgatgccggaatcgataccgggcaaattattgcccagcgggtcgttccggttgcaccagacgatacgctagccagcctggcgacccggattcatgattgtgaacaccaattttatccagatgtattacagacactcattaatgaaggagcaatttaagatgacaaaacgtgcgttgttaagtgtttctgataaacagggattaactgattttgcgaagggcctcgttgcccttgactatgaattgatttcaacgggtgggaccaaaaaggcactggaagcagctgatattccagtcatcggaatcgaagaagtgaccggttttcctgaaatgcttgacggtcgggtcaaaacgctccatcctaaggttcacgccggactattagcacgacgtgacctgccagcgcacatggcgcaactaaaagcagctggtattcaaccgattgacatggtcgtggttaacctgtacccattcaaagcgaccattcaacaaccagacgtcacacaagctgaagctattgaacaaatcgatattggtggtccgtcgatgctgcgttccgcagctaagaactttgccgcggtactgccaattgttgatcctgctgattatgagcagattctggctgatttgcagacggacgcggtcacaccggcactccgtcaacgattagcggccaaagtttttcaacatactgcggcctatgatgccttgattgcccaatatttaacgactgaagaatttccagaaaagttgacccttacttatgataagaagcaggccctgcgttatggtgaaaatagccatcaaaaggctgccttttacgaaaatgctttaccgacgcacttctcgattacgggtgccaagcaaattcatgggaaagagctttcttacaataacatcaaggatgcggatgctgccttgcggatggtcagtgaatatcaacagccggccgtagttgcaatgaagcacatgaatccgtgtggggttggcttgggtacgacgattgaggctgcttgggacaaagcctatgaagccgattcgatttcaatctttgggggaatcattgccttaaatcgaccagtcgatctcgcaacggctgagaagatgcacgcactcttcttggaaattattattgccccgagttttgatgacgatgcctttgctattttggccaagaagaagaatctgcgcttgatgacggttgactttgagcaaacgcacacggccgataagtttgaaacgatttcagtcggtgggggcttactacgtcaggaggtcgacgcggccttcgaaacgccagctgattttaccgtagttaccgtaacccaaccgacacctgcgcagctaaaagcactcgctttcggccaacaagttgtgaagcacgttaagagcaatgcggtcgttgtaactaccgcagatcggacattgggaatcggttctggtcagatgaatcgaatcgattcaactaagattgccattggtaaggcgatgaaacaagctggctacgaaaatgctatcctagcttcggatgcgttcttcccaatggatgattgcgtcgaatatgctgcgcagcacggcattcgtgcaatcgtgcaaccaggtggtagtattcgtgataaggattcgattgccatggccgaccgttatggtattgcgatggtcaccactggtgttcgacacttccggcattaatgaaaggatgggtgcgtgcatggcaaacgtattagtagttggtggtggtggtcgcgaacatgccattgccaaggcaatgatggcaagtccgcaagtcagtaccgtctattgtgcacccggtaatccaggcatgatccgggatggtattcggacactagcgattgacgaaatggactttgcggggttggtcaactttgcacgggccaatacggttaccctgaccttcgtcggacccgaagtaccgctagccacgggcattgttgattactttcaagcagccggcctggctatctttggccccaaccaagttgcggcacagttggaaagttctaaggtatttgcgaaggccttcatgagtcgccatcacattccgacggccgactaccggcaatttcatgaattggattcggcactagcttatagtcatgaacaagcggtgccgcaagttatcaaagtcgatgggctggcagctggtaaaggggtgacggttgcgacgagttatgaacaagccgcggcagcgattaagacggcctttaaaactagttcgacggtcttgatcgaggactacgttgctggctttgagttttcccaaatggttttggttggtggtgagcactatgcgttattaccgaccgcccaagatcataaacggttacaggaccatgaccggggaccgaacacgggtggtatgggggcctattcaccagtaccgcaaatcacgcccgcggttatcgatcaaacgattgcgacaattattgaaccgacgattgcaggtctcaaaaccgatgggttaagctttgaaggggtcatctatgttgggggaatcctgactgcgaccggtgttcaagttattgaatataatttgcgactgggtgatcctgaaacgcagatcttattaccacaactacagagtgatttttatcaagtcatcgtcgacttactgcaacatcggcaaccacacgcgcagtggcaaacgacggcaacttatcttggcgtcgtactagctgctcccggttatccgggaccaactgaagccggtgtaccggttccgacggttgctggtgcggattatgctagcgttgcgggtaccccggatcaattagtcagtgcgggtggccgggtgatgatggttaccgcaagtgccccgagcttggtcgcagcacagcgggctgtttatcaacaaatcgaccaactcagagtcggtaatctagtgtaccgaactgatattggcgttaaggggatgacagcgtcccacgattagcgcttgacattcggtgagcaccattctatgctggaaacattacttaaattcgtcataaaagaataatggttggtgttggcagttaaaggctgacccaaacgttgaaatcgtcctttttaagcagtaggggacgatttttatattggcagaatgcaattaatttggaggctaaacgggcatggaatttggcacattgatgatgatggttaggcaccgtgtacatggttggcaaatggcaatgcggtctcaaaaagggttgcatcggggcacaacaacgttgaatattaacgcggcgggacttaaacggatggaggacgctgcttttatgcatcatattcggaaaccggttgataagtcgcataatctaaattggtggcactttaactttttctgggggctacaaggcatcacccaatccgggataggtttggtgccggcgctcgcgttgaccggtaaaatcagtggcttcaaccatcctgccgttgcgcattttgaattcatgggcaatcaaatcagtggtggaactgtggataaacaaattttgcccgctcccgagctgtgcttggcagaactcaaacggtccgataatgcgcgcgcacttaatcgagtctatcaatcagatacggaaatggtgcatgacttggccgcagcctaccaccagatcatgagtgacttgtatcgagttggtgcgcggacgattcagctgaatcgccagggcctcggcagtcagcaagggtgctcaattactgaacttggcacacaggtaagtcgtgaggccgttcgtgatttacctgccgatctctgcgttgagtggcacgtgacacatgggacctgttactcagcgtagctagtcacagggtggcctgggcagctccgtttgcatagctaagaaaacgatcaaaagggattaatattaaaacgtgcacttacctgagtcagttatcactcaggtaagtgcacgtttttggttgggctggttgcaagttctcgcaccagtagccccgtcatcaattattgaaagtgttaagacaccgttttactttttaccctgcaatgactgccgcttcgggctgacccacgttccggagccaaagcccagaatggttttgagtgcaggaataaacgttgcaacgacggtgataggattgatcatccagtaaaataacatgtagagtggggcgaagaaccagtactttagtttcgcaccatgatggtccaacaggagtgccgctaacagttgcatgaacccggccaatagttcaaaactaacaaagacaaatgacaacatcaagccgtggtagactcgttcaaaattgccggttatcaggaagtaacccatcagaatcaaaaacatcaaggaagtgatgacgaagaaaaaggaccagatgattgacaacgtcgaatcgacgaacattgatagttgatagcgatgaacgattgggtggaaaatgaatttcttaatgttcgttaaccacacttccgtgccaccctgtgcccaacgtttgcgttgatgataaaggtctcggattgtggtggggacgttcatatggaagacgatgttaggggcaaaccgcgggacggcgcccaccatttggtgatcccaggcaatactgatatcttccgtcgcgcgattttgtcgaaagccaccaacgtcaattagaaattgtttgcggtagagggtatttgccccgctatacgcgtacatagagtcgttgatggaagtttgactccgcttgataacaccgacgatactagagaattcaacggtttgagatttacctaaaagcgacgttcgattttgaacatccatattggcggtgacggcggatgtattcatatcgcggtcatggatgaagaaattcatatacttcatcagggcgtccttttctggaatcgtatcagcgtcgttgctgagaatatactcaccctgggcaaagtacatgccaatattgaaggcgtgggccttgcccttgtttttctcaatttcaacggttcgtagccgtggatagacggactgcaaccgttgaataatggcggccgtcttgtcggtcgaaccatcgttcatgactaggacctcgtagttcgtataattgagctgggtaaataagtatgtgatggtttcttcaatcatgacttcttcgttgtgcgccgggatcatgatggtaatcattggttgctgttcagccggaatgtactgccagtcatcatcacgcttattggtcttgataaagcggtaggatagcgcgccggcgaaccagaaaaaagagccaacgatggggtagaggcataaaatcaggagtgcgatgttgattaccgatttaaataaggttgcggcgaatatgtggtcaataaaaatatttgtcatggcgccccctggttaatcgttaatatcgtctaaattattttgttgataaagttgctgaatctgattagtatcgagattttgttctggcttgacccggtagtggcgggtatgttcacgaaattcggcattgccgaaacggtccgccatgaactgagcgagcagttgctgccgttttttctgattaatgggattaaaggttggccactgttcaacgacacgttcacgcttacgattctgtataatggtcatggtcactgcaaaaagggatgcgagtgcaaagcaaaaggctagtaagataccgatgaacttaaattcgaaaagaccttcatggtagtgccagaaacgcggaatgtgtggattataacttgaccaaatggaaaggactgtcacggtgatgggcacaatcactgcgagccaacccacgataccaacgatcgtttggcgaatcttgagtccccaatggccagtgtcaaagtacgcatcagagtatagttgttgccgattaacatcatcagtggttggtttaggcatcgtggttctcctttgtggttgattgctggggattgattggatggccgaataagtagccttggcgaatgctgatttgcagttgctcggcgagctgttcatcggcctcattttcgattcccattagaattagatcaatattgttttccttagagagctgattccagaattggaggttcaggtccagccagacggatgggtcttccttgcgaaatgagcgcattgagcatttgagcgtgtcgatatcttttaaaagccactgaatgtttttaagattggctagacttgcaccgacgttatcgattccaaactgcatgccgtaaccgcgggcttcacgaattcgccgccgaaataggcgtttattgatacgacgtggttggtattgaggtgtgtactcaattgccaagtgcatcggttcgatgttcgcaattgcccagcgaacaaaataacggaattcgggactgatgatttgttcgtattctaaattgattgataacgtaatcgcttcatcaggtagcgccttaaaggtatcttcaagcaggaagatcacccgctgaagtggaagtgagtcaagttgtggtggtaatgaccacgaaccatcagtattttgttgacgcaggagacattcatagccggtagtgcggccacgaaaatcgacttgtttttgaataaagtagcgtagattaaaatcatcattttcaaggtaattgttggaacgtttgcgggagtaccaatagtaagtaccaatcgtcaggatgaagatgaccgcaattgagcctgtcaaccacagtaatcctatttctaattgtgctagactcatctaatataatctccgtaagaaaaacttatggtaacaggaaaggcgactaaccgtcgtagttgacagtgtcaaacattttgacattataggcctaattttgcacagtttcaacaaaaattatctcttgataaatagaaataatttttgattagcgttaatcagtcctgtcttatgaacgaatcgcgcaaccgcacatcaacactgtttagccaactaaaccaccagtgattgacggggttttagtggtcgcttataatcgataatgactttgacggatattttaataagtatagaagagggttatcataaaatgaaaattgttttaacgggttcaatcggtcgtattaaccagaccttggtacctaagctgacccatgctggtcatgaagtgacggtcatcagtcatcaagcaattcgcagtagtttgataaaggtttttcgcgcaacccctgccattggtcgacttgatgacgaagcgtttttgaccaagacgttcatgggcgctgacgtggtatacctcatggtaactggtatagcggcgagtgatgatctttataccgctgccaaacgacaagcggacatctatgccgctgcgatcaaggcagccggcgtaaaacgagtggtgaatctgagtagcgtgggggccgacttgggatcagaagtcggtgcactttacatgtatcatattatcgaacaaacgttaacaaccgctttaccagacgtggacttaacgtttatccgcccaacggcaatgtactataatttactgagcagtgtgccaaccgttaaaaagagtcatcgaatctacacaaatgccaatttggctgttaagaacgtgtgggttgcgccggtcgacgttacaactgtactgattaaggcgctgaccgaaccgacaccggggcaaacggtgacatatgttgcgagtgatgagaaaacttatttggaagttgcttccgtactgtcacaggctcttaaaatgccggatttgcgcgtttcacaagtgcctgatgaggtcatgcaagatcatttagtgactgccggaaccccggtcgcatttgcacgggaatatgttaaaacggtcgcttaccagcgtgaccacgatttttacgcggattatcgagcacatcaacctcgattaggcgatgttaaacttgctgactttgcccaagtctacgctgaagattaccataatcaacaagttcttaaacactagtaggcgttagatgcagccgtgcctactaaaaaacacccctgagttaaacgactcaggggtgttttagactgccatcattgcttagcgaaccatcagttctaagcgacaaatgcaaagtagagaatgaagacgaccatcatcgtccacatgagggcgtttacttcacgccaacggcctttgaccgtcatggtgattgggtagaagataaagccaacggccaaaccttctgagatactgtaagttagtagcatcataatcatggtgaaaaaggctgggacggcgatttcaaacttggtccaatcaatatattgaacgtttgataacattaaaataccaacgataatcagggctgaagcggtcaccgcggacgtaatcaccgtcaaaattggagagaaaaaggcggcgatggcaaacaagagggcaacgaagacggaagataacccagtacgggcccccacggcaacgccggaagtcgattcaacataagccgtcgtcggtgacgtgccaaagactgctcctaaagttgtggcgagtgcaccactaaagagcgctttaccaacgcctttgacttcgccggattctttgtccaccatgccggcttcggttgccaccccaaccaaggttcccgacgtatcgaaaaggccaatgatgaagaacgtcaggatgacaatgatcatttgaaacgaattaatattaccaaggtgtgtcacagcttgaccaaaaatcggttgaacgctcggaaccccactgataatcccagttggtaggggaataataccgaagatcattccgactgcggcggtgatgaacatgccccagaaaataccaccagttacattagcggtgactagcatgatgccgacgataatcccgaaaatcgccaacaaaacggtgggactgtgcaagttacccagggcgaccgcgttggacttattcgcaacgataatcccagaggtttgtagtcctgaaaaagcaatgaacaagccaattccggcagatacggcgtattttagcgcacttggaatcaagttgatcagtttatcgcgtaacttggagagcgttagtaggatgaaaagaattccggcaacaaagactcccgccaaagcggtttgccaaggaatgtgccattcctggacaactgtataagtaaagaaggcattcagccccatccccggtgctaatgctacgggaaagttggcaactagccccatcaagagacaaccaacaatggccgctaaaatcgttgcggtgaagacggcggtcttactcataccagtacttcccaatagttcgggatttacggctaaaatatatgacatggctaaaaaggtcgtcagaccaccaatcaactcgcggcggactgaagtgcggttttcacgcaaatgaaataattgttctagaataatgacccactcctaaaattaataaaaaactaacaattcaacaattgtctagggactgtctgaaaactaaaaattcaggtataatctgaggaaaaacgaatcgaggcattccgatgacaacacctaaacgatacgaactggaagatgctcagtgggacc

SEQ ID NO: 16 - DNA, 60464 bp, synthetic construct
  source 1..60464: mol_type = other DNA; note = Lactobacillus plantarum PDA6 - Contig 16
gctggttaatcgcaatttcgaggtggtgacgaaaaacttcgtccaaatcttgcttttgggctagtgcagcgataatttctgtggtaagttcattcatggggaatgcctcctgtgatgttttctgtgattactaaatatcataagggaaggcattccctatttctatacaattcagaaatcttttatgcatttacacaagatattttacgctctcctctaatttaaaactatcataaagataaccatgaagcagacgagaaattaacctactgaattgccaaagcaagtgcaaccttataaaaatgtggttgatgttgaagtatcaccatgaattgctgaaaaattcgggtagtttaatcatatggaagattgttaggacagcaataaaggaacgactgaagaattgaataaacgtcagccaggaaagttgaaaaaggaattcctagaagaatagtgcaaaggattataaacaaatggagattgcatagtgagcagttatagccaagcaaaaattttaatacatgaaaacaaagatttagtagatcattttggtggggcgtcaagtgaattaatagcaatgggagaaacaaaactaggtgtacagtttccgtctgattataggaagttcttattggaatatggcgccttaacattcggtgcggctgaaatctatggtgtttttactgaggattttgaaaattcaggagttcccgatgcagtttgggcaactttggatgaacgtagggtggtaaagatgcccacaaacttagtgatgatttataatacagagatgggtgaaattctttgtttaaattatagagaattaaatacaaatcaagagcctaaaattacttcctagttttccaggatttgctgaaagcgttcaaaaaaatgaagtcttatataatagttttggtgattttttgctagatatagtagaaggagaattagagtaaaaaaacaaactgcgataaaggtccggatatacgttaatctggatggtcagttatagccatgatggtggaaaatatgacacaggaactagtgttgttattggtcagtagccttgctggttagtctaatttactatggctgattaatttagattaagcatcatgcgaataggcaatatcaattaatcagataaaccaaccgatattcgacgaaaaccatttgccggatatcggttggtttttagaatattgatgaacctagcatattctaaatattaggacgattacaggtagtaatatagtaattaatgtagtgactaaattaggtgtagaggtgggcccaatgatgttgctatcaggaagaatactgaatgatcccgaacatgttataaatttgctaagttaacaaaggtgcgaatgttttggcaactgttaagaaagttatgaggaaggtcactgggtaaaaagatgttcaatcaactaaatatgacgatgaactgtgcggctaggaacttagttaaacgcaagtcatcgaagatttattattagaggccaaacaactttgaggtctaactaaacacacgacaaataaaggaacttattatgaatttaataacgttaaaagatttgagagcaaaaaggttaacctataattgggaaacaatttatgttggcatggaaatggcgtattttaccattcaagctatttcagattatgctgttgaactaatggaaggcggaattaatgatgaatttatcaatcaattggcatggggagttgaagacggggactcatcacgaatattgattgaaataaagtgtcattttaacttagtatctgaaaaaaacaatgatgagtataaactagagaatagaaaacttaggtttgtctatctgtccaagctcaatgatgaagtaactgatgacaagaaattattggatgaaattgaaaaattttatgacaaccagggctatcctgaagatatgaatacttttattggatatatgcctcaagattcatacacaaattgtaagatcttaattctaaggttccatgagtttttaaatttagagggtgaacaattacgattgatttaaatgattaagcagtatgatcaattgatttgcctactgaagtatagggtcgaggttaattatttatcttgattatcctgaggaaagagaattgatggatgtattcgacgactggattgcatagaaaatcaaaaagaattaagaaagtgtgcatcacaaaattagcttcggtaactaattttgtgatgtgtttttaaattactctgaaatcaaggcatgtttttgataacgacacagttaatgataggcatctttccaaactaacctccaaatacgtttaatccccttaaaaatcaggtttaaatattttatcctaaccaccacgtctagctataatcaaactagactagtataatgaaaaattacttgaaacggctagtcagcttaactgactaattcggattagttttaagtgatcataacaatttgggggaagcttatgacaaaaattgcgtgtgtgattgtgacttttaatcgtaaagcgctacttgcggaggctattgagagtgtcttgacgcagccggaagcgccagaatatgtcttcgtcatcgataacgcatcgacggatgggacggaggcgtttattcagcaacaatttgactttgatgatcaacacttggtttacgttcgttgtcagcaaaatcttggtggttccgctggttttgcaactggaatccggctagcattgcagactgactgtgattggatctcgatttctgatgatgatgcgatttttcagaccggctactttgcggcgatgcggcgagcgattgtgactcagccgcaacaaggcgtattttcaggatcggtgttattaccaaatggacaccatgatgcgatgcatcgtgaaatgattaccaattcgcaaacactgacggttaagcccatagccgaagccgactatgcgcaggactttaagtatgatattttttcgtttgtgggtatcttaatgagtcgcggcattgttgaacgaattgggctacctgaacaggattactttattcggtttgatgactttgaatatgcgctccgggctcgcaagtatggtcagtttctaaatgtccacgacgcgttggtcctacacaaaacgacgtatactcgtactgctatagcgccgtggaaggaatattacgtgatgcgtaatcggctggcatcattattcaaacaccgtgggcaaactcgggttacctgctggtatacccgtcgctttttagcgcgcaaattattcgccatcttgctttttcgggatagatggggccaagcggggccactgataaaagcgtatgttcaaggttaccgtgatggttggcatgaccggcttgggcgcaatcaagattatttaccataaaggacgttaggctaagacaaggagtggacaaacatgcaatatggggcgattgtggtaactttcaaccgcaaacaattactaatcgaatcaattacggcactactgaatcagacggtcccacccgcgaaaattattattattgataatcattcgacggatgggacaaaagctgaattacaaacagctgatattttggctaatccaagtgttgattaccggtatttgaccaaaaatatcggtggtgctgggggctttgctcgggggatgcagattgcggcggcagatccgaacttggattgggtttcaatgtccgatgatgatgcaatttttgagccagactattttgaaaaactaattgcttatcagcaaaatcatccaaatcgccaaatcttgacggggagtgtgtatattgaggatggccgtttgcaagcggatcagcggaaccggttcaccaattggagtacctttcaagcgcaggcggtccctgaaagtgaatatcgcggtaattttgagtttgaccagtacactttctgcggtgttttcatgagtgtggctgtgatcaagcaagtgggagtggcggacgctggctactttatctggtgggatgactgtgagtacgcggtacggacggccaagctgagtcgaccggtcaatgtgagtgcggctaaattaattcacaagacggctttaccttccctggacttcaagtctaaattcgtacccgattggcgtctctattacgggcagcgcaatcgcttgattacgattaagcggtggcgtgcaaactcattggtcagtctcggatggttgcttggattctacgcccgattggccattaaactctgtggaccgttttatcgtggctatcgcaaaatggttatcagagtttacttggaggcgttacgtgatgcgagtcgcgagcgtgagggcttgaatcccaacttcatgccgggacagaagttttagtgtgggcctgatcggtgaactgtctgatgacatgggaaccgtatacaggcgaaaccagtgattattgcaatttaaggtcagattactaaaccaggccgactcaattttggacatcagcttcatcattattaacaacgaattaaaagctagttgtgctgagaaaaaacttcttggcacaactagttttgtgttttggtgacattttagacggaaaagcaaaatttaatttttagatttattttgtaattcgaatggataattttactgtttttacagcaacgtttattggtcttttgaccagtgaccaccagcaagcattcagatgattgcttgtatttagccgcaatggttgaaaccggtaatcataatattatttgttatttagatagtaaacttaatttagcaagccccaatatttgattaaaacccattatatccgtatgttgagcgattgtttatcacgtaatgtttgttataattcaccaagaacaagttaattttgggggaattcacatgaacgaacaatacgattatttggtagttggtgcgggactatttggtgccgtctttgctcatgaagcagccttgcgcggtaaacgggtcaaagtgattgaaaagcgcgaccacattgctggtaatatctacactaaggaagtggcggggattcaagtccaccaatacggggctcatatcttccacacttcggatcgtgaaatttgggattacgttaatcaatttgcggaatttaaccgttatacgaatagcccagtcgctaattacaagggccacatgtacaacttgccgttcaacatgaatacgttcagtgaactctggggcgttcggacaccggcagaagcagccgctaagattgcggaacaacgcgcggcggcgaatctcggtgatcaccaaccacgcaacttggaggaacaagcaattgcgttgattgggaccgatatttacgaaaagctgatcaagggttatacggaaaagcagtggggacaaaaggctacggacttaccagcgttcattattcggcggttaccggtacgctacacttacgataacaattactttaacgatacttatcaaggtattcccatcggtggttatacgcagatcgttgagaagatgttagctcatcctgaaattaccgtggaaacgaacaccgacttctttgcgcataaggctgagtatcttgcccaatacccgaaagtcgtctttaccgggatgattgaccaattctttgactatcagttaggggaattagcctaccgttcactacgttttgagactgaaaccgtgcccgtggataattatcaaggtaatgccgtagtcaattacactgatgctgagacgccgtatacccgggttatcgaacacaaacactttgagttcggtaagggcgatgcggatcaaactgtgattacgcgtgaatttccagcgaactggcagcggggtgacgagccgtattatccggtcaataatcaaaccaacaatacgctctacaaacagtatgcgaagctcgccgcagctgaaccgcaagtcatctttggtggtcgactaggccagtatcgctactatgacatgcaccaagtgattcacgcggccttagtgacagtcgcgtcggaatttgcaacgaccaaataaaagaatgtgtgatgattgaagatgagaaaacggctagcaattgtgtgggggagcctagcattgctcgcactattattgggatatgcttgctacgccctgagtattcagcgcggtcaagacacggtcacgcggatttatcaaactgatcaaaatgggacgccgattatttcacccggaccaattaccttagtaggtaaggtcaatcaccgcaatttatttcagtctggcattaacggctatgtcttaacgaatcgcgatccattggcgactttgttgccgcgccgtaatcaaacagtgcatctaaagtatcgttctgcacagacgacggtggagctacgcaagacgctacgtcaagcacggtatttacaggccggtactcagaataccgccacgccggtctttcaaaatcgacagcagcgtggtgatgcgacaacgtacggtcgtatcagtaccagccaagacggccggatatggacgaaactaccaattagttatccgcacgtgcaattgtcgcggccgagtgtctggtacgcgaatggacgcttgacgttgatagatgggcaagaccgttactggacgactaattttaaagattggcaacatcaacggttgaactttaacggggctgattttaagcaaggtcgggttcaggccgtctttccaggtacgactcgttcagcggttgttgtggtttgatcgccaaagcagtcgcgccaaactctattatggacagctcacgaagactggacgggtcaaagcttggcacgcgttacaactaggaaagctcccagcgcgccaagttgctggaatgagcttgattgatcaacacttatacctgtttcgtcagcgcggtacgcagttggccgtttatcgtgccaatcggttgacgcgtccggtcaggttggttggtcgcgttaagctaaatcatgcgcagtcacaacgagtgaccgcggtgaatttgataccgaccaccaagcatcgctaccggttaatatttgacttgacgacagctgaaaaggttcagaaacagccacgttatcggttgcttgatcggcgatttaaagcagtggggcagcagcatctattggtcactgattatctctggagccaatttcaaattagtctacgtgggagtgagtgaggcatatgaaggtacagccaaaggaacgctttattttagcgtggcggtggttgccgctcgaattgctgatcattatgctaagcgtcggccttggatgggcgggcaatcgatggctacctaagccggtgtatcaagcatctgttgatattcggattgcgcaaacgccacgttcagggctgtcaacagcccgtctaaaacgtcagcgacgccaggatatcaaagctatcacgcagttcaacgtgatgccacaccagagtgcagtgctgactcgagccagcacttatgcctatgcgcattatggcatttggcaaccgattcaggaactgagtgagtcggtccaagcggcaccagttgcgcggcgaccggtcttgcgagtgacagcaacgagtagttcacggcaagtggcccagcagaatgttcaggcgttcaatgtggcgattaaagctaatctgacgggcttaaaaaattatcgagtgaagacagttaaacgtaccgtaacgcgtgagacgaacgtgatccgcggggcgctttggaagttaatattagttgttgggggcggcttagcgttgctgagtccgtacctcgtgaaatatggtcagggttgggggcggcacgatgatgagacgtaggggagcaagtatacagcagcaccgtaatgcgctctatctgattatctttggaatctacttagcctcagtcacactacagacgacgacctttaacgagatgataccgcatcgagtgggcgttttgattgaattagcgactttggccgcattactgggcctcgtggtttgcttagataccttgacccccggccaaattattggagaagtcagtttacttgtactggtgactgtcgtgacgctcacatcgggtgcgcattatttgatgccgacaatcatgttggtgattgcagcccgggaagtttcgtttcggcagatcattcaagtttatttgggcgtcgtggggacgattctcttgttagcgctagttgctgcggaagtcggactgattaaaaatattacgtttgcaactgccgatgggttacgtcagtcgtttggtgtcgtgtataccactgattttgcggcccatattttccatctgtgtgcggcgtatttgtatttattggcccgtcgttttcgattagtagcgctattacctgtgttgtttggcttggcaatgatttaccagtttacgaaaacgatgacggatgtgattgctttactcgttttgatcagcttgtacttggtctatatctatcgccgtcagcttcggtggcttcggccgatgattcggtatagctttttgatgttaccacttgctagtgggctaattattgggttgtcgaatatttttaattatcaagaccggttgctggtagcgctcaataataccttgtccacgcgactcgcgctaggaaataacgcgttattagcatatggcgttaaattattcggccaagccccgattccaattaatggttggggcggcgatcggtttgaaacgtttaccaatggtgttggtgatgcaacgtatttcttcattgactcgtcattcttaaatatgttgatttcatacggattactattaacgctgattataattatcggtatgacctggtttttgtatcaacgtacgcggcaacacgattatttgttgccggtaatctttgtggccattgccatcagtagtatgtttgatcagcacttcttagaagtaacgtataacgtctttattctgatgttattcgctgatttaccaaattatcaaacggcagtcggccccgcatttgaccaacctgtcgttattcgaaggggggcgtcgtgccgatgaatcatcaacaggcttatcgggtccagcggttgatcctgatcatcgccctgatgttaattctattcggtgataccgggatgaacgcggtatttagttttagccaccaaccacaaagtatctggttctatccgcagctcgtcattgcattgatgacggcagcaggtcccaacttattattaatggccctgggtgcctatcaattgcgacgcgcggcgttaccagtatcgcagttgattcgccgagtcttatggataatgggtggaattaccttattctcactggccttctatcttgaagacttggtgacgcaaggcagtttaactagttttaacatcgctggcttttttaccgcgttagcccaagcgccggtgggcttttatgatattttatatgaactattgggcttctttgtcaccttgccgttgttaagggtgattgcacaccatgcgagtgttgcgattcagcaatacctattttgggcggagctcgtatttattggcatggtaccaatcttggcctatttcactggcttgacgacgatcagtgttaatccgccgctcgcgattacggccggttgcttttttgcattgatggggtattggttgagccaaacggaggtgttacaccggattacgcgagaacacctcttagtggcgtggctgctgacatgtgggtgctatgccgtgatggtgtcggtcacgatgtatcaagtgaatctggaaaagaattttgaccttatcagcagccagccatttgcccaaacctttcaggcaattccatgtttgacgctgtgggtgacgattgccacctggatgatgaaccggccacggtccaaagcagtacgccggcataactttgttcaaacgggttatggtgatatgctggtggccggtctactgattacaccatttatggtcattaatcggttgctgacaccaattattggcgcgtggtggtctggttggctctggagtattgcggtgctgatcgttagtgttgaactagtatggttattacgacatgtccgctggttgcaacggatattaccagatttatttggtggctcccagttaataggaggctcagttaatgcgcaaaagaattgagtggatcgatattgcaaagggaatcgcaattttagcggtcgtggttggtcataccttgggcccctataacgggcaattcttcggtagtttgatcttcgcctttcacatgccgattttcttcatgttgagcggttatttgtatcactcacgcccggcacgacaagaatgtcagcgtggcatcattaacctattactaccgtatctcgcaacggcagttgtgctcttagtcgtaagtgcgatagcccgattattaccgaatccgctccttaatgcgtattttccaagctggcgacaaggactaattgccacggcatacggggccggttcggcagtgttcaatccgtggcactggcaagttcaaccgattggggccgtgtggttcttgctcagtatgtttattgcgctgcaactgttcaatggtgtgatgctactaacggcccgacgtcatcagcgctggcgtcaggccattgtacggggcggggtgttcgctattttcgcaatcttaggtggttggctcggtcaagtcgcttatttaccgtgggccgttaacgccgcgttgttagcacagctctttttatatgctggctacctcgttaaacaaacagccctgctaagtcggatatcatcagcttggtatttattattcacgttcatgtggttagtgagtgctttccagggttattttgcgttgacagttccaacatcgcctaatctgttgattagcgtcatggggggcgttgctggcagtttgtgtatcattcgcgtcagtgactggcttagtcattatccgaatgcgcggccgattaagtggttaaaacgctacggtcagttatcgctagtggttctgtgttttcatttgatcgatctaaacgtgattggcattgaaggatggttgacgaatcatttgattacccatatgggaccactcgtgacgacgatcatcgcaatcagttaccgaattggcttcgtgacggttgccatgctggcaattccgcatcttccgggaattcgagcttgttttttacctcggcagtatctatttcgccggctacaacgtcgttaaattactgtgtataatccggcaaatgccgagataattaattgacctaacagtcacgtgcaaatacttgcattattaaatgatggaaaatttatcatgacttgaagcacaaatttcataccagagggggactggcaaatgaaagtacaaatttatgtagcggctcataagccgtatcaaatgccacaggatccaacttaccgacctatttttgttggtgctgcgatccatgggggtgcaccacaaaattatcaacctgatgacgtcggtgacaacatttcggcaagcaacccgaactttaacgagctaacggcgatgtactggatctggaagaactgccatgcggatgttaagggcttgaatcaatatcgacgctacttgtctgaggcacccaaacgtaaattagccggtattttatcaatgaccgaaattgaaagtttattgcagcaatatgatgtcatcgtaccaaaaaagcgccattattatattgaatcgaattattcacattacgttcacgcacatcatcgggaaccactggacatgatgcgaacggttattagtgaacgtcatgccgcctatttagatgattttgatcagttgatgcatcaaacgtcggcgcatatgtttaacatgatgattatggcgggtcctaagtttgacgactatgccaaatgggtctttgatattctgtttgctgtgcgtgaccggatcgatattgcggattacgatgtccaagaagctcgcgttttcgggtacttatctgagttcctattggacgtgtggatcaaccacaaccaacttaagtacgtggaagtcccggtaatgtacatggaaaagcaacagttaccggcgaaagcgtataatctgttgaaacgtaagttcttcccacaagctgctaaacggactcatttttagggcgcctgcgattaattagaatattgaagtggtaagtgggagtcagtcgctgatgaatgatgcggcatgcaaattaatgagataacaacttaatagtttaaaaatgcgccactcactagacgatgatcggactagtgagtggcgcattttaagtctgttgtatgaattagtaatcaaacgtagggttattacatccgggttcgcaatttcgcagcattagtcagtactggcggctgaagcaggaacaatagtccgatgtagatcagggcaccgatgccaatctgtaaggccagattgaggtaagaagcggtcatattgatattcaaggcgtaaatgacgacgaacatgatcacaccggcgagcacgtacttcagactagccgtaaataattgtctggtcgctaacgtatgtcgagtcacgactaactggtaaccagtgacacacacttcggaaatgagcgtggcgcacatggcaccggccacgccccagaaccaaataagtgggatgttgcaagcgatgttgacgagggccccgatagtgacggaaatcgtataggtcttagtctgcttagtcggtagcagaaactgctgaccaagcacgttgctcatcccaattaggatgatgacgggtgcctcaatcatcaacagtcggtcgactgccccaaatgcccgtccaaaaaataggggtgcgagcgtcgttgcgaccgctgccacgccgagggccatcggaatcgcaatcgcgagcacaaagtcaaaggacatgtataagtattgtttaacgcgttcaagttgctgcttcatgaagaggttggcaatgtggggcaacatgactgttccagtcgctgtcacgagcgctaaaacgagcttgatcaacttgtcggagtaatcataaaatccggcggcggttagcgaatccatttgccataacatggtcttattcaaggcaaggtaaaccgtcgtggcgatttgtggcacgaataacgctaatgagggccgcagatgccgaaagagattcaattgacgccagttgggccgttcgacactatgtcgtaagtatggccacagtgtcagattgcccaaaacttgtgagcccgctaaaatcaaaatgtagattccggtgtcttgccgagtcttcacgaatacgaaaatcgcaattacagaagcaatcttgacgagcatgttacggagtacggttttcttgaaatcttcgagacccataaagtaccaggaaatatcaacagcacccgcaataatataaaatgattgatagaaaaaataaatttgcaattggtgctcaaaaaaaagaaaaactaaaaaggcgagataagcacaactgatggtcaataactgtaatatttcaatttcccaaaaagtttgtgagcgttgcccccgattatcgcgaataaaggcaatttcgcgattaccataaattgtaataccgaccgttccgaacaatagaaagtaagtaatgatcgaattggtcgttgcattgataccgacgccggtcggccctaagacccgtgagatatacgggacggttaggaggggcgttagtaaaattaagaggttataccccgctgtataaaagtaattccttatgattcgcatgagtggctccttgtggcagttaagcagtctaacgttgaatttctcaacattcaattcattgtatcacagccaattagccggttgatagtggttttaactggctagggttggttattaacaaacttattattttataaattagaaagtatttttattgttaattaactgaggagcgacatagttatatcaacgataattaaattgggagaatagcttaatatttggagaatcccagtgagttgtgttcgtgcacactatgattagggactgaaaaatttggccggtagggtcgaggaatcaatgatgattgcaggagcggggagataactttgatggtatggcgagcgaatggtgcgtggtgtgttcaaatcaatgggttacaaaaacgcgcaaccaaatttccccttgagtttggttgcgcattttgttttgatgtttaataagcgccattaggcttgaacataatgaccacggtcttgaacagaatgtagacatcaaatgcgacactccgtttagaaatgtaagttaagtctaacttgaccatttcatcaaaaccgacactgttacgaacggttgcttgccataaaccggtacaacctggcttgacggctaaccgttgtttgtcatagtcggaatattcttcgacttctcgtggcaatggcggccggggtccaactaagctcatcgagccttgaaggacgtttagcaattgtggtagttcatcaatgctatatttacggatgaatcgcccaatcttagttacgcggggatcatcctgcattttgaacatggcaccatcaatctcgttatctttaagtaatttttccaacaattcatcggcgttggaaaccatcgagcgaaatttatacatcttgaatgggacttcgccacgacctaaccgtgtctgcgagtagaagacggcgcctttaggatcttcaactttaatcgcaattgcaattaaagttgaagagtggtgataagatgatgaggcctaagaggctagcaacaaagtcaaacacgcgtttaatgaaccgataaccataacgacgatgctgacgcccggcgtcaatcgtaatcggtctgatttctcgttccttcaattccataagtaacaccctatgcttcctttaaatattttcccccgtaaatcacagtcagattaatctattactagtgttcgggttaccgcaaactgactatgtatgtactgtattgatacaacctaatgattatagtacaaaatagctatcaagtaaacatacttgatatgattaactttgcggtatcgtttaagtttattatagcaaacattgtgttagagtaaactagtatttaagtcataattgtcggatggttagttttaactaatttgactagctacaatttggctaactataatttaccagcattttatcaagatgcaattattagtagcctgaaacgcgataataatgactaaataaaacgcgtggtaaaattagttaatgaacagaatgatgctaggctcagtagttcaagtttctcacattctccctaggttttccccgccgttcacggtacaattagacaagagctcaaattcaagtgaaaaggatgtccgacatgaatgacgattggatcacggttttccccgcggattataataattcgtaccacttaattttgaaacgggggacggcccactttgcgtactactactttaaggtcgataagttagatcagcgggtcattttctatgatgatattgagcgtagcggcatttcaatcaaaacccaaattacgcggacatttatgcgagcactcgtcaaagcgattgattggcatccggtcggtaatagcattattatcgagatttatccagttgatcgcaatgagactagggcaatccggctttcttgtgatatctagtgccgaacgtggtgccataagctaactgaatataataaagaatccccggtcagcaattgaccggggattcttgtaatagcaggtaacgcggattaagcctttggtgcggtgataattggtgtttcgatggtttcgacgtacttggcggcgagtggttcggcaacgaggttctcgccgtccttaacgaacagcttcgtggctgctagatccgccatggctttgctaacgacatccttactcaagttatcgttggcgtagtgtaacttcaagtggtgaaccttgttagtactagttttaaagcttaagtctaaagttttcatgggcgtttcctcctatattatgagtgtgttaagcgacgggttgtggatcgtagcggtaagcgttgaccaagttagcggccatgaattgatcgcccgtcaagacttcgacgatcttaccaaaagcagcgagttgttcgtcagtcgcgtcttgggcgatgccgttaaacgtttgtttacgttgttcgtccaattccgttgtcgtttgaaccgtcagggtagcttttaaccaagttttagtcatgatgagttcctcctcgaattttgtggtggtaggctggccagcttacattaatacagacggctgagccagtcgatttgtgcaccgtttgattaaacttttttgactggtgagtgtttagtcggcaaactcggtgacagtttggacagtaatactgataatcgtgtcagcaaatagtggcctgaggacggccattagagtggcaagatcagcgtccgttagctcccgaccagcggaccagtgttgatgcacctgatgttgtttgatgtcagttgttgtaataatgaggtgagtgttcatccaattatgcatatggggctcctttcgtattgagcaaatgtcggttttagtattagttacgggcttgttgctgatagagttggtgagctttagtgagcaagcgggttcgccagttatagacggtccgacgactgacttgatgacggtgcatgatgcttgcaaccgactgttcttccagaaaaaattcagtaaggtaaatgcgttcacccggacgacattgtgctaagagttccgttaataatgcggctaattgccaatggatctcttgatcagccatcgggtcaatggcgatgggcagggcgtgttccagcttgacctgcgattgtgtccgcaaagtttggttacgcaaatagtcaacggttcgccacttgatgcgccgaaaagcaaatttgcgaaagtctgccaagttggcaggcagttcaggctcatagttctgataggcggctagccaggtcaaggtaacgcaatcctcaaattgcgggtgatatttggtcacgtgtgcggccttcaaagcaccatacaacaggcgttggtgttccggatgtgcgagtaggtcaaaggcggcttgattatcaaaacggtcagcgtgcattgaaataacctcattttatcgttaattaccttggccaaggttgattctagtgtagtgagtggtcagtaatggtgcaggtggtgaaaacggactgaaaagtgacgatttgttttcattattaatgttccggttagatttgagcaattcaatgaccaagtgctttcctagattgtatgtaattgttatgatgtgattaatctaattaaccgcgaacgggcgggggcgttcagccggtgaatgttagagaaaatacttatctctagggggctttaccacctatgacccaaaatattgacgatccgcatcacgttaactctttttggcatctcgaatctggtacttgggacacccgacagccacagcgattattaccaatagcgacgcgttcagatattgatataatcgacgtgctggagacaatttttctgcttgacattaaacacttggcatgcgccgagaataccttgatttttgaccgtcaacgaggactgattaagactaagctgacaacgcgacaaatcatgatgacttatgcagtccaactaggcttttctgggacccaactaattaaacggctggctagtcagttaggactatcgatgcataaactaccggtgattcatggtgctgccatcttgatgccgctaggaacggccaaacggggaacgactagttggtataatcgacattatttggcgcatatcgaagatcaaggctttatgactgctttgatttatgacggtcccatcacggttcgcgtcgatgcgagcaagcggatcgttactcgtcaattggctaaggcggggcaactgcaactagcagtccaggaacaccatcgccgccgcgcagtcccaaatcagtcatcaccgaccgtattggatgcggatcaagcgatgatgcagtcatacaccgatcaggtcttaaaacattatggaattttagcactgcctggggaaattagttggttgacccggcagtttttcggtaaactataatcgtgatgattaaatgagaggagggggatgtccgtgacgaagaaagtgacgaaaatcgtagcccagaaacgtgcggggcgctacaacatatacttagacgagcagtatgcttttccaatcagtgagtcagtgatgatcaagttccgtgttttcaagggcatggaagttgatgaacaactacaagcgacaatgattgcggctgacgatgtatccaaggcttatacgcgcgcattagattatttatcacatcaactgcggacggagaaggaagtccatgacaagctgcgggatgaagagatcgacgaaacggtgattgacgcgacgatgcaacaattacgcgagttacggttattgaatgatcaacagtatgccgatgcctttgtgcggacggccaaacggaccagtgacaaggggccacgggtgattcggcagaaattacgacaaaagggtgtgggcgagcagctgattgatgacgcgctggccgggcagtttagtcctgaagaacaagttgataacgccggtgaactagcgcgcaagttggctaaacgttatcaccggcaagccttcaagacaatgcaacaaaaagttcgtcaagggatgatgacgaaggggtttgacaatgatacgatcacggcggcgattgctagtttggaattgcaaccggatgaagatgaacagtgggccgcccttgtgacgcagggccagaagttgtggcaacgcaatcgcaagtatgcgtttcgtgaacgcatgatgcgcacgaaacgcagcctgtttcaaaagggcttcatgatggacgatatcaatcgatttatcgacgaacaagttgctgatgaatgaaaaggttgaattacctgcccgcacgccataaaaatctggtataatgtttaatgaaattcgatgaaaatttaccctcattttagaaagttgggttaatatggcgcgcgaggctaagggacctaaggaaggcgacttcattacgattaaaagctataagcacgacggaagtttacatcgaacttggcgcgatacaatggtactcaaaacaagcgagaacgtactaattggttgtaacgatcacacactagtcaccgaggatgatggtcgccggtgggtgacgcgggaacctgcaatcgtttattttcataagcattattggtttaatatcgtggcgatgattcgcgataacggcgtttcatactattgcaacttagcatcaccatacgtgttagataaagaggctttgaagtacatcgactatgatttggatgtcaaagtctttcccgatggtgagcggcggttgttggatgttgatgagtacgaagaacacggtgcccaatggcgttattcggctgatactgatcgcattttaaaagcaaatgtgaaagtcttagttgattggatcaaaaacaaaaaaggcccgttttcacaagactacattgatatctggtatagtcgctatcaagaattatcacgtcggcaatagctctgctgacggtctgtcagcggcgtaattaaagtacaaagggagtgaactccgtgctggggtgctcccttttgtgttctggttgcgtctcgacattgaataataagaggtgattaccagccgtcatggttgacacaagtcatgataattaggacaataaaaaacgacccacaagtcgcctctgtgggtcgggtgaaaataggaattacacttttaagcgccaaagttgactggtcgtgaatagccaaccgcgtgccaccacggaacgtagattttttcatttttgacaccattgtcctgagcgtcaatcatctttccaccaccaacataaataccgacgtgtgatatcgaacctgtgccactaccaaagaagactaaatcgcctttttgggcgcgctgtttggaaattttgggatattgtcggtactgagcttgtgccacgcgtggtaaggttttctgcgcagcttgctggaagacatacttagtgtaaccggaacagtcgaacgtgttcggaccgaccgcaccatagacatagcgatggtcaagtttggatttggccacgttatagaggttggtgaaagatctggtgctcttcttgagggagccggtcttgacccagccacgaacacgggtattagcactcgttacaaaataataattagccgtggtattattagctaagcgaatttgccattgttgggtgacaaaccaagtggtattaccatattgtcgaagcgttccccgactctggattttaagattatttgcggcaccactcatgttatagaagccgccctgagtattcttcgtcaggtaggcgcttttagtaagattagtggttttaatgacgcgattcgttgagctggcatcgacgtttggtgcttgccaaagctccaccgtgaggcctaaaatagcaacaatcagtgtgataagacgttgtttcatatgtatttcctccccgaaaatccccatgtccatctcattcaataacgctgaccccatcataagcgctcattgtaacaaagttgttgcaaatgagttgcggttcgattaagtaatgtcaacagcttgagtggattaacaataattgattagatcttgaccgataggagtgacgaacttggcttttttgaagattgataacggtgaattacttaagaatattcggcaatttgccaagaagaatggactgaccttagcggaagtggcgaccttagcaggcttaagtgcgagtgctatctatagttggaaaaagcacacgccgtcagtcggtacgcttaaggaagttgctcaagtgctcggtacgagttataccaaattggttggtaaggataaagaaccgacagctaaggcgatcaatgccgctgctgttgatcttaaaaaagtgattgaaaacaagaaaaaccaatttgaatacgacggtcagccgattactaatgaacagatgaaaattatcagaaacgtcttgaagtcgatgttcaagaccccgcgactttaattttaagtaaaactcggttcttttaggtgcaactgggacctgcttagtgtaaaatattgctcagttacttgaataattgctagcagcgcttgacgggcttgaatggatggtgcacaatggcaacaattatggaacggattgggagatgggcgtatgaaaaaagttactaccgcattagcaaaaaagaatatcaaccagttgttaacgattgttaatcaaggccacgataccattgaggtggaaaatcccagcacccaagattcagcggtaatggttagtatgaaagactggttgcagattgtcagccaattagccaaaacgaatcatcatgacatggaattcagttaaataataacaaagaactaatcgtgccagtcaaggttcgcttagtccaataagctaaaggcaccaccgacataatcatgtcggtggtgcctttttgaaagtgttagttcgttgacatttgagtgctgattagtcggtctgactttcagcgtacttggttttgatataatcagctgaaacttgtaattttttcaattcttcgtctgtgagatccaattgaacttgttcgacgatcccgtcacgaccaacgacggctggatatgaaaggtatacgccgtattcttcccggaaatttgaaacggggagttcggtgagggcgtcattcaagaccgtgttggctaagcgcaccgcggccgttgtcacgccataactcgtatattttttgccatggaagacccggaagccaccgtcgcgtgattcggcgtctagtttggtcaaatctaaaccgcggtcagcggctaatttggtaattggttgacctaacacgcgtaccgttgaccaagctgtaaattgagaattgccgtgttcacccaggttgtagccggccacggaccgtgaatccaggtgtagtgcactggcgaccgctcgtttcattcgtgcagagtccagtagtgttcctgtcccaatcacgtgattctttggcaacccggtaaccgcttggtagatcgatgtgatgacgtccacgggattagtaatgacgactagaattccgttgaaaccactggctttgattttagcagcgacgtctttgacttgtgtgctggtaaagggtaattctaggaagcggtcattagttggtgaatcttgtaacttaatattcccgatagctgagataatgacatcggcatcaatgaggctgctataatcattgataatgatattcgtgtgataaggtaaattaggcattgcatcctgaaaatcaagcgcgtctgcttcaactttgctggtgttcgtatcgatgaggacaaggtcatcggcaaagccattggcgacgatgtagtgagcggcggttgaaccgacgtgtcccattccgataatggcaattttacgtgacataatgtagcgctcctttgaaagtttatcgttcattaattaaattaccattattctcattgattttaaatagattttgtgagaaatatcgaaatcgtattcggactaagtgaaatagggtataattaacgcattaatagttgcaccaagaaagggaggagcgcgagtgtttaagcgcctaaaagattcggccttgttattttggtcacttgaaattttgattgtggcgaccttgatctgggtctgcacgaacattggttttttgtttcagccaatcggcacgtttttaagtgtcgtgttcatgccaattttgatttcaggatttttattttatatgttgaatcccttggtcaagttgttgactaaggttcattacaagaagtttcggatttctcgaaccggagctgtggctatcgtatttgtgctattattcgggttactggtgtggggagcggtttccctgttgccacggttagtcagtcaggtgacacaactgatttataacctaccaagtattgccactgagatgcaaaaagccgctactaagctgatcaataatagttcggtactgaaaagaattgatattagctcgtacaccaagcaattcaatggtgaaatcagtaagtattctcagaactttttgtcatcattatcaagtagtgttgttacggtgatttccacgattacgagtgtgacgatcatggcaattacgattccagtcgtattgttctatatgttgaaggatagtgagaaattcattccagctatcagtcggttcttaccgaagaaacagcggcctgaagtcattggtttactacaaaagatgggcgacacgatttctagttatatcagtggtcaggttattgagtgtttcttcgtggggacgtttacggcgattggctacatgttgatctcgcaaccatacgggttattgcttggcgtgattgctggattgacaaacattattccgtacgtaggaccttacattgggatcgcgccatcactcatcgtggccttcaccaagtcaccgatgcaggtagtgtacgtgattatcgtagtcgtgattgttcaacaggttgatgggaacttaatctatcccaacattattgggcggacactcaaaatccacccgttaacgatcattattttattactagcagcgggaaatattgccggaattcttggcatgattttagcgattccgttctatgctgtggtccggaccgtggttatttacctctataatattgtcgagttacgaaatgaggagcacttgcgtaagcaaacgacggtctatcagccgcaacctgctaaggcgactaaagcagacttgacgacgaccactaaatcaaaaaagtagtctgtgctataattggtgaattaagcttgaacgtggcataaggagtgattttttgaagaaagtaattacgtatgggacattcgatttgttgcataaaggccatattcggttgcttaagcgtgcacgggccttgggcgatcatttgaccgtttgcgtctcgaccgacgaattcaatgctgagaagggtaagcatgcgtacacctcgtatgaggatcgtaagtatattttgcaagccattcgctatgtcgatgaagtgttacctgagaaaagctgggatcaaaaaatccgggatgtcgttgataacgatattgatattttcgtgatgggtgacgattggcacggcaagtttgattttctaaaagactactgcgaggtggtctatttgccccgtactgaaggcatctcatcgacgcgtatcaagcacgatttagggatgcaatccaaggattaaccactaagctagatgatttatcagtcacaaaacaccgccgttacccgcaacttcaagctgcgtaacagcggtgttttaattaacagttattagtaagtcacgcctaaatgaccatggactggttcgatgcggattatagttagcattcagccagttcaaagggcttaatggaagatggcgttgagcgccaacacgcctccgagaccgcagacagcgatgatcgtttctaacatcgtccatgtaagcagcgtttgcttgacggtcaggtcgaagtattcccggaacatccagaaaccagcgtcgttcacgtgagaagcggcgacactcccagagccgatggcaattaccatcagggcggggtcgataccagcttgcgtcattaacggcgcaactaggccggctgccgtgagggccgctacggtagcggagccgagtgagacccgtaagatgacagcgactagccagccaagaatcagtggtgagatgctgctgccactgaacaactgggccacggccttaccaacacccccatcaattaagatctgtttgaaggcgccaccccaccgatgattagtaataacatggcaattgacttagtggcatcttcgatggtggccgtgatggccttattggtcttgtgttggtgaatccccattgaccagagggcgaataatagtgaaattaacatggcaattccgggtgccccaatcaaacgaatgatttggtcaagggtcgacgggtttttaggtgtcacaccgtgatcaacgactaattcgtagacggtggtgattgtcatcagaatcacggggaagagcgccgttaagacactgagtccaaacccgggtgcttcagatactttgaattgacgtttgttactgctaagtggcaggtgtggtttaccggtgaatgcgtcaggaaccatcttttgcgcccagcgtgaaaagagcggtcctgcgatataaacagttggaatcgcaataatgatcccgaatagtagcacatgacccacgttcgcatttagcgtcgtcgcaattgcagttggtgccgggtgcggtggtaagaatccgtgagtaacagataatgcggcgcccatgggaatccccagatagagaacgggaacttgtgcttcgatcgcaatggcaaagacgattggaatcaacaagacgatcccaacttcgaagaagagggcaatcccgatgataaatgaggcgactacgatggcaatttgtagccgtttgcgcccgaaaatatccaatagtgtcgtggaaatcgtgtaagcaccaccagcatcggctactaagcggccgagcatggcaccgaagccgaagactagtgctaactcacccagttgactgccaatcccgttctgaatactagtagcaatcttagttaatggcatccctagtccgattccgacgacgacggccgtaacaatcagtgcaatataagtattcagcttgaatttaataattaatagtaatagtagtaggatgccgagtgtaagaacaacaaatggcatagtggacactcctaacgatttagagtagcaatttcgtgatacaacggtgccaattgcgccgttacgtggtcaaaaacgacttggtgttgatgatataactggtggttggcggcgttgggttgataagtttcggttgcaccaatcatggcgtgaatcgcggttaaatcatcaatatgccccagtgccttgagtccaatcacggccgctgctagacaggaactttcgaagctcgctggaatcgtaatgggttgtcccaatacgtcagtcaaaatttgccgccataaacttgaacgggcaaagccaccagtggcccgaatcgcatgaactggttcggcggctgccgtcaattgtaggacagtattcaggttcatcacgataccctctaagaccgcacgtgcaatatcggctttggtcgtggtcgtggtgacgcccagcagtgaaccgcgggcatccgcattccagagaggcgcgcgttcaccacttaagtaggggtgaaataagagtccgtgggcaccgacgggaacggttgcggcaagcgctgtcaattggtcgtatggatcttgttgattcgcacgggcggtttggctttcagtagtgaagagctcatcgcggacccaccggaagacttgaccaccgttattgatcggcccaccaacaatccagtggtgcggcgcgacgtagtaacaaaatagtcgaccttcaggatccaagtatggttgtttcgtcatcacccgtacagcaccggaagtgccaatcgtaatggccgcaactcctggttcatcagcccccacccccaagtttgaaagggcaccgtcacttgcacccatgataattttcgttgtgggtgcgagtcccagggttgatgctgcgactggtgtcagtccatcgatcacggcgtcggtatcgaccaatggtggtagctgcgtgcgggtgatgtgtgcatagtcgagcgcgacaggttcccaatcgaagttataaagattgaataggccagtggcgttggccattgaataatccatttgaagttggcccgtcattttgtaaatcaagtattctttaattccgactacgtgacaggtttgtgctagtaattccggtgaatgatgggcaagccagtgaagcttaaccaggggactcatcgggtgaatcggcgttcccgtaaggtgatataggcgatcgcccaggggttgacttttcaattcagcggcgtcttgtgcggcccggttatctgcccaagtgatgacccgggtcagcggttgtttctgactgtcaagtaggatcaagctgtgcattgcggatgaaaaggcgattccttcgatgtcttcgggatcaatgccagcacttacttgatggatggtcgcttggactgcctgccagatttcttgcgggtcctcttcggccgtggtcacggtatcatgatagagtgggtagccaacgttggcactcgcaattacgtgaccctggtggtcgtacaagacggatttggtacttgtggttcctaaatcagttccaataaggtaagtcatggtgcttcgttcctcctattcgtgatcgacagcgtggccaccaaactcgttacgtagggcggcaacaactttaccagtgaatgtgtcatcggtttctgaacggtagcgcatcatcaaggccatcgcaatgaccggggtggcgacttgttggtctagggccgcgtctaaggtccagcgaccttcaccggatgaatgcataacacccttgatgtcatctagattaccatccttgctgaatgcatcttgagctaagcccattaaccagcttcgaatgactgagccgttattccacattttggcgacggccgcgttgtcgtaagtgaactgactatgctgtaaaacgtcaaagccttcacctattgctgccatcataccatactcaattccgttgtggaccatcttcaggtaatgaccactgccaacagggccggtgtacaaatatccattgggagcggcaatcgctttaaatagtggttcgacgacttggaaagtggcggggtcgccaccaatcataaagttgccatcgtggcgtgcaccagcttgaccgcccgacgtcccgacatctaagaagttgatgtggtgacttgccagtaattcgccgtggcggatactatcttgatagtgcgaattaccgccatcgaggacgatgtcacctgcacttaaagtctgggctaactgttcgataacgctgttggttgccttaccagcgggtaccatgatccacacgatccgtggtgttggcaactggtcaagcaaattggtgagatccgtggccgtcgccaacccgtgagcactggcggtactaagattagtggggttaagatccattcccactggcgtgtgcccgttatcctgcatgttcaacgctaagttcattcccattttacctaagccaatcaatcctaatttcatgatgaaacccctcttttatatgaaaaatattaagtactttttgtattcgcttacattgtaataaaactatttacataaatcaaccatatatttgtaaattattttcattagactgaaaataaaggcaaccaagcccggttttacaggcctgattgccaagaaaaaatttgttaaattgctgaccaaacggctgcgccgatacttgggaagagggtcacgagttgttcacgttgcgccggtgtcaattgatattggatcgctggtagcaacgtgttaatggtattttcggcctgttcaccgagttcagcggcaccaatcaaccggtgctggtcatccgtcacgagtaagttatggccggtgacatcgcgcgttgtctgccggaaccagtcatcctttaaatcattgacggtaactttgacatcatgagtgtcactggttggaagtgtaccaacttgggccaatcgtggggacgtgaagacgaccgatggaatggccggatacttgatgggggcattggtgtcacccgtgaataggtgggtcaggtattgcgactcaaagatagcagtgggtgttaattttggttgatccttggcgagaacgtcaccggatgcgtagatgccagcgacactcgtttgcaagtggtcgtcgacggtgattccagctgctgtgtagtccacaccgattttttcaagtcctaagtttgcggtgttgggctggcggcccgtcgcatccaagatccagtccgttgtaatcttgtcatccgcactgaggacttcgaagtggtcaccagtcgacttgatcgcagttggcacccattcacgttttaggactaaaccttgtttcacgagaatggccaataatcgttcaacgaatggttggtggaattgacgaagtgcttggtcaccacgcatgagtagggtgacctgactgccggctgttagtgccatgttggcgaattcgagtccgatgtagccggcaccaatcacggtgatgtggtgtggcaaagtggttagattcaaaaagtcgttactgtcatgggcgagttcagtgccgggaatgtccaaacgatgtggatgctgacctgttgcgatgacaatcttatcggcggtatacgtcttgtccgccacctgaatcgtatggtcgtcgacgaacgtcccgcggccattgatgagggtcacgccggcactagtcattaagccagcaatcatatctggtaagccggcgatgacgtcgcgttcgtggtcaaagttggcttgccaatcaatcgtcggttcaccacgcagaccgtatccttggaagttagcaacttgattttttaatgctaccggctggtctaaggtgattttagcgttgcaaccccgattaggacaggtaccaccaatcaaatcagcttcaatgacggctacttttttgccacgagccgctaacggaatggccccgtcaaacgttccgtgaccgctacctagatatacaacgtcaaatttttctgacatattaaaatcctcctcgttcccaaatcacagttatttaaaaacaaatacattgtacacaacttaatttaacatgccaaataaaacgcggccttaatttaaaagcatggccttgaaaacgattgcaactggtctgtcatgactttgttaagtgaattcccaccgaatcggtgcaagatggtcggtggtactggattttttggtcaaatatcagtaaaatatgtaaggctatgtttttttacggtgggacggtaccaccgtgcacgttgaatatacaggttatgatgaaaggaatttttaatgaataagacagaattaaccgccgcggtcaatacccggcgtacctttgcgattatttctcacccggatgccgggaaaaccaccattacggaacaaatgttattgtttggtggcgttgttcgtcaggccggaacggttaaagcccgtaaaagtgggaactttgccaagtctgactggatggaaattgaaaagaagcggggaatctcagtaacgagttccgtgatgcaattcgattacgatggcaaacggatcaacatcttggacacgcccggacatgaggatttctcggaagacacttatcggactttgatggcggtcgattccgctgtcatggtcattgactcggctaaggggatcgaaccacaaacgaagaagttattccaaatttgtaagatgcggggcattccgatctttacgttcatgaacaagttggaccgtgatggtcgcgaaccattggacttgttgaacgaagtcgaagaagtcctcggaatcgaaacttatccaatgaactggccaatgggtatgggtaagggcttaaagggcttatacgatcgttacaatcaccgtgtggaactttatcataatgaagctcatggcgaaacgttcttaccactagacgagaacggtgagcttgatcctagtaatgaattgaccaaggacagtatttatcgtgacacgttggatgaagtcgaattgatcaacgaagctggtaatgattttgacgaagctaaagtaatggcgggagacatgacgccagtattttttgggtccgccctcaccaatttcggggtcgaaacgttcttgaagacgtatctgcagtatgcgcctaaacccgctgctcataagactcgtgatgaccaagtcgttcagccaaccgacgatgaatttgccggttttgtgttcaagatccaagccaacatgaacccgaaccatcgtgatcggatcgcctttgtccgcatttgttctggcgaatttgaccgggggatggacgtggtcttgcagcggactggtaagaagatgcgcttaaacaactctacgcaattcatggccgatacccgtgaaacggtggaaactgccgttgctggcgatatcgtcggtctctacgacacaggtaacttccaaattggagatacgatttacgctggcaaaaatgcggttcaattcgaaaagttaccgcaatttacgccggagctcttcatgcgcgttacagcccagaacgtcatgaaacaaaagtctttccataaaggtattgaacaactggttcaagaaggggccgttcagttgtacacttcatattcaacgggtgactatattcttggtgcagtcggtcaacttcaatttgaagtcttcaaattccggatgcaaaatgaatataattcggaagttgtcatggaaccaatgggtagcaagactgcccgttggatcgatcccgaacaattggatgaaaagatgtccagttcgcggaatctattggtcaaggaccgctacggggcaccgctcttcttattcgaaaatgcctttgccgaacgctggtttgcggataagtatccggatgtcaagctgacctcgaagctctaggatttatattgtggtttacacttagctgaccaatctagttagattactgttcgtcagccgatgtgcgtcctatttcgacctccggggctgggtgacaattgctggaacgtaagccgacatcgatttgagctaacgcacaacccgcgtcagctcaaatacgagtcttattctaagccggaagaaaatcacttccagctaagaataatttggttactgagcattgcctagccaacggattaatgcggttttggcattagtccgttggcgtagcaagcacaggcttcagtggcaccgagcacgtttcgggaacccgctcgaatggctgatgaacggccacttaacttggtgcaattggtcgctaactcgaacttttcccagcgggcctaagctggctgctcttgatttaacggatagaaaagttacaatgtgtctcaagcaaaagcacaaacaaatatgtgaatagttcataaaatgatggggctgccaagttgatttggcggtctcatcattttttgtgtggcgggaccggatagaagtgatatgagaggttcttctaacatgcttatcggtccatgtaaattcaccatgtgaaccaacgttgtagcactgctaaggtgagagaattacgatacaatcaatctgcaatttagattgtagggggcgatgagattgaaaataaggggacgctggatgctgggattgatgttaggaatggggttgtggggcccgatgacggtgcacgcggcgacgaacttggtacggtggccagcggtgcaaagcttagcgccccggaattgtgaacttgaatcgaaacaaacgcgcttatatcaattaaatcgtgcaacgatgcaattaacgccacgtgggacggcccggacgactagtcactggcaacgggttggtcaggtgatggtgacacaaaacaagcggttagtgacttattggcaggtgcgtcacgggactgctgggcgactgagctgggcgttggcggacaccgtacgagttgtcggaaccagggccactgatattaagacacccacgcggcaaccgatgcgcgtggtgacaacggatcaacaggaacatggggtgacgcgcgcggccaataagctgagttatttgcccttaaaaggggcgggacggtacaccactgagcatattttgtttcgtcctaccgccgcgtatctagcgactcaagggctacaaaatcagccagacacgttgcgccagagtagtggctatcgcgaccattatcatttcaaaacagcactgtatttaccgcaacagttagggagccgcttgttgaatgacccacagagtgcgacgttttcagctgacaatcggtacttgtacgtcatgtacgtcaatgatcaacagttgggtggcgccgaccagactggctgggtcgttcgctatgattggcaacgcctgatggctttaggggctgggcaatcagggaagatggcgatggtccgagtagcagcagctcaccaattcgacgggaagatgacggcttttgaccgtcgggtgctggccgccattgaagtggggccggagtttacggcgggacacgttcagtcactagctttaaatcctaagacgaacgagctgtggtttatttcatcgacggcacgtgatcagcttgcaagtgttgcgcgactaaatccgcaatccctgacgccggatcttaaaattgcctttactactggtagcgggcgtctaggtgatgaactgacttttgatcgcgctgggcaggcctattattggacgcatgcgagtcagctcagaaatggcaatgtcacgctttatcgtggcacaatcagttcgacgactggtgtacattttgaacaactcgcgcaggggttagctaataatccgggtttcttcgcccaatcgattggatataacgagattactggtcggctctacctggtctccgatgagagtattacgtcacttccagcggctaaactgggacacttgacgactagtcaggtcggtgaggcgaactttgctggtgatcgcgagtttgaagggttagtcttcatgcaccacagccaggaaggtttcttgctgacgaatcggggcatcgagttgatgcgcataattgttgataagtagatattaaaatgcgccactcgctagattagattgaagctagcgagtggcgcattttagcatggttcgcgttaatcgaacaaaagtcttgtttaagcaaacggtggatctaatttcgttaaataacggcccggcaagtaaccttgatcttgcaggcgataccagacgaccccgttgtcgtcggccattcgctcaatcaaattgaccgtgtcaccatgagtgacggtggttaaatagcggccatatggttcgatgtatgtgtggacctgtttgccagggacaaaactgacaacgccggtttggcgaacaggccgtttattttggacgcggtagccggctggcaacttgagtaacagtgtgtcaccggtagttaattggaggtgcgtctccggaatccactgatcatcgccaatcgcataccaggtctcgtgagtgactaagcgaacgcgcatgtacgttttataagtgctaccgggctggagcttagttaaatagttggtcgtagttgccccaggatacggataaacggcggtcaacttgttgacttggacaaaaccagtactgaggtcagtttgctgccaattttgattgcggtagaaaaaaaggaccgtcttggaagtggtcgtgtattccccagtcacgtcgcctacggaacggaggagcttaaaaccggcgacggtcggcgcactgatttcgtaaggggttcctaatttcccccggtacatggtcggccggccaattagttcgcggcggtcaatgtcataggcgtacatccagactggttggccagcttggcgttcgtaagtcaacgtgatgctagcctgtggggtcgtaaaccagcgagtcaagccttcgatatggacgaggtggtagccggtgatgctgacggctggcaagtgaatctcttcgccaatggtgccagcaatcatatcagcagcctgcagttcattgccatcctgatctaggtggtgaacgagaactaatgcttctgtttggttaactgtaggtgctgcggcagtttgtgcggcaatggaacgtggtgcctcagtagcgcttgtggcggcttccgtgctgtttagtgcctgaagcattcctttaagtcggtcaagaaacgacacgtgaccactcctttcattaataaattaattatcactagtataacgcattcacaagggttctggcacgtcttaaataaattgtaaaattcccgctttgtcagtcgtgtatactaatatttaataacagggggcgttaacggatgaatctaaaacaattacaatattttttggccgtggcagaggaaggtcagatgacagcggccgccaaacgcttgcacgtggcgcagccaccactgagctatcagattaagcaattagaacttgaactaggcgtcaccctcttcaatcgcttgcctcagggtgtgactgttactgaagctggcaagctactggtggggtatgcccaacagctcacgcagttgtcggcgactgcggagaacaaggtccgggccctggcacacggcgtgacggggaccattaatctggggacagtttcatcctcggcaggggtcatgccgaatacggcattactaaagtggttagggcaacatcccgatgttcagcttgcgattacggaaggcaatacgtatgagttgttagacgatctgcataaacggttgctagacgtggcggtgttacgaacaccgttcaacgcgcaacatctagtctgtcgttactttcccgcagaacggatggcagcagtcattccgaagcgatattcacggtttgaaaagcggcgccagttacaactaagtgacctcgctacgttaccattgatcaagtaccgtcgttttaatgaattattccacgttgcctttctggaagcgtcggttacgccgacttacatcatgacttgtgatgatgcccgcacggcgatgcactgggctaatcaccaattgggagtggccctggtgccacggtcattggctgaaacctatgacggtggtgacgtgctgattcgatcattggcagatcatcgttttcagactcaactggccctagcaacgaccccggaagccttagcgaccccattagttgccggtttgatggcacaattccagcaagcgcagtcgctagactagtttaatcagtttgatatctaaaaatttaatcgcggttaagggtggattgctgatttaatcgggttgttaccgattacactagctagaaattgaagtggtgttttcagacgcaaaataagcctaatgactgtcgtactggggatacgctaaccttcatttaataattagatatcaatcggtttaaatggtacactaacaattgaaatttaaagggtgaaggtgaaggaaatgatttattcgttagggctaatgctcggcgttggggtaattgccggaattttcggtgctattttaggtatcggtggtggcatgatcgtcacaccaatcctgacacttggtttgggattagatattaagtatgcgattggggccagtattatcgccgtgattgccacgagttcgggctctaccattgcatatttacgtgatgagatgttgaacttacgcgtcgcgatgtttcttgaaattgcgacgacggtcggggccgtcctcggtgcagtgttgacgggggtgcttaatgcaacattcctgtacttcctatttggggcgctgttagttttcacgacgtataatatgattcgtaaattaatgagtaagaacggtgaattactgtcagtcaaagatgacaagctggcgacacagttgaacttaaatggtacttattatgataaagcattgaataagcaagttgattatcaggttgaaaacgtgccgggtggtttttccatgatgttcggtgctggtttcgccagtggcttgttggggatcgggagtggcgcgttcaaagtgctagccatggatacgattatgcatatgccgcttaaaccgtcatcagcaacttctaacctgatgatgggggtgacggcggcagcgagtgcgatggtctacttctttaatgggtcaatcaaacccggaatcgcggccccattagctatcgggattatcgtcggtgccttaatcggctcacgaatcatgacgcggctcaagccacgcttgattcgcatgatctttgtgcccgtgatgctctatctgggaattcaaatgattgctaaaggattcggggtgaccatctaatggataagcaaaaaacaactaaagcgcaagagatgcacgccgttgaaatgatgattgggtatattctacgaattggcgtcattgtttctgcaatcgtgattattattgggatgcttctgatgttgattcagggcaatggtggttatgcaaatggtatggaaccccatacggtcgctgatattctagccggcattgtggcacttaaaccatatgccgtgattatgttaggtttatttctattgattttaacgccaactttgcgggttgcggtctctatctacgcctttgcagtggaaaaagaccacttatatgtttggattacgacgattgttctcatcatcttaattgttgcttcggtgattgggtatctcggtaactaggctagacggagctgattaatcaggttgagtcgtgattaaaatgggcgcacatctaaaatggctaccagcttgtttcgaggttaatgtggaaagaatctaagttggtgtaaattcacgggctggtgtgttttatgccgatgtacgagtacttaactagccaatattgtttaataataagagaatgctgataaaaaatcagcattcttttttatttgtgcacttttagctgttttgactaacgtaaaaaagacctaatatcgtcatttttatcgttatttgaattatttattaagaaaaattgccgattgtgttcacttgataattgaacactgatgtgagaatataattgcttatatatcagtaatttcaggcatgtttatcagtatggataataatcgcaaaatgaaataattaagacgattatgacgaaataatgataaaaattagagtttaggattgattttaatttatttataatatacaattactttaacttttcgagggaaaagcacacacaaactattttaaagttaggggttgggttatatgaatttcaaaacagctgcaaaagtaaccgtcgttgccggcgcatccgtactattcttagctgcttgtggctcaagcaagagttcttcaagttctaagcaaacggccaattggaccgaatcagccgaattaccaacgatggacatttctaagtccaccgatgtggttagttctaacgcgttgaataacactaatgaagggttataccgtctcggtaagaacgggaaggtcacacccggaattgcgaaatccactaaggttactaatggtgggaagacatatacgttcactttacggaagaacgcaaaatggagtaacggggataaagttactgccaaagactttgtttatggttggcaacggaccgttaatccaaagactgcgtcacaatacgcatacttatattcagggattaagaacgctgacgctatcgtcaatggcaagaagcccgtttctagtttaggaatcaaggctgatggtgattacaagttgacggtcactttggataagccaattgcttactttgacaagctgatgggctttgtcaacttcttcccacaaaatgaaaaagtggttaagaagtacggttctaagtatgggacgagcagtaaggccatggtttataacggcccttacaagatgactggttggactgggacaaacttgtcatggaccttgaagaagaataacgattattgggataagaaagctgttaagatggacagcatcaagtaccaagtcgttaaggatccttcaactggcttgaacttatttaattccaataagctcgactttacgacactttccaacgaacaagttaagaattataagaatgataagaactacttagttcggaagacggcttcaactttctacgttgaatttaatcgtaaggatagcgataagactttagccaaagctttccagaacaagaagattcgtcaggccttgtcattagcaattaaccggaagtcctacgttaataatacgttaggtaacggttcgaccgtttctaaaggttacgtttctgaagacttagctaaaaacccgacaactggtaaggactttacgactgacgctgccgttccttctgcagttgactacaacttaacgaaagctaagaagttgtggaaagaagggatgaaagaaattggtgaaactaagctgaacatcaagcttctttctgacgatactgatggtggtaagaagtctactgaatttattcaaggtgcttgggagaaattacctggtttgaccgttactaaccagaacgtcccattcaagacccgtcttcaacggtcacaaaacgggaacttcgatacggttatctctgcctggaatgctgactttaccgacccaatttccttcttgtcactcttcacgtccgacaactcatacaacaatgggaagtatgacagtgccgcatacgacgatgctgtgaagaaggcggaaggtgccgatgccaataacaagactgcacgttgggctgacatggttgctgctgaaaagcaattgatgaatgatcaaggggtcatcccaatctatcaacaagcctcagcaacgttgactcggagcaatctgaagggcatcatctacaacactgcgggctcaaactacaacttcaagtacatgtccgtaaaataatgatgtaaatccacagaaaaaagtgtgtgtgctttaactgaatgaatgtgaagcaaaggggtaaggattgacacattgttaatccttaccattttgttttataatgagggatgtcattattttttaagttgattttaatagaatgcgaggaattctcatgagaaagtatcttttaaagcggatattttacttgttcctgacattattcattgtggcgaccgccacgttcttcttaatgaagttaatgcccggaacaccgctgcaaaatgaagctaaattgacccctagcgaaaaggcgtcgatcttggcccaatacgggttggacaaacctgtttggttgcaatacttcatttacattggcgggatcttcaaggggagcttagggctatccttccagttctctgatcaagccgtcagttacctgattggtagccggatgggaccatcaatgcagttaggtggtcaagcgatggtcgtcggaatcgtctttgggattatcctaggggccgttggggccatcaagaaggatacttgggccgaccgtttagcaaccatcttatcgatcttagggatcgcagttccaagtttcgtgttagccatcctgttacaatactacctcggcttaaaggctggttggttccctgttgctggttgggaaggcttcgcttacacgatcttaccaacgttagctttggccgccagtccgctggccgaaacggctcggtttatccgaaccgacatggtggacgtgctgagttcggattatattgagctagctaaagccaaagggttgtcgaaatttggtatcgtgtatcaccatgcgttgcggaacagtttgattccaatggttacgctgattggaccattggccgccgccttgatgacgggttcaatggttgttgaaaatatcttctcagtacctgggattggggaacaattcgttaaatcaattctggttaacgactacccaaccatcatgggtgtgacgattttctattcagcactcctttgcttactattattgttgaccgatattgtctacggaattattgatccgcggattcgtttaaatggaaatggggactagttaatggcagaaaatccaagtagtatcgatattaagcccggcgacttcgagccgttagataaacaagcgggtcctgataatgaacggatcgcagcaccttccttaacgttcggccaagatgtatggcggcgattgaagtctaacaagaccgcttttatcagctttatcgtgttagtattcttattcttagtggcatttggtggacgggcagtctaccatgttgatcctaatgcacagtcgccacggtatgcgaacctccctccgaagattccgggtgttagtatccatggtttgaatggtcacttgactcaatctggtaaggacgttgatgcgtatgcggcggccggtgcaaagtctgacgtgcattatcttctcgggactgattatctgggccgggacttactggcgcggattatgtatgggacccggatctcacttgaaattgcgttgattgctactttgattgacctgacgattggggtcggattcgggatactctccggttggaaaggtgggcgcgtcgatttattcatgcaacgtgtgattgaaatcctctcgtccatcccacaattggttatcatggtgttgatggccacggccttcacgaagactgggatggcctcaatcattgcggctatcgcgatcactggttggaccacgatggcccggctgactcgagcacagaccttgcaattgaagaatcaagactttattttggctgcacggacactgggtgaatcacccgtcaagattgcttggaaacacttgttaccaaacctttcaagtgtcattattattcaaacgatgttcacgataccaagtgcgatcttcttcgaagcgttcttgagttatatcgggattgggatcagttcaccacaagcttcattggggacgttgatctctgatgggcagaagaacttccaattcttgccatatcagatgtggtacccagccatcgtgctgatcatcttgatgctcgcctttaacttgttaggtgacgggatgcgcgatgcgtttgatccaaagtcaaaacgttaggaggacggcagcactatggaaaaaccagaaaatgtgattgaggtccgcaacttggaaatcaatttccatacttatgcgggcgaagttaaagccatccgtgacgttagctttgatttacgtaagggtgaaaccttggcaattgttggtgaatcagggtctggtaagtcagtgacgacacgttcactgatgggcctgttagcacctaatgctgaaattaaacgtgggagcattatgttccacggtgaagatattattaaaaagtccgaaaaagacatgcaacacattcgtggtaaggatattgccatgatcttccaagacccaatgacatcattggacccaacaatgcggattgggatgcagattgcggaacctttgatgaaacataagggtttgaagaaaaaagaagcgatcgcccaagcgctagagatgttgaaattggttgggattactaatcctgaaggccgaatcaatgattatccataccaattctcaggcgggatgcggcaacggattgtgattgcgattgcattggtctgctatcctgaagtcctgattgctgatgaaccaacgactgccttggacgtgacgattcaagcccagattctggacttgatgaaggatttacaaaatcgaattgatacgtcgattatctttatcacccatgacttaggtgtcgtggccggaatggctgatcgggtcgcagtgatgtatgccggtaaaatcgtggaatacgggacagtcgatgagatcttcttcaatccacaacatccttatacctgggggttactcaattcgatgccaaccttggatactgaaagtggctcattattagcgattccagggaccccaccagatttgttggaaccaccagttggtgacgcctttgcagcgcggagcgattacgcgatgaagattgatacggagaaggaacccccattctttaaggtttctgatacccattacgcggcaacctggttgcttcatccagatgccccaaaggtaacgccacctgctgaaatcgttcggcgtcagcaaaagtttgcggccatgcaaaaaccgcaagcaccaatttcaaatcccgtagcaaaggagtaagtagacatgcctgatgaacgtaaaaaaattctagaagttcgccatttaaagcagtattttaatgtcggcaaaaaagatgaagtccgggccgttgatgacgtctcctttgacatttatgaaggtgaaacatttgggttagttggtgaatctggttcaggaaagaccacgaccggacgttccatcattcacttatatgaaccaactgatggtgaaatcatttttgacggtaaggacgtttccaaattacacaccaagaaggaacgccatgaatttcgccgggagatccaaatgattttccaggacccatacgcctcattgaatccacgaatgaaagtcaaggatatcgtggcggaagggattgatattcacggtttagccaaggatgatgcagaccgaaccaagcaggttgaagacttattggagacggttggtcttaacaaggaccactctagtcgttatccacatgaattttcaggtggtcaacgtcaacggatcgggattgcccgggcgttagcggtagagcctaaattcatcattgctgatgaaccaatttctgcgctggacgtttcgattcaagcccaagtggttaacttgatgaaggaattacaagttaagcagaacttgacttatttatttattgcgcatgatttgtcaatggttaagtatatcagtgaccggatcggcgttatgcattacggtaagattctggaaattgggcctgcggatgaagtgtataatcatccgttacacaagtacaccgagagtttgatctcggcggtgccggtacctgatccagagtttgaacgtaaccgtaagcaggttccttatgacgaaacgaccgaacatgacggtaagaagcggcgaatggtcgaaattgcaccagggcactttgtccgggcaactgaagacgaaatcccgatatacaccaagcgggctgttgacgcggggttaattacggaattttctgagtaacggctaataaaacagacggcgagtgcgaatactcgacgtctgttttattattcagtagaatatttaattaactgtttagataagtttattaattaataaccattataattaactcatgttaacttgacatataaatttaatatgtaaaaaatattgatggaatcaattgtcaaaaagccgattaaatcggggatagacggctatttttgaccagctaaactgtgaccggtagtcaaagttatttgtgtaaattttgtaattatgcaataataatattgttaataaagtttgttaacaaatataactattcgtcttaataattgattcgcaccattttttttaaaaaaaatattgcgagtgaaacgttgacttaattgaggtcgtcaaggatacggttatcgagcggcaatgacgaatcgtatcaaaaatattgatttaacaggaatcaattcgcactattttttttaaaaaatcatgcgaagggacaatggcttgttttgaacggttaatgaaaaaagtgcaaatttcaggaaggatgctgttagtatgcaacaaccaattaattatattatgaatatcatgcaccttgaacgggacttaaaacgacttacgtcgaactggtcgtccgccacagggcttagtttgaacgagttacggatcttagtttatgtcgaacaacatcctggtatccagattggtgatgtggcaaatgcgttgaatgtggcgaaagcctcgttggcacaaaacattggcaccttaataacccaaggatggttgaaaagtcaaccaattaaacaagaccggcgtttacgggtcttaacgcttacgaaggctggtcaggatcgaatgaaagatgttgatgcacaattgactaaatcacttgacacgacgccagcaacacagttagcggatcaattatcagctttgcaattataggcagatgtacacgttcacggatattaagtgaagtaatatccttaacgcgggataaaggggagactctttgtcccgcgcttttgttttagcacttaatagtggggagcattataggttaacaattactttgtttagtttactctaggttaagtaatttaaacttaataagattgattgaggtgtaatggagcgtatgcattataatgttgaaccgctaagaacggaccaagaaatcgatgattttttatgggctgtttcacaagcgcgttatggggaacgtaatcgcatgattgttttggttggaattaacacgggattacgaatgagtgatattttacgactgaaggttgggcaagtacgtggcaaagatcgtgttatgatcatggaacaaaaaacgggcaagaagcgctggttgtttttgaaaaacctcaaaacggaattagcccactttacgcggtatcggggggcaaatgaaccgttattctgtagtggtcggggcggagctttaaccgttaatggtgtctatcgagtctttcagacggccggtgagtacctggagcgggatgatattggtacgcacacgttgcgcaagacatttggctatcattattatcaaaagactcgtgacattgccggattgatgatgattttcaatcattcgagcgagcaggtgacaaaacgctatattggcattgagcgtgataatttggaacgacaattatgggactttaaattaggcgtttaattatggcagagacgcgggctattcatagcgactcaatgaggatttgaggtaggcacaaaaaagagccagaagtgtaaacgattgtttacgcttctggctctaaatttaattatcttattcggacttcgtctcagccgccaaaacaatcttgccgtcttcaacttttgcaaccatgttcttaacgtcgccgtggtccaaatagaaatcggcgatgcgatcttcgatttgttcctggataacacgccggagtgggcgagcccccatctgagggttgtaacctagttcaacgagtttttcctcgacaggttctgtgacgtggacgtgtaagccttggttagctaacataccgttgacgtcttcgatcatcaaaccaacgatcttcatcaagttttccttagataaagcgttgaattgaatgatgtcatcgaaccggtttaagaattctggcttgaagtagtccgtcaaccggctagtgatatcgtgcgtcttgccttcagcagcggcaccaaaaccgacattagcttcactgtcgccagtcccagcgttggaagtcatgatgatgatcgtatccttgaagctgacagtccgaccttgtgagtcggtcagccggccatcatcgaggatttgcaagaacatgtgcatgacatccggatgagccttttcaacttcgtctagtaagactaggctatatggatgacgacgaacctgttcagttaactgaccggcttcttcgtagccgacatagccaggcggtgaaccgatcaacttagccactgaatgtggttccatgtattcactcatgtcaaaccgaatcatggcatcttgagaaccaaacagttccttagcaagttgtttagccaattcagttttaccaaccccggttgggccgacaaacatgaaggaaccaattggccggccagttccgttcagaccgattcgattacgccggatggcccgggcaactgcttcaaccgcttggtcttgaccaataaccgtactcttaaggtcgggtgctaaggtcttcatttgagcctgttccttagcctgcaagtcaccaactggaatacttgtcttttcttcgacaatttgttccatgtccttgaccgttacagtggcagtatcgttattaggctggtctgaactttcatcgggcttagctttttctaacttagcaacttgatcgcgatagtaggcggctttttcgtagtcttccttcttcaaggcgtcctgtttctgcttttctgcctcgtcgatcttttcttgaatcgtctttggatcgaccgtcttcaacgtcaagttcttacgtgaaccagcttcatcgagtaaatcgatggccttatcaggtaagaaacgatcttgaatgtaacgatttgacaacttgacggctgccacaatggcatcttgatcgtatttaacgtgatgatagtcttcgtacttcttctgaatgccttcgagaatcttgatagattcttccacgctcggttcgttgaccgtgaccggttggaaccggcgggcgagggcggcatccttttcgatgtcgcggtattcgtttaatgtcgtggccccaactaattggaaatcaccacgggcaagggcgggtttcagaacgttcccagcatccataccaccttcagcattaccggcacccatgatttcatggatttcgtcaatgaagaggatgatattcggattgctttgaacctccttcattaattgttgcattcgttgttcaaattgacctcgaataccggtgccttgaacaagggaagccacgtccaaacgaataatttctttatctaacagtttttgtggaacttgaccagaaacgattttctgtgctagtccttccacgaccgccgttttaccaaccccagcttcaccaattaaaacggggttattcttggtccggcgattcaaaatctcgataacccgattaatttcggtatcgcgaccaatcactggatcgattttgccctgtttagcttgcgctgttaagttgaagccgtattggccaaggaggccaccgccgttgttattgccacgacgattgccgccattaggaccagctggctgggtcggtggggtctgttgttgccggtaagcgttattaggatcaacgccaccctgcattgcacggaaaatgtcgtcaagaccaccaaaaccgaatggatcttgtgccatatcagcacctccaactccgttatttggttgctgttcctgattctttagcagttgatagcaattttgacaaaggttgatttgtcgccgctgaccgttgacgctcgtatataaatggatcgtcgcttcgttcttatggcaattgtcacaaagcattatgctgtcacacacctttcgcatcagaaatataactaaatcgattaggatcatagttaaaggttcatcggctctttgacctttgttgacctttgactattagtatagcgaatttacggactgttgcaagtgaaaagcctcagggtcaaaactggacgtgcggccgggataattcgcaatggctgattgattcaattatttctgaatagtctggatagtcgcaactcatagcttgtcatgtaaccggattcgttgtatattaattatctggttaggataagtgatgatgtaactgtctgtctatattatagtacaaagcggtttttttgcatgtatcgagcctgaccagttttgatgtttgcagcgcatcgtttttcattggtgaccgtcaacagccagtgagcggcggagaactttgttcgtaaatatcaaaataatgatgcagtaatgtgtcaacctaactttgaggaggcggtaattgtttggcaacggattatacccagttaatggaagcgttgcgtcatggcgaacgcgacagttttaccgtaacgccggatgaatttatggcttttcacgatgcctatatgaagtatgagtatcgtaaacgagtcattggtacggcggacttagatggccgcattgtttaccatttcgagaaggatggtaagacaaccaattaataggcctagcttgaatgaaagggcttgtattttaattggataattgctatcatcattattaagggctcttgagtatacgtgttggcggcaactcgaattgactcggaaccaattttaaatttatttatcttgaaggagatcgaatagttatggaaaagaaagaatttcacgttatcgcagacactggtatccacgcacgtcccgcaactttattggtacaatcagcaagtaagttcaactcagaaattacgttgcaataccaagacaagtccgttaacttaaagtccatcatgggtgttatgtcactcggtgttggtaaagacgctgacgttaccatttctgctgaaggtgccgacgaagccgacgctatcgcagctttaactgaaacgatgaagaaagaaggattatctgaataatggctgaaaaggtactaaaaggaattgcggccagtgatggtgttgcaattgctaaggcctatatgctagttgatccagatttatcattcgaaaagacaacagtttccgatacggatgctgaagttgcacggttacatgacgctttcgatgcttccaaggctgaactaaaggtcattaaagacaaagcggttgaaaacttgggtgaagaagaagcagaagtttttgaagctcatatcaccattttgtctgacccagaaatgctcggacaaattgaaggtaagatcaaggatgataaagtcaatgctgaagaagctttgaaggaagttactgatactttcatttcaatgtttgaagcgatgacggataatgcatatatgcaagaacgagccggtgatattcgcgacgtaacgaagcgggtcttaagccacttgttaggggtaaccttaccaagtccagctttaattgactccgaagtaatcgtggttgcccacgatttaacacctagtgatacagctcaacttgatcgtaagtatgttaagggcttcattactgacattggtggtcggactagtcattcagccatcatgtcacggacgcttgaaattccagcggtcgttggatctgaatctgccacgactgatatcaaagaaggcgatacggtcgtcttggatggtatcaacggtgacgctttagtagccccaacggatgctgaagttgctgattaccaacaaaaggctaaagactttgttgcgcaaaaggctgaatgggctaagttgaagaacgaggccaccgtttctaaggacggcaagcactttgaattagcttctaacatcgggacacctgacgatatggatggggttttggatgctggctctgaagccattggattattccgttcagaattcttgtacatgaacagttcagaattacctgacgaagatacccaattcgaagcttacaagaaggttgtcgaagggatgaacggcaaacccgttattgttcggaccatggatatcggtggtgacaaggaattaccttacttgccattacctgatgaaatgaacccattcttgggttaccgggctattcggatttccctcgatcgtgatgacatcttccggacccagttacgtgcgttattacgtgcgtcacattacggtcaattacggattatgttcccaatgattgcaacgcttgacgaattccgtaaagccaaagctatctttgaggaagaaaaagccaagttggttgcagctggtacgcctgttgctgacgacatcaagcttggtatcatgattgaaatcccagcggcagctattttagctgaccagtttgctaaggaagtcgacttctttagtattgggactaacgacttgattcaatactcatttgctgctgatcgtggtaacgaacaagtgtcatacttgtatcaaccatacaacccatcgttgttgcgtttgatcaagcatgttattgacgctgctcacgcgaacggccgcttcacgggtatgtgtggtgaagttgctggggatcagattgcggtgccattattgatgggcttaggtttggatgaattctcaatgagttcaacttccgtgcttaagacacgttcattaatgaagaaacttgatactaaggaaatggctaaattagctgataaggcacttaacgagtgtgttactaacgaagaagtcaaagaattagttgaaaagaacgtcttcggtaaataaacaatcaaactaagagcaaatctgtggatttgctctttttttgtgggtaaatgcgggtcattaaccagtttgtactagccccgggtttagcacgacggggagtgggctacccgcaccggtatgatgagagctggcacagtacatgacgcgaattgactggacatttaggcattgtgacaattgtccatagttgcgaccgcgcgctagtcaatgatggacacagggcacattgctactcgctgttgacggtgaagagttggtgtagtggaaacgatgtaatggcggtgttgagtgatgcctagcgattacaattcatcatttcgaattcattttctataggtgtagctggtcagatagattttgtcatgaactcttaatttatattaagattatttgcaactcggatgtttaaccaatataatgtttataatataggcattaagtcgaattcgtgatgatcatgaaataatgatctaagcgcggttaagcaacatcgattagcagcacggttaattgatggaaataaggggagaatctacgtgaatatcgggatatttacagacacatactatccacaagtgagtggggtcgcaacgtcaatcaaggtgttacgcaatcaactcgaacgggctggtcatcaagtctatatctttacgaccacggatccccatgttgataagaatatttatgaacgcaatatttttcggtttacgagtattccatttgtttcgttcacggatcggcgcatcgccgttcgcgggctttttaaggcttaccaggttgctaaggatcttggcctggatattgttcatacgcagacagaattctccatggggatgattggtaagtttgttgccaaacaattaaaagtcccatgtatccatacgtaccacacgatgtatgaggattatctacattatattgcgaatggtaagttgttaaagccataccacgttaaggaggccacacgggcgtattgttatcatctgaacgggattgtagcaccgagtgagcgggttgcaaatacactgacgggctacggcgttaaagcgccaattcgcattattccgactggaatcgacattaatcagtacgagcagcagtcgacggtggattatcggcaaagactcggctatcagtctgatacgccagtattactttccttgagtcgtttggcctacgagaaaaacattcacgaagtcattgcagccctaccggcgatcttagaacaggtgccgaatgcccaactcctgattgtaggtgatggtccggcacgtgaaacactggaaaatcaggttcaagacgccggcttaacggcgcacgtacaatttaccggtgaaattgataatgatgaagtttataactattaccagatggctgacctgttcgtttcggcttcgaactcagaatcacaggggctgacgtacattgaagcaatggctgctggccttaaaacggtagtggctgctagtccgtacacggatcaattacttgatgatccgtcactggggacgacctttacaagtgagaccgatctgatcaaggatgttgtgcgttatttacaacatcccaatacttttaacgatcccaagccacggcagaagaagctttaccaaatttccgcagagtatttcggcaagcaagtgatcaactactatcaagacgtacagctggcgtattctgaatcagcggataaatcggcgaatattagtaattaacgtgtgtcaaatcgtcaatgagcaccgccaaaacggggatgcttattcgacgtatgacgcgtaaggggacgaattatgttagacattaccatgttttcaaaagctgactccgtcaagggtcagggagtcggcagcgcctatctagaattgatgcggttgttgcggacccattggcaggatgaatttaatattaaagtcaatcgatatgggcgctccgccgtttcacattaccatacggttaatccaatgttttacctgtctacgtttatgcctaatcgaggccgtaaaatcggttacgtgcatttcttaccagagacgctcgagggtagcttgaagttgccacgaccattccaaatgattttcaatcgttatttaatctcattttataagcggatggaccacattgtggtggtgaacccgaccttcattccaaaattggaagcataccatatcaaaagagcggatgtaacgtatattccgaattttgtcagcaaacgtgaattttacgaaatgactaaggctaaacagttgcgcttgcgccaacaatacggctatgatcaaaataaattcatgattatcgggaccggtcagattcaggatcggaaaggtgttcctgattttattacgcttgcaaagcagaatccagatatccagtttgtatgggccggtgggttctcgtttggccgaattacggatggttatcaggagttgaagcaggtggtggataacccgccagctaatctgtcgtttccaggcatcgttcctcgtgagaaattggtggactattataatatggcggatcttttcttactgccttcttataacgagttatttccgatgtccgtgttggaagctttcagttgtgggacaccagtattgctccgggatttagatttgtaccgggcaatcattgatggctactatcaagcggccagtgatgttgatgatatgcaacgacagatcgaccagttacgccataatccagccgggttgcaattcttgcatgacaaggcggttttggctgctcaggattattcggaagagcgccttgccaaagtttggcatgatttttatttgcaacaggcaaaagaggggtagtcaatgacaagaaaaaatatctggtcattactcgtaatggttgcgttaggcgtcggcatttcgtggtactcactgcgcaatgtcaaactaagcaatctaatggacgatattctcactttgaattggtggtggttattagttgcgttagggtgtgtcggactatacttcggtctggaagccgtggtggtgcaaaagtttgtcaggcaccgttatcggaactatcgctttaagagtgccctgcgcgttcctttagccgagcaactattcaacggtatcaccccgttttcttcgggtggccaacctgcccaaatcttcgtgatggcacaatcagggattgacgctgggcgggcaagttcagttgcattgatgaagtttgttgtttttcaggccatggtggtattgaatttcttattcgccatgttaattggttttcattatttagctgaaaagttaagttacctgtcactatacgttttgttaggttttctgattcactttgcggtgattgttggtctgttgctggtgatgtactggtacaactttacaaaacgagcggtgaagatcgtcttgatcccggtcagctggtttatgaaagctgagcgatttgccaagttcgaaaacaatattagtgaaaaaatcgattcgttctacgaagaaagcgttcgaatgaccaaggactggcggatgctggtcgaagtttgtatcgtcaccttcttacagctactgttttactacctgattccgtattttattatgcgggcaatgggaatcgatgatgttaatttgattatggtgactagtttgaacgtgttgatcttcttagtgacatcactattcccgattccaggtggggccggtggtgctgaatttggtttcacggcgttgtttgctaagttcattcccagccacagtaagctgattttagcgatgctgatctggcggatcttaacgtattatttaggactattcttagggatgatcgccatggcgatgcggcctgaaaaagcagaagaaattccgattgcggcacctagccggtcggattcacaagaacagtaattttaatgggccgacatcattgttcgacccatttttcgcggttacgaattaaaggaaggtactatgttaaagttaatcaaacaacggttggtatggggactagtgttgacagcgacagtcagcggggtgttgagctgcaatgtagcggcacacgcgaccagtagtaaggcggatgaggtcaaagccgcctacgtgatggatgccaagtctggtcaggtcgtttatgcacagaatgccgatcagaaattaccaattgcgtccttgagtaagctcatgacgctgtatttagttgaacgggccatcgagcatggtcagatcaagtggacggatgcagtcccaattcgcaaaaatgtccgtaagatggcaaccagtgcaactttatccgtaatgccgatgcccgccaaggagacgtttacggttagggagttattcgcagctaccttggtagggtcttcgaatagtggtgccattgcgctgggggagtatgttgctggcagtaatgataagttcattaaattaatgaatcaacaagcgtccaaatggcatttggatgcgagttttattagcgcttcgggacttgataatactgatttgaaaaattacgatttaaaaattaagggaaccagcgatcaggaccaaaatctggtgtcagcaagggctgtgacgaccattgcacaacatttgattgatgcttaccccgatgttattcaagttgctaatcaacgttcagtcaaaattcataagtatacggtcccaacttcggtggagatcctgaagggcgccgagtactatgatccccgcgtgccagtcgatggactgaagaccggttatacgaatcaggccggtgcttgcttagtcgctacataccggcagaacggccaccggatgattgcaacaacacttggcggtgcgtggcagtttacggcgaacaacaacttgcggctgatgctcaaaacgaccgagcagtataaacaggttgtgcctaagagcatcaattatcagattccggggacgcagaccaaagtgcgtctggtgacgaagtacaattcaaaactgtgggtgaatagtaagcagccaatgacgcagaccaaaattgctttgtggccattacatcggacagcgccaaattatctggctgctaatacggccgttcttaaattgcgattgacggatccattgtcaggaacggcgaaggaagtcatttatcggacgcctgaagcgctgacgatgcttggatcacttcaatgggcaacagcgcccgcaaaacggaccaccacgggcacgtatgcgttcgcaaagtgatgctcgcttaatagatcgtgtgatgctgaagacaaataaaggtgcgccaactatcgtaatttacgagtagttggcgcacctttttgagttgaatccaattcagtcattgaaatgactaacagtgatgaactaggacagttagctggtggactgtcgttgcttagttgatacggttagcaggttcctgcatatatgcagtgaggcgatccatggcctggtggagcttttccatgctagcagcgtaacttagacgcacgtagccttccccctcggcaccaaaaccagtccctggaataatcgcgagctgattcttgcgtgctaagtctttacagaatgccatcgagtcttgttcaaagccagctggaattttcgcgaagatataaaaggctccggtaggacgtgcgattttgaaaccgagcttcgacatcgtttgataaacgaaatcacgccgagcttggtattcttgccgcattggttgcgcatcatcgattccgttggtgagggcttcaacaccggccttctgagcaatcgtggttgctgcagtgacgtagtattggtggacttttttaagttgggccgtcatttccttagaggcaaacaggaagccgattcgccagccagtcatagcatgagacttcgataatccattgatcaggatcacttcgtcaggaatgaatttagcaattgagacgtggtcgctaccgtaagtcagttcactgtaaatttcatcggatacgacccacaagttatggcgatggaaacagtcggcgagcgctttgatttcatcttcaacataggtgacaccagtggggttattcgggtagtttaacacgattcccttgaagttctcgtcaggatgagcagcaataaaatcgtcgaccatcttaggcgtaatgacaaaatcgttaacgcctgtatccatgaagaggggcttggcgtgtgcttcttgaatgatggggatgtacgctggaaagattggggacggaatgataatggcgtcgccaggattacagatcgtcgttaatgcagttgcgatagcttcagtcgctcccacggtcactaagacttggtcttcagcatcatagtggacgccgtactttgtctcttgaaagtgggcggccgcttggcgtagctccaacagacctgccatgccagtatagtgggagtagttgtcatcaatcgcctttttagcagccgctttaacgtgctcaggcgtgttgaaatcgggttcaccgagcgttaacttgaccatatcaggtatcgcactaacttcttcgtcaaactggcggatggttgaaacttgaatgtgactgatggtttcattgagatcgtctctaaatagtgtcatatatccgaactcctttaatttataagttgttctaattttagcacaacttctcaccgtcttagcaggaagttagggtataattataagtgtgaaaatttgtggtaaaaatgggctttctactaaaaaaacgtgttattagtcctattttttgctagaatgtaaacaaaacttgaaggagcgagattagtataatggataaatctgaactatcagcaattctcaaacgactagaagccatgcgcacaactgaagcaaccgaagtgcaatcacggcggttcgaaaaggaaggcgttcaacgtgggcaagtagcgtatgatcccgctacctcgacgtacacgttacaagaattcaatccagaccaaacgtttgaatttgataacattgacctcgtggcaattgaattatacgatttgctaacggataactagattcccccaaaatccagatagattttcgatagatccatattatgacgcgttgtaatgttgaagaatttttgaagaaatcttcaagatattgctaactagtacgcaaccgttataatatggatttgttaatagcaataacggaggaagaaattaccatgcctaaatttataaaaaacacggttgggaaggtcaacacaacgttgggcttttacctcctaaccgtggtcttattttggctaaagacatatatcgcttataagagtgagtttactttaggggttaagggacccgttcaggaatttatcttgttcttgaatccatttccgacagcgatcgtgctgctcggtattgccctatatttccgtggtcgcttaaagtattggattatgatgatcattgacgccctacagacgacgtggttatttgccaatatcttgtattaccgggaattctctgatttcatgtcggcgggggtaattaagagttccggtgctgctagtaataacctcggaaagagtttgggacagatcattcatggaaccgacttcctagtttatgcagatgtcgtgttgctgattctgttattagccttcaaggtcattcggatcgatccacggcctttcaaaattcggtatgctgcaacactgaccatgattggggtggcgttgtttgctgttgacctcggcatgtctgaacatgaccgttcagatttattgacgcggacttttgataacaactacatcgttaagtacttgggactcaacacatatgcagggtatagcttctatcagaccgaaaaggaaagtgcgacgcgcgcccaagcaagtagtagtgatatgaagagtgtgctagcctacctcaagaaaaaccaggctggcgagaacgtcaaatactttggtaaagcgaagggcaagaacgtcttcgtgattcatttggaaagtttccagcaatttttaattgattataaggtcgatggtaaggaagttaccccgaacctgaacaagttctatcatgataagagtactttgagttttgataatttctaccatcaagtggcgcaagggaagacctctgatgctgaaatgatgatggaaaattccttgtttggtttaccaaccgggtcagcgatgacgcagtatgggacgtcgaatacgttccaggcagcgccagcaatcctgtcacaaaagggctatacgactgcggctttccacggtgatgtggctagtttctggaatcgggataacgcgtataagtcgtgggggtataactacttcttctactcttcttactataaagagaagtcagactacaatattggttatggcttgaaggataaaatcttcttcaaagactctgttaagtatttggagcaattaccacaaccattctacgcaaagctgattacgttgacgaaccactatccatacgaattggataagaagaaccagtcgatcgataagacgacgaccggggattcaaccgttgatggctacgttcaaacggcccattatcttgatcaagcctttgccgaattcattagttacttgaagaaggccggcttatataagaatagtatgattgtgctttatggagatcattatgggatttcaaacaaccataaggctgccattgcacagttattgggtaaaaagtcggtaacgagtttcgacttggctcaattccagaaagtaccatttatgattcattctgaaggaatcaagggtggtattaaccacacgtatggtggtgaaattgatgcgttgccaacgatttttgacctgttagggatcaagaacaagggttacatccagttcggaacggacttactgtcgaaacagcataaccagacagtggctttccggaacggggattttgtctcaccgacatatacgaagatcagtgggacagtctatgattcgaagaccggtaagaagctaacggatatgacgacgaagcagaaggatactgtcaaacagatgcaaaatcatgtgacgacggaactctcactctctgatcgggtcatccagggtgacttactacggttctacacgcctaagggctttaagaaggtcaataagtcggactatagttataagctgactaagaccctcaaatcattgaaagagatccaagctgagaagaagacgagtgttctctcgaagcataagggcaaatcaacggagagtctgtataagacggatgcaccagaactgtctagctcaagtgacagtagtagtagttcaagcagtagttctgattaatcgaactcgtatcaactaagggataacgctgacggcgttatccctttttggttgcggaaataagctgccacttgttttgaccacagcgcggcacactattattaagccgattgttgcgcagtgtgaattgacactgatggtgaacgatgaagtattaccaattttggagtcccaagtaaatgcaaagttggaatggtaggcgcgtcgcggatgttgtgaaccgataaagtacggtgatgaggtggggatgctgactgattggttgtcttgatttggtagattgtcagcgaaataatattcattatgctagcgttggtttactttgaaaaacagtcgttgaaaattaaagggagatttattgaacttttgcttgctatcttaataaaaaccccgtagaatatagtctattgcgacattaagcggtgtttaaaacttttctgaaattaattcataaaaagggttgacccgggtcgttattcttggtattatatttcttgtcgttaagagcgatatgcaacattactcattattatgaatattcaaattgatgtgagcatttacattgaatagttattcaaaacaatttataaaaagatgttgacagcttgttctgatgatgataaactttaatagttgcgttgaggtaatcaacgaacgatttagacctttgaaaactgaacaaagtttcgacgaatcaaatgtgtagggtctcttgattttgaatcaagagcaaaacatttgcgaagtcaattcgctagcaaataaattttagtaca

(The sequence listing continues in the following parts.)
